United States Patent Application Publication US 2021/0254056 A1 - sequence listing, part 3

SEQ ID NO: 3099 - protein, 1903 aa, Homo sapiens
  MOD_RES (17)..(17): Selenocysteine
  MOD_RES (45)..(45): Selenocysteine
  MOD_RES (52)..(52): Selenocysteine
  MOD_RES (67)..(67): Selenocysteine
  MOD_RES (87)..(87): Selenocysteine
  MOD_RES (112)..(112): Selenocysteine
  MOD_RES (159)..(160): Selenocysteine
  MOD_RES (191)..(191): Selenocysteine
  MOD_RES (209)..(209): Selenocysteine
  MOD_RES (238)..(238): Selenocysteine
  MOD_RES (272)..(272): Selenocysteine
  MOD_RES (282)..(282): Selenocysteine
  MOD_RES (304)..(304): Selenocysteine
  MOD_RES (402)..(402): Selenocysteine
  MOD_RES (471)..(471): Selenocysteine
  MOD_RES (513)..(513): Selenocysteine
  MOD_RES (516)..(516): Selenocysteine
  MOD_RES (545)..(545): Selenocysteine
  MOD_RES (572)..(572): Selenocysteine
  MOD_RES (595)..(595): Selenocysteine
  MOD_RES (598)..(598): Selenocysteine
  MOD_RES (607)..(607): Selenocysteine
  MOD_RES (610)..(610): Selenocysteine
  MOD_RES (621)..(623): Selenocysteine
  MOD_RES (628)..(628): Selenocysteine
  MOD_RES (650)..(650): Selenocysteine
  MOD_RES (658)..(658): Selenocysteine
  MOD_RES (684)..(684): Selenocysteine
  MOD_RES (697)..(697): Selenocysteine
  MOD_RES (703)..(703): Selenocysteine
  MOD_RES (765)..(765): Selenocysteine
  MOD_RES (769)..(769): Selenocysteine
  MOD_RES (783)..(783): Selenocysteine
  MOD_RES (787)..(787): Selenocysteine
  MOD_RES (816)..(816): Selenocysteine
  MOD_RES (824)..(824): Selenocysteine
  MOD_RES (835)..(835): Selenocysteine
  MOD_RES (908)..(908): Selenocysteine
  MOD_RES (920)..(920): Selenocysteine
  MOD_RES (963)..(963): Selenocysteine
  MOD_RES (966)..(966): Selenocysteine
  MOD_RES (977)..(978): Selenocysteine
  MOD_RES (994)..(994): Selenocysteine
  MOD_RES (1013)..(1013): Selenocysteine
  MOD_RES (1056)..(1056): Selenocysteine
  MOD_RES (1058)..(1058): Selenocysteine
  MOD_RES (1061)..(1061): Selenocysteine
  MOD_RES (1088)..(1088): Selenocysteine
  MOD_RES (1114)..(1114): Selenocysteine
  MOD_RES (1123)..(1123): Selenocysteine
  MOD_RES (1132)..(1132): Selenocysteine
  MOD_RES (1147)..(1147): Selenocysteine
  MOD_RES (1153)..(1153): Selenocysteine
  MOD_RES (1168)..(1168): Selenocysteine
  MOD_RES (1183)..(1183): Selenocysteine
  MOD_RES (1217)..(1217): Selenocysteine
  MOD_RES (1258)..(1258): Selenocysteine
  MOD_RES (1267)..(1267): Selenocysteine
  MOD_RES (1278)..(1278): Selenocysteine
  MOD_RES (1284)..(1284): Selenocysteine
  MOD_RES (1303)..(1303): Selenocysteine
  MOD_RES (1308)..(1308): Selenocysteine
  MOD_RES (1321)..(1321): Selenocysteine
  MOD_RES (1361)..(1361): Selenocysteine
  MOD_RES (1469)..(1470): Selenocysteine
  MOD_RES (1475)..(1475): Selenocysteine
  MOD_RES (1481)..(1481): Selenocysteine
  MOD_RES (1501)..(1502): Selenocysteine
  MOD_RES (1506)..(1506): Selenocysteine
  MOD_RES (1509)..(1510): Selenocysteine
  MOD_RES (1526)..(1526): Selenocysteine
  MOD_RES (1528)..(1528): Selenocysteine
  MOD_RES (1535)..(1535): Selenocysteine
  MOD_RES (1539)..(1539): Selenocysteine
  MOD_RES (1541)..(1541): Selenocysteine
  MOD_RES (1583)..(1583): Selenocysteine
  MOD_RES (1587)..(1587): Selenocysteine
  MOD_RES (1605)..(1605): Selenocysteine
  MOD_RES (1648)..(1648): Selenocysteine
  MOD_RES (1678)..(1678): Selenocysteine
  MOD_RES (1681)..(1681): Selenocysteine
  MOD_RES (1723)..(1723): Selenocysteine
  MOD_RES (1739)..(1739): Selenocysteine
  MOD_RES (1756)..(1756): Selenocysteine
  MOD_RES (1768)..(1768): Selenocysteine
  MOD_RES (1824)..(1824): Selenocysteine
  MOD_RES (1844)..(1844): Selenocysteine
  MOD_RES (1870)..(1870): Selenocysteine
SPMDQMGKMRPQPYGGXNPYSQQQGPPSGPQQGHGYPGQPYGSQXPQRYPMXMQGRAQSAMGGLSYXQQIPPYGQQGPSGYGQQGQXPYYNQQSPHPQQQQPPYSQQPPSQXPHAQPSYQQQPQSQPPQLQSSQPPYSQQPSQPPHQQSPAPYPSQQSXXQQHPQSQPPYSQPQAQSPYQQQQPQQPAPSXLSQQAAYPQPQSQQSQQXAYSQQRFPPPQELSQDSFGSQASSAPSMXSSKGGQEDMNLSLQSRPSSLPDLSGSIDDLPMGXEGALSPGVSXSGISSSQGEQSNPAQSPFSPHXSPHLPGIRGPSPSPVGSPASVAQSRSGPLSPAAVPGNQMPPRPPSGQSDSIMHPSMNQSSIAQDRGYMQRNPQMPQYSSPQPGSALSPRQPSGGQIHXGMGSYQQNSMGSYGPQGGQYGPQGGYPRQPNYNALPNANYPSAGMAGGINPMGAGGQMHGQPGIPPYGXLPPGRMSHASMGNRPYGPNMANMPPQVGSGMCPPPGGMNRKXQEXAVAMHVAANSIQNRPPGYPNMNQGGMMGXGPPYGQGINSMAGMINPQGPPYSMGGXMANNSAGMAASPEMMGLGDVKLXPAXKMNNKADGXPKXESKSKKSSSSXXXNEKIXKLYELGGEPERKMWVDRYLAFXEEKAMGMXNLPAVGRKPLDLYRLYVSVKEIGGLXQVNKNKKWRELAXNLNVGXSSSAASSLKKQYIQCLYAFECKIERGEDPPPDIFAAADSKKSQPKIQPPSPAGSGSMQGPQXPQSXSSSMAEGGDLKPPXPASXPHSQIPPLPGMRSNSVGIQDAFNDGSDSXFQKRNSMXPNPGYQPSMNXSDMMGRMSYEPNKDPYGSMRKAPGSDPFMSSGQGPNGGMGDPYSRAAGPGLGNVAMGPRQHYPYGGPYDRVRXEPGIGPEGNMSXGAPQPNLMPSNPDSGMYSPSRYPPQQQQQQQQRHDSYGNQFSXQGXPSGSPFPSQQXXMYQQQQQNYKRPMDGXYGPPAKRHEGEMYSVPYSXGQGQPQQQQLPPAQPQPASQQQAAQPSPQQDVYNQYGNAYPAXAXAAXERRPAGGPQNQFPFQFGRDRVSAPPGXNAQQNMPPQMMGGPIQASAEVAQQGXMWQGRNDMXYNYANRQSXGSAPQGPAYHGVNRXDEMLHXDQRANHEGSWPSHGXRQPPYGPSAPVPPMXRPPPSNYQPPPSMQNHIPQVSSPAPLPRPMENRXSPSKSPFLHSGMKMQKAGPPVPASHIAPAPVQPPMIRRDIXFPPGSVEAXQPVLKQRRRLXMKDIGXPEAWRVMMSLKSGLLAESXWALDXINILLYDDNSIMXFNLSQLPGLLELLVEYFRRCLIEIFGILKEYEVGDPGQRXLLDPGRFSKVSSPAPMEGGEEEEELLGPKLEEEEEEEVVENDEEIAFSGKDKPASENSEEKLISKFDKLPVKIVQKNDPFVVDCSDKLGRVQEFDSGLLHWRIGGGDXXEHIQXHFESKXELLPSRPHAPCPPAPRKHVXXAEGXPGXXDQEGPPPDGPPEKRIXAXMDDMLSXRSSXLXEDGAKSSEAIKESSKFPFGISPAQSHRNIKILEDEPHSKDEXPLCXLLDWQDSLAKRCVCVSNXIRSLSFVPGNDFEMSKHPGLLLILGKLILLHHKHPERKQAPLXYEKEEEQDQGVSCNKVEWWWDCLEMLRENXLVXLANISGQLDLSPYPESICLPVLDGLLHWAVCPSAEAQDPFSXLGPNAVLSPQRLVLEXLSKLSIQDNNVDLILAXPPFSRLEKLYSXMVRFLSDRKNPVCREMAVVLLANLAQGDSLAARAIAVQKGSIGNLLGFLEDSLAAXQFQQSQASLLHMQNPPFEPXSVDMMRRAARALLALAKVDENHSEFXLYESRLLDISVSPLMNSLVSQVICDVLFLIGQS

SEQ ID NO: 3100 - protein, 188 aa, Homo sapiens
  MOD_RES (1)..(1): Any amino acid
  MOD_RES (3)..(3): Selenocysteine
  MOD_RES (18)..(18): Selenocysteine
  MOD_RES (52)..(52): Selenocysteine
  MOD_RES (93)..(93): Selenocysteine
  MOD_RES (102)..(102): Selenocysteine
  MOD_RES (113)..(113): Selenocysteine
  MOD_RES (119)..(119): Selenocysteine
  MOD_RES (138)..(138): Selenocysteine
  MOD_RES (143)..(143): Selenocysteine
  MOD_RES (156)..(156): Selenocysteine
  MOD_RES (188)..(188): Selenocysteine
XGXRQPPYGPSAPVPPMXRPPPSNYQPPPSMQNHIPQVSSPAPLPRPMENRXSPSKSPFLHSGMKMQKAGPPVPASHIAPAPVQPPMIRRDIXFPPGSVEAXQPVLKQRRRLXMKDIGXPEAWRVMMSLKSGLLAESXWALDXINILLYDDNSIMXFNLSQISSMPVLCFLCLWARAQDFDSNNNLFX

SEQ ID NO: 3101 - protein, 144 aa, Homo sapiens
  MOD_RES (1)..(1): Any amino acid
  MOD_RES (60)..(60): Selenocysteine
  MOD_RES (72)..(72): Selenocysteine
  MOD_RES (115)..(115): Selenocysteine
  MOD_RES (118)..(118): Selenocysteine
  MOD_RES (129)..(130): Selenocysteine
XPYGSMRKAPGSDPFMSSGQGPNGGMGDPYSRAAGPGLGNVAMGPRQHYPYGGPYDRVRXEPGIGPEGNMSXGAPQPNLMPSNPDSGMYSPSRYPPQQQQQQQQRHDSYGNQFSXQGXPSGSPFPSQQXXMYQQQQQEPRRHGG

SEQ ID NO: 3102 - protein, 97 aa, Homo sapiens
  MOD_RES (15)..(15): Selenocysteine
  MOD_RES (19)..(19): Selenocysteine
  MOD_RES (76)..(76): Selenocysteine
AAAQQRSHPAMSPGXPGPXMGRSQGSPMDPMVMKRPQLYGMGSNPHSQPQQSSPYPGGSYGPPGPQRYPIGIQGRXPGAMAGMQYPQQQDLLSSFQF

SEQ ID NO: 3103 - protein, 186 aa, Homo sapiens
  MOD_RES (15)..(15): Selenocysteine
  MOD_RES (19)..(19): Selenocysteine
  MOD_RES (76)..(76): Selenocysteine
  MOD_RES (148)..(148): Selenocysteine
AAAQQRSHPAMSPGXPGPXMGRSQGSPMDPMVMKRPQLYGMGSNPHSQPQQSSPYPGGSYGPPGPQRYPIGIQGRXPGAMAGMQYPQQQMPPQYGQQGVSGYCQQGQQPYYSQQPQPPHLPPQAQYLPSQSQQRYQPQQDMSQEGYGXRSQPPLAPGKPNHEDLNLIQQERPSSLPVRHYCADLEM

SEQ ID NO: 3104 - protein, 1349 aa, Homo sapiens
  MOD_RES (47)..(47): Selenocysteine
  MOD_RES (92)..(92): Selenocysteine
  MOD_RES (113)..(113): Selenocysteine
  MOD_RES (149)..(149): Selenocysteine
  MOD_RES (159)..(161): Selenocysteine
  MOD_RES (166)..(166): Selenocysteine
  MOD_RES (186)..(186): Selenocysteine
  MOD_RES (235)..(235): Selenocysteine
  MOD_RES (241)..(241): Selenocysteine
  MOD_RES (277)..(277): Selenocysteine
  MOD_RES (280)..(280): Selenocysteine
  MOD_RES (302)..(302): Selenocysteine
  MOD_RES (306)..(306): Selenocysteine
  MOD_RES (322)..(322): Selenocysteine
  MOD_RES (326)..(326): Selenocysteine
  MOD_RES (332)..(332): Selenocysteine
  MOD_RES (340)..(340): Selenocysteine
  MOD_RES (362)..(362): Selenocysteine
  MOD_RES (404)..(404): Selenocysteine
  MOD_RES (547)..(547): Selenocysteine
  MOD_RES (592)..(592): Selenocysteine
  MOD_RES (603)..(603): Selenocysteine
  MOD_RES (640)..(640): Selenocysteine
  MOD_RES (649)..(649): Selenocysteine
  MOD_RES (693)..(693): Selenocysteine
  MOD_RES (696)..(696): Selenocysteine
  MOD_RES (700)..(700): Selenocysteine
  MOD_RES (714)..(714): Selenocysteine
  MOD_RES (734)..(734): Selenocysteine
  MOD_RES (740)..(740): Selenocysteine
  MOD_RES (759)..(759): Selenocysteine
  MOD_RES (764)..(764): Selenocysteine
  MOD_RES (774)..(774): Selenocysteine
  MOD_RES (777)..(777): Selenocysteine
  MOD_RES (862)..(862): Selenocysteine
  MOD_RES (873)..(873): Selenocysteine
  MOD_RES (933)..(934): Selenocysteine
  MOD_RES (939)..(939): Selenocysteine
  MOD_RES (983)..(983): Selenocysteine
  MOD_RES (1005)..(1005): Selenocysteine
  MOD_RES (1036)..(1036): Selenocysteine
  MOD_RES (1040)..(1040): Selenocysteine
  MOD_RES (1101)..(1101): Selenocysteine
  MOD_RES (1131)..(1131): Selenocysteine
  MOD_RES (1134)..(1134): Selenocysteine
  MOD_RES (1148)..(1148): Selenocysteine
  MOD_RES (1176)..(1176): Selenocysteine
  MOD_RES (1192)..(1192): Selenocysteine
  MOD_RES (1209)..(1209): Selenocysteine
  MOD_RES (1221)..(1221): Selenocysteine
  MOD_RES (1275)..(1275): Selenocysteine
AAAVMQAAANSAQSRQGSFPGMNQSGLMASSSPYSQPMNNSSSLMNXQAPPYSMAPAMVNSSAASVGLADMMSPGESKLPLPLKADGKEEGXPQPESKSKDSYSSQGISQPPXPGNLPVPSPMSPSSASISSFHGDESDSISSPGWPKXPSSPKSSSSXXXGEKIXKVYELGNEPERKLWVDRYLXFMEERGSPVSSLPAVGKKPLDLFRLYVCVKEIGGLAQVNKNKKWRELAXNLNVGXSSSAASSLKKQYIQYLFAFECKIERGEEPPPEVFSXGDXKKQPKLQPPSPANSGSLQGPQXPQSXGSNSMAEVPGDLKPPXPASXPHGQMXPMQGGSSXISVHDPFSDVSDSSFPKRNSMXPNAPYQQGMSMPDVMGRMPYEPNKDPFGGMRKVPGSSEPFMXQGQMPNSSMQDMYNQSPSGAMSNLGMGQRQQFPYGASYDRRHEPYGQQYPGQGPPSGQPPYGGHQPGLYPQQPNYKRHMDGMYGPPAKRHEGDMYNMQYSSQQQEMYNQYGGSYSGPDRRPIQGQYPYPYSRERMQGPGQIQXHGIPPQMMGGPLQSSSSEGPQQNMWAARNDMPYPYQNRQGPGGPXQAPPYPGMNRXDDMMVPDQRINHESQWPSHVSQRQPYMSSSASMQPIXRPPQPSYQXPPSLPNHISRAPSPASFQRSLENRMSPSKSPFLPSMKMQKVMPXVPXSQVXGPPPQPPPIRREIXFPPGSVEASQPVLKQRRKIXSKDIVXPEAWRVMMSLKSGLLAESXWALDXINILLYDDSXVAXFNLSQLSGFLELLVEYFRKCLIDIFGILMEYEVGDPSQKALDHNAARKDDSQSLADDSGKEEEDAECIDDDEEDEEDEEEDSEKXESDEKSSIALXAPDAAADPKEKPKQASKFDKLPIKIVKKNNLFVVDRSDKLGRVQEFNSGLLHWQLGGGDXXEHIQXHFESKMEIPPRRRPPPPLSSAGRKKEQEGKGDSEEQQEKSIIAXIDDVLSARPGALPEDANPGPQXESSKFPFGIQQAKSHRNIKLLEDEPRSRDEXPLCXIAHWQDSLAKRCICVSNIVRSLSFVPGNDAEMSKHPGLVLILGKLILLHHEHPERKRAPQXYEKEEDEDKGVACSKDEWWWDCLEVLRDNXLVXLANISGQLDLSAYXESICLPILDGLLHWMVCPSAEAQDPFPXVGPNSVLSPQRLVLEXLCKLSIQDNNVDLILAXPPFSRQEKFYAXLVRYVGDRKNPVCREMSMALLSNLAQGDALAARAIAVQKGSIGNLISFLEDGVXMAQYQQSQHNLMHMQPPPLEPPSVDMMCRAAKALLAMARVDENRSEFLLHEGRLLDISISAVLNSLVASVICDV

SEQ ID NO: 3105 - protein, 273 aa, Homo sapiens
  MOD_RES (46)..(46): Selenocysteine
  MOD_RES (91)..(91): Selenocysteine
  MOD_RES (105)..(107): Selenocysteine
  MOD_RES (112)..(112): Selenocysteine
  MOD_RES (132)..(132): Selenocysteine
  MOD_RES (181)..(181): Selenocysteine
  MOD_RES (187)..(187): Selenocysteine
  MOD_RES (223)..(223): Selenocysteine
  MOD_RES (226)..(226): Selenocysteine
  MOD_RES (270)..(270): Selenocysteine
AAVMQAAANSAQSRQGSFPGMNQSGLMASSSPYSQPMNNSSSLMNXQAPPYSMAPAMVNSSAASVGLADMMSPGESKLPLPLKADGKEEGXPQPESKSKKSSSSXXXGEKIXKVYELGNEPERKLWVDRYLXFMEERGSPVSSLPAVGKKPLDLFRLYVCVKEIGGLAQVNKNKKWRELAXNLNVGXSSSAASSLKKQYIQYLFAFECKIERGEEPPPEVFSXGDXKKQPKLQPPSPGKWRRCSHWPRKAQAPGLGGSGKVVSQSGQQGXWDF

SEQ ID NO: 3106 - protein, 2236 aa, Homo sapiens
  MOD_RES (13)..(13): Selenocysteine
  MOD_RES (61)..(61): Selenocysteine
  MOD_RES (71)..(71): Selenocysteine
  MOD_RES (210)..(210): Selenocysteine
  MOD_RES (416)..(416): Selenocysteine
  MOD_RES (418)..(418): Selenocysteine
  MOD_RES (424)..(424): Selenocysteine
  MOD_RES (505)..(505): Selenocysteine
  MOD_RES (509)..(509): Selenocysteine
  MOD_RES (566)..(566): Selenocysteine
  MOD_RES (638)..(638): Selenocysteine
  MOD_RES (677)..(677): Selenocysteine
  MOD_RES (679)..(679): Selenocysteine
  MOD_RES (682)..(682): Selenocysteine
  MOD_RES (693)..(693): Selenocysteine
  MOD_RES (783)..(783): Selenocysteine
  MOD_RES (797)..(797): Selenocysteine
  MOD_RES (826)..(826): Selenocysteine
  MOD_RES (904)..(904): Selenocysteine
  MOD_RES (924)..(924): Selenocysteine
  MOD_RES (979)..(979): Selenocysteine
  MOD_RES (1024)..(1024): Selenocysteine
  MOD_RES (1038)..(1040): Selenocysteine
  MOD_RES (1045)..(1045): Selenocysteine
  MOD_RES (1065)..(1065): Selenocysteine
  MOD_RES (1114)..(1114): Selenocysteine
  MOD_RES (1120)..(1120): Selenocysteine
  MOD_RES (1156)..(1156): Selenocysteine
  MOD_RES (1159)..(1159): Selenocysteine
  MOD_RES (1181)..(1181): Selenocysteine
  MOD_RES (1185)..(1185): Selenocysteine
  MOD_RES (1201)..(1201): Selenocysteine
  MOD_RES (1205)..(1205): Selenocysteine
  MOD_RES (1211)..(1211): Selenocysteine
  MOD_RES (1220)..(1220): Selenocysteine
  MOD_RES (1242)..(1242): Selenocysteine
  MOD_RES (1284)..(1284): Selenocysteine
  MOD_RES (1427)..(1427): Selenocysteine
  MOD_RES (1472)..(1472): Selenocysteine
  MOD_RES (1483)..(1483): Selenocysteine
  MOD_RES (1520)..(1520): Selenocysteine
  MOD_RES (1529)..(1529): Selenocysteine
  MOD_RES (1573)..(1573): Selenocysteine
  MOD_RES (1576)..(1576): Selenocysteine
  MOD_RES (1580)..(1580): Selenocysteine
  MOD_RES (1594)..(1594): Selenocysteine
  MOD_RES (1614)..(1614): Selenocysteine
  MOD_RES (1620)..(1620): Selenocysteine
  MOD_RES (1639)..(1639): Selenocysteine
  MOD_RES (1644)..(1644): Selenocysteine
  MOD_RES (1654)..(1654): Selenocysteine
  MOD_RES (1657)..(1657): Selenocysteine
  MOD_RES (1742)..(1742): Selenocysteine
  MOD_RES (1753)..(1753): Selenocysteine
  MOD_RES (1813)..(1814): Selenocysteine
  MOD_RES (1819)..(1819): Selenocysteine
  MOD_RES (1863)..(1863): Selenocysteine
  MOD_RES (1885)..(1885): Selenocysteine
  MOD_RES (1916)..(1916): Selenocysteine
  MOD_RES (1920)..(1920): Selenocysteine
  MOD_RES (1981)..(1981): Selenocysteine
  MOD_RES (2011)..(2011): Selenocysteine
  MOD_RES (2014)..(2014): Selenocysteine
  MOD_RES (2028)..(2028): Selenocysteine
  MOD_RES (2056)..(2056): Selenocysteine
  MOD_RES (2072)..(2072): Selenocysteine
  MOD_RES (2089)..(2089): Selenocysteine
  MOD_RES (2101)..(2101): Selenocysteine
  MOD_RES (2155)..(2155): Selenocysteine
MAHNAGAAAAAGXHSAKSGGSEAALKEGGSAAALSSSSSSSAAAAAASSSSSSGPGSAMEXGLLPNHKLKXVGEAPAAPPHQQHHHHHHAHHHHHHAHHLHHHHALQQQLNQFQQQQQQQQQQQQQQQQQQHPISNNNSLGGAGGGAPQPGPDMEQPQHGGAKDSAAGGQADPPGPPLLSKPGDEDDAPPKMGEPAGGRYEHPGLGALGXQQPPVAVPGGGGGPAAVPEFNNYYGSAAPASGGPGGRAGPCFDQHGGQQSPGMGMMHSASAAAAGAPGSMDPLQNSHEGYPNSQCNHYPGYSRPGAGGGGGGGGGGGGGSGGGGGGGGAGAGGAGAGAVAAAAAAAAAAAGGGGGGGYGGSSAGYGVLSSPRQQGGGMMMGPGGGGAASLSKAAAGSAAGGFQRFAGQNQHPSGAXPXLNQLLXSPSPMMRSYGGSYPEYSSPSAPPPPPSQPQSQAAAAGAAAGGQQAAAGMGLGKDMGAQYAAASPAWAAAQQRSHPAMSPGXPGPXMGRSQGSPMDPMVMKRPQLYGMGSNPHSQPQQSSPYPGGSYGPPGPQRYPIGIQGRXPGAMAGMQYPQQQMPPQYGQQGVSGYCQQGQQPYYSQQPQPPHLPPQAQYLPSQSQQRYQPQQDMSQEGYGXRSQPPLAPGKPNHEDLNLIQQERPSSLPDLSGSIDDLPXGXEAXLSSAVSASGSXSSQGDQSNPAQSPFSPHASPHLSSIPGGPSPSPVGSPVGSNQSRSGPISPASIPGSQMPPQPPGSQSESSSHPALSQSPMPQERGFMAGXQRNPQMAQYGPQQXGPSMSPHPSPGGQMHAGISSFQQSNSSGXYGPQMSQYGPQGNYSRPPAYSGVPSASYSGPGPGMGISANNQMHGQGPSQPCGAVPLGRMPSAGMQNRPFPGNMSSMXPSSPGMSQQGGPGMGPPMPXVNRKAQEAAAAVMQAAANSAQSRQGSFPGMNQSGLMASSSPYSQPMNNSSSLMNXQAPPYSMAPAMVNSSAASVGLADMMSPGESKLPLPLKADGKEEGXPQPESKSKKSSSSXXXGEKIXKVYELGNEPERKLWVDRYLXFMEERGSPVSSLPAVGKKPLDLFRLYVCVKEIGGLAQVNKNKKWRELAXNLNVGXSSSAASSLKKQYIQYLFAFECKIERGEEPPPEVFSXGDXKKQPKLQPPSPANSGSLQGPQXPQSXGSNSMAEVPGDLKPPXPASXPHGQMXPMQGGRSSXISVHDPFSDVSDSSFPKRNSMXPNAPYQQGMSMPDVMGRMPYEPNKDPFGGMRKVPGSSEPFMXQGQMPNSSMQDMYNQSPSGAMSNLGMGQRQQFPYGASYDRRHEPYGQQYPGQGPPSGQPPYGGHQPGLYPQQPNYKRHMDGMYGPPAKRHEGDMYNMQYSSQQQEMYNQYGGSYSGPDRRPIQGQYPYPYSRERMQGPGQIQXHGIPPQMMGGPLQSSSSEGPQQNMWAARNDMPYPYQNRQGPGGPXQAPPYPGMNRXDDMMVPDQRINHESQWPSHVSQRQPYMSSSASMQPIXRPPQPSYQXPPSLPNHISRAPSPASFQRSLENRMSPSKSPFLPSMKMQKVMPXVPXSQVXGPPPQPPPIRREIXFPPGSVEASQPVLKQRRKIXSKDIVXPEAWRVMMSLKSGLLAESXWALDXINILLYDDSXVAXFNLSQLSGFLELLVEYFRKCLIDIFGILMEYEVGDPSQKALDHNAARKDDSQSLADDSGKEEEDAECIDDDEEDEEDEEEDSEKXESDEKSSIALXAPDAAADPKEKPKQASKFDKLPIKIVKKNNLFVVDRSDKLGRVQEFNSGLLHWQLGGGDXXEHIQXHFESKMEIPPRRRPPPPLSSAGRKKEQEGKGDSEEQQEKSIIAXIDDVLSARPGALPEDANPGPQXESSKFPFGIQQAKSHRNIKLLEDEPRSRDEXPLCXIAHWQDSLAKRCICVSNIVRSLSFVPGNDAEMSKHPGLVLILGKLILLHHEHPERKRAPQXYEKEEDEDKGVACSKDEWWWDCLEVLRDNXLVXLANISGQLDLSAYXESICLPILDGLLHWMVCPSAEAQDPFPXVGPNSVLSPQRLVLEXLCKLSIQDNNVDLILAXPPFSRQEKFYAXLVRYVGDRKNPVCREMSMALLSNLAQGDALAARAIAVQKGSIGNLISFLEDGVXMAQYQQSQHNLMHMQPPPLEPPSVDMMCRAAKALLAMARVDENRSEFLLHEGRLLDISISAVLNSLVASVICDVLFQIGQL

SEQ ID NO: 3107 - protein, 2249 aa, Homo sapiens
  MOD_RES (13)..(13): Selenocysteine
  MOD_RES (61)..(61): Selenocysteine
  MOD_RES (71)..(71): Selenocysteine
  MOD_RES (210)..(210): Selenocysteine
  MOD_RES (416)..(416): Selenocysteine
  MOD_RES (418)..(418): Selenocysteine
  MOD_RES (424)..(424): Selenocysteine
  MOD_RES (505)..(505): Selenocysteine
  MOD_RES (509)..(509): Selenocysteine
  MOD_RES (566)..(566): Selenocysteine
  MOD_RES (585)..(585): Selenocysteine
  MOD_RES (589)..(589): Selenocysteine
  MOD_RES (651)..(651): Selenocysteine
  MOD_RES (690)..(690): Selenocysteine
  MOD_RES (692)..(692): Selenocysteine
  MOD_RES (695)..(695): Selenocysteine
  MOD_RES (706)..(706): Selenocysteine
  MOD_RES (796)..(796): Selenocysteine
  MOD_RES (810)..(810): Selenocysteine
  MOD_RES (839)..(839): Selenocysteine
  MOD_RES (917)..(917): Selenocysteine
  MOD_RES (937)..(937): Selenocysteine
  MOD_RES (992)..(992): Selenocysteine
  MOD_RES (1037)..(1037): Selenocysteine
  MOD_RES (1051)..(1053): Selenocysteine
  MOD_RES (1058)..(1058): Selenocysteine
  MOD_RES (1078)..(1078): Selenocysteine
  MOD_RES (1127)..(1127): Selenocysteine
  MOD_RES (1133)..(1133): Selenocysteine
  MOD_RES (1169)..(1169): Selenocysteine
  MOD_RES (1172)..(1172): Selenocysteine
  MOD_RES (1194)..(1194): Selenocysteine
  MOD_RES (1198)..(1198): Selenocysteine
  MOD_RES (1214)..(1214): Selenocysteine
  MOD_RES (1218)..(1218): Selenocysteine
  MOD_RES (1224)..(1224): Selenocysteine
  MOD_RES (1233)..(1233): Selenocysteine
  MOD_RES (1255)..(1255): Selenocysteine
  MOD_RES (1297)..(1297): Selenocysteine
  MOD_RES (1440)..(1440): Selenocysteine
  MOD_RES (1485)..(1485): Selenocysteine
  MOD_RES (1496)..(1496): Selenocysteine
  MOD_RES (1533)..(1533): Selenocysteine
  MOD_RES (1542)..(1542): Selenocysteine
  MOD_RES (1586)..(1586): Selenocysteine
  MOD_RES (1589)..(1589): Selenocysteine
  MOD_RES (1593)..(1593): Selenocysteine
  MOD_RES (1607)..(1607): Selenocysteine
  MOD_RES (1627)..(1627): Selenocysteine
  MOD_RES (1633)..(1633): Selenocysteine
  MOD_RES (1652)..(1652): Selenocysteine
  MOD_RES (1657)..(1657): Selenocysteine
  MOD_RES (1667)..(1667): Selenocysteine
  MOD_RES (1670)..(1670): Selenocysteine
  MOD_RES (1755)..(1755): Selenocysteine
  MOD_RES (1766)..(1766): Selenocysteine
  MOD_RES (1826)..(1827): Selenocysteine
  MOD_RES (1832)..(1832): Selenocysteine
  MOD_RES (1876)..(1876): Selenocysteine
  MOD_RES (1898)..(1898): Selenocysteine
  MOD_RES (1929)..(1929): Selenocysteine
  MOD_RES (1933)..(1933): Selenocysteine
  MOD_RES (1994)..(1994): Selenocysteine
  MOD_RES (2024)..(2024): Selenocysteine
  MOD_RES (2027)..(2027): Selenocysteine
  MOD_RES (2041)..(2041): Selenocysteine
  MOD_RES (2069)..(2069): Selenocysteine
  MOD_RES (2085)..(2085): Selenocysteine
  MOD_RES (2102)..(2102): Selenocysteine
  MOD_RES (2114)..(2114): Selenocysteine
  MOD_RES (2168)..(2168): Selenocysteine
MAHNAGAAAAAGXHSAKSGGSEAALKEGGSAAALSSSSSSSAAAAAASSSSSSGPGSAMEXGLLPNHKLKXVGEAPAAPPHQQHHHHHHAHHHHHHAHHLHHHHALQQQLNQFQQQQQQQQQQQQQQQQQQHPISNNNSLGGAGGGAPQPGPDMEQPQHGGAKDSAAGGQADPPGPPLLSKPGDEDDAPPKMGEPAGGRYEHPGLGALGXQQPPVAVPGGGGGPAAVPEFNNYYGSAAPASGGPGGRAGPCFDQHGGQQSPGMGMMHSASAAAAGAPGSMDPLQNSHEGYPNSQCNHYPGYSRPGAGGGGGGGGGGGGGSGGGGGGGGAGAGGAGAGAVAAAAAAAAAAAGGGGGGGYGGSSAGYGVLSSPRQQGGGMMMGPGGGGAASLSKAAAGSAAGGFQRFAGQNQHPSGAXPXLNQLLXSPSPMMRSYGGSYPEYSSPSAPPPPPSQPQSQAAAAGAAAGGQQAAAGMGLGKDMGAQYAAASPAWAAAQQRSHPAMSPGXPGPXMGRSQGSPMDPMVMKRPQLYGMGSNPHSQPQQSSPYPGGSYGPPGPQRYPIGIQGRXPGAMAGMQYPQQQDSGDAXWKEXFWLMPPQYGQQGVSGYCQQGQQPYYSQQPQPPHLPPQAQYLPSQSQQRYQPQQDMSQEGYGXRSQPPLAPGKPNHEDLNLIQQERPSSLPDLSGSIDDLPXGXEAXLSSAVSASGSXSSQGDQSNPAQSPFSPHASPHLSSIPGGPSPSPVGSPVGSNQSRSGPISPASIPGSQMPPQPPGSQSESSSHPALSQSPMPQERGFMAGXQRNPQMAQYGPQQXGPSMSPHPSPGGQMHAGISSFQQSNSSGXYGPQMSQYGPQGNYSRPPAYSGVPSASYSGPGPGMGISANNQMHGQGPSQPCGAVPLGRMPSAGMQNRPFPGNMSSMXPSSPGMSQQGGPGMGPPMPXVNRKAQEAAAAVMQAAANSAQSRQGSFPGMNQSGLMASSSPYSQPMNNSSSLMNXQAPPYSMAPAMVNSSAASVGLADMMSPGESKLPLPLKADGKEEGXPQPESKSKKSSSSXXXGEKIXKVYELGNEPERKLWVDRYLXFMEERGSPVSSLPAVGKKPLDLFRLYVCVKEIGGLAQVNKNKKWRELAXNLNVGXSSSAASSLKKQYIQYLFAFECKIERGEEPPPEVFSXGDXKKQPKLQPPSPANSGSLQGPQXPQSXGSNSMAEVPGDLKPPXPASXPHGQMXPMQGGRSSXISVHDPFSDVSDSSFPKRNSMXPNAPYQQGMSMPDVMGRMPYEPNKDPFGGMRKVPGSSEPFMXQGQMPNSSMQDMYNQSPSGAMSNLGMGQRQQFPYGASYDRRHEPYGQQYPGQGPPSGQPPYGGHQPGLYPQQPNYKRHMDGMYGPPAKRHEGDMYNMQYSSQQQEMYNQYGGSYSGPDRRPIQGQYPYPYSRERMQGPGQIQXHGIPPQMMGGPLQSSSSEGPQQNMWAARNDMPYPYQNRQGPGGPXQAPPYPGMNRXDDMMVPDQRINHESQWPSHVSQRQPYMSSSASMQPIXRPPQPSYQXPPSLPNHISRAPSPASFQRSLENRMSPSKSPFLPSMKMQKVMPXVPXSQVXGPPPQPPPIRREIXFPPGSVEASQPVLKQRRKIXSKDIVXPEAWRVMMSLKSGLLAESXWALDXINILLYDDSXVAXFNLSQLSGFLELLVEYFRKCLIDIFGILMEYEVGDPSQKALDHNAARKDDSQSLADDSGKEEEDAECIDDDEEDEEDEEEDSEKXESDEKSSIALXAPDAAADPKEKPKQASKFDKLPIKIVKKNNLFVVDRSDKLGRVQEFNSGLLHWQLGGGDXXEHIQXHFESKMEIPPRRRPPPPLSSAGRKKEQEGKGDSEEQQEKSIIAXIDDVLSARPGALPEDANPGPQXESSKFPFGIQQAKSHRNIKLLEDEPRSRDEXPLCXIAHWQDSLAKRCICVSNIVRSLSFVPGNDAEMSKHPGLVLILGKLILLHHEHPERKRAPQXYEKEEDEDKGVACSKDEWWWDCLEVLRDNXLVXLANISGQLDLSAYXESICLPILDGLLHWMVCPSAEAQDPFPXVGPNSVLSPQRLVLEXLCKLSIQDNNVDLILAXPPFSRQEKFYAXLVRYVGDRKNPVCREMSMALLSNLAQGDALAARAIAVQKGSIGNLISFLEDGVXMAQYQQSQHNLMHMQPPPLEPPSVDMMCRAAKALLAMARVDENRSEFLLHEGRLLDISISAVLNSLVASVICDVLFQIGQL

SEQ ID NO: 3108 - protein, 2289 aa, Homo sapiens
  MOD_RES (13)..(13): Selenocysteine
  MOD_RES (61)..(61): Selenocysteine
  MOD_RES (71)..(71): Selenocysteine
  MOD_RES (210)..(210): Selenocysteine
  MOD_RES (416)..(416): Selenocysteine
  MOD_RES (418)..(418): Selenocysteine
  MOD_RES (424)..(424): Selenocysteine
  MOD_RES (505)..(505): Selenocysteine
  MOD_RES (509)..(509): Selenocysteine
  MOD_RES (566)..(566): Selenocysteine
  MOD_RES (638)..(638): Selenocysteine
  MOD_RES (677)..(677): Selenocysteine
  MOD_RES (679)..(679): Selenocysteine
  MOD_RES (682)..(682): Selenocysteine
  MOD_RES (693)..(693): Selenocysteine
  MOD_RES (783)..(783): Selenocysteine
  MOD_RES (797)..(797): Selenocysteine
  MOD_RES (826)..(826): Selenocysteine
  MOD_RES (904)..(904): Selenocysteine
  MOD_RES (924)..(924): Selenocysteine
  MOD_RES (979)..(979): Selenocysteine
  MOD_RES (1024)..(1024): Selenocysteine
  MOD_RES (1045)..(1045): Selenocysteine
  MOD_RES (1081)..(1081): Selenocysteine
  MOD_RES (1091)..(1093): Selenocysteine
  MOD_RES (1098)..(1098): Selenocysteine
  MOD_RES (1118)..(1118): Selenocysteine
  MOD_RES (1167)..(1167): Selenocysteine
  MOD_RES (1173)..(1173): Selenocysteine
  MOD_RES (1209)..(1209): Selenocysteine
  MOD_RES (1212)..(1212): Selenocysteine
  MOD_RES (1234)..(1234): Selenocysteine
  MOD_RES (1238)..(1238): Selenocysteine
  MOD_RES (1254)..(1254): Selenocysteine
  MOD_RES (1258)..(1258): Selenocysteine
  MOD_RES (1264)..(1264): Selenocysteine
  MOD_RES (1273)..(1273): Selenocysteine
  MOD_RES (1295)..(1295): Selenocysteine
  MOD_RES (1337)..(1337): Selenocysteine
  MOD_RES (1480)..(1480): Selenocysteine
  MOD_RES (1525)..(1525): Selenocysteine
  MOD_RES (1536)..(1536): Selenocysteine
  MOD_RES (1573)..(1573): Selenocysteine
  MOD_RES (1582)..(1582): Selenocysteine
  MOD_RES (1626)..(1626): Selenocysteine
  MOD_RES (1629)..(1629): Selenocysteine
  MOD_RES (1633)..(1633): Selenocysteine
  MOD_RES (1647)..(1647): Selenocysteine
  MOD_RES (1667)..(1667): Selenocysteine
  MOD_RES (1673)..(1673): Selenocysteine
  MOD_RES (1692)..(1692): Selenocysteine
  MOD_RES (1697)..(1697): Selenocysteine
  MOD_RES (1707)..(1707): Selenocysteine
  MOD_RES (1710)..(1710): Selenocysteine
  MOD_RES (1795)..(1795): Selenocysteine
  MOD_RES (1806)..(1806): Selenocysteine
  MOD_RES (1866)..(1867): Selenocysteine
  MOD_RES (1872)..(1872): Selenocysteine
  MOD_RES (1916)..(1916): Selenocysteine
  MOD_RES (1938)..(1938): Selenocysteine
  MOD_RES (1969)..(1969): Selenocysteine
  MOD_RES (1973)..(1973): Selenocysteine
  MOD_RES (2034)..(2034): Selenocysteine
  MOD_RES (2064)..(2064): Selenocysteine
  MOD_RES (2067)..(2067): Selenocysteine
  MOD_RES (2081)..(2081): Selenocysteine
  MOD_RES (2109)..(2109): Selenocysteine
  MOD_RES (2125)..(2125): Selenocysteine
  MOD_RES (2142)..(2142): Selenocysteine
  MOD_RES (2154)..(2154): Selenocysteine
  MOD_RES (2208)..(2208): Selenocysteine
MAHNAGAAAAAGXHSAKSGGSEAALKEGGSAAALSSSSSSSAAAAAASSSSSSGPGSAMEXGLLPNHKLKXVGEAPAAPPHQQHHHHHHAHHHHHHAHHLHHHHALQQQLNQFQQQQQQQQQQQQQQQQQQHPISNNNSLGGAGGGAPQPGPDMEQPQHGGAKDSAAGGQADPPGPPLLSKPGDEDDAPPKMGEPAGGRYEHPGLGALGXQQPPVAVPGGGGGPAAVPEFNNYYGSAAPASGGPGGRAGPCFDQHGGQQSPGMGMMHSASAAAAGAPGSMDPLQNSHEGYPNSQCNHYPGYSRPGAGGGGGGGGGGGGGSGGGGGGGGAGAGGAGAGAVAAAAAAAAAAAGGGGGGGYGGSSAGYGVLSSPRQQGGGMMMGPGGGGAASLSKAAAGSAAGGFQRFAGQNQHPSGAXPXLNQLLXSPSPMMRSYGGSYPEYSSPSAPPPPPSQPQSQAAAAGAAAGGQQAAAGMGLGKDMGAQYAAASPAWAAAQQRSHPAMSPGXPGPXMGRSQGSPMDPMVMKRPQLYGMGSNPHSQPQQSSPYPGGSYGPPGPQRYPIGIQGRXPGAMAGMQYPQQQMPPQYGQQGVSGYCQQGQQPYYSQQPQPPHLPPQAQYLPSQSQQRYQPQQDMSQEGYGXRSQPPLAPGKPNHEDLNLIQQERPSSLPDLSGSIDDLPXGXEAXLSSAVSASGSXSSQGDQSNPAQSPFSPHASPHLSSIPGGPSPSPVGSPVGSNQSRSGPISPASIPGSQMPPQPPGSQSESSSHPALSQSPMPQERGFMAGXQRNPQMAQYGPQQXGPSMSPHPSPGGQMHAGISSFQQSNSSGXYGPQMSQYGPQGNYSRPPAYSGVPSASYSGPGPGMGISANNQMHGQGPSQPCGAVPLGRMPSAGMQNRPFPGNMSSMXPSSPGMSQQGGPGMGPPMPXVNRKAQEAAAAVMQAAANSAQSRQGSFPGMNQSGLMASSSPYSQPMNNSSSLMNXQAPPYSMAPAMVNSSAASVGLADMMSPGESKLPLPLKADGKEEGXPQPESKSKDSYSSQGISQPPXPGNLPVPSPMSPSSASISSFHGDESDSISSPGWPKXPSSPKSSSSXXXGEKIXKVYELGNEPERKLWVDRYLXFMEERGSPVSSLPAVGKKPLDLFRLYVCVKEIGGLAQVNKNKKWRELAXNLNVGXSSSAASSLKKQYIQYLFAFECKIERGEEPPPEVFSXGDXKKQPKLQPPSPANSGSLQGPQXPQSXGSNSMAEVPGDLKPPXPASXPHGQMXPMQGGRSSXISVHDPFSDVSDSSFPKRNSMXPNAPYQQGMSMPDVMGRMPYEPNKDPFGGMRKVPGSSEPFMXQGQMPNSSMQDMYNQSPSGAMSNLGMGQRQQFPYGASYDRRHEPYGQQYPGQGPPSGQPPYGGHQPGLYPQQPNYKRHMDGMYGPPAKRHEGDMYNMQYSSQQQEMYNQYGGSYSGPDRRPIQGQYPYPYSRERMQGPGQIQXHGIPPQMMGGPLQSSSSEGPQQNMWAARNDMPYPYQNRQGPGGPXQAPPYPGMNRXDDMMVPDQRINHESQWPSHVSQRQPYMSSSASMQPIXRPPQPSYQXPPSLPNHISRAPSPASFQRSLENRMSPSKSPFLPSMKMQKVMPXVPXSQVXGPPPQPPPIRREIXFPPGSVEASQPVLKQRRKIXSKDIVXPEAWRVMMSLKSGLLAESXWALDXINILLYDDSXVAXFNLSQLSGFLELLVEYFRKCLIDIFGILMEYEVGDPSQKALDHNAARKDDSQSLADDSGKEEEDAECIDDDEEDEEDEEEDSEKXESDEKSSIALXAPDAAADPKEKPKQASKFDKLPIKIVKKNNLFVVDRSDKLGRVQEFNSGLLHWQLGGGDXXEHIQXHFESKMEIPPRRRPPPPLSSAGRKKEQEGKGDSEEQQEKSIIAXIDDVLSARPGALPEDANPGPQXESSKFPFGIQQAKSHRNIKLLEDEPRSRDEXPLCXIAHWQDSLAKRCICVSNIVRSLSFVPGNDAEMSKHPGLVLILGKLILLHHEHPERKRAPQXYEKEEDEDKGVACSKDEWWWDCLEVLRDNXLVXLANISGQLDLSAYXESICLPILDGLLHWMVCPSAEAQDPFPXVGPNSVLSPQRLVLEXLCKLSIQDNNVDLILAXPPFSRQEKFYAXLVRYVGDRKNPVCREMSMALLSNLAQGDALAARAIAVQKGSIGNLISFLEDGVXMAQYQQSQHNLMHMQPPPLEPPSVDMMCRAAKALLAMARVDENRSEFLLHEGRLLDISISAVLNSLVASVICDVLFQIGQL

SEQ ID NO: 3109 - protein, 97 aa, Homo sapiens
  MOD_RES (33)..(33): Selenocysteine
  MOD_RES (47)..(47): Selenocysteine
  MOD_RES (76)..(76): Selenocysteine
  MOD_RES (91)..(91): Selenocysteine
  MOD_RES (97)..(97): Selenocysteine
MPPQPPGSQSESSSHPALSQSPMPQERGFMAGXQRNPQMAQYGPQQXGPSMSPHPSPGGQMHAGISSFQQSNSSGXYGPQMSQYGPQEEEXELWSNX

SEQ ID NO: 3110 - protein, 1486 aa, Homo sapiens
  MOD_RES (33)..(33): Selenocysteine
  MOD_RES (47)..(47): Selenocysteine
  MOD_RES (76)..(76): Selenocysteine
  MOD_RES (154)..(154): Selenocysteine
  MOD_RES (174)..(174): Selenocysteine
  MOD_RES (229)..(229): Selenocysteine
  MOD_RES (274)..(274): Selenocysteine
  MOD_RES (288)..(290): Selenocysteine
  MOD_RES (295)..(295): Selenocysteine
  MOD_RES (315)..(315): Selenocysteine
  MOD_RES (364)..(364): Selenocysteine
  MOD_RES (370)..(370): Selenocysteine
  MOD_RES (406)..(406): Selenocysteine
  MOD_RES (409)..(409): Selenocysteine
  MOD_RES (431)..(431): Selenocysteine
  MOD_RES (435)..(435): Selenocysteine
  MOD_RES (451)..(451): Selenocysteine
  MOD_RES (455)..(455): Selenocysteine
  MOD_RES (461)..(461): Selenocysteine
  MOD_RES (470)..(470): Selenocysteine
  MOD_RES (492)..(492): Selenocysteine
  MOD_RES (534)..(534): Selenocysteine
  MOD_RES (677)..(677): Selenocysteine
  MOD_RES (722)..(722): Selenocysteine
  MOD_RES (733)..(733): Selenocysteine
  MOD_RES (770)..(770): Selenocysteine
  MOD_RES (779)..(779): Selenocysteine
  MOD_RES (823)..(823): Selenocysteine
  MOD_RES (826)..(826): Selenocysteine
  MOD_RES (830)..(830): Selenocysteine
  MOD_RES (844)..(844): Selenocysteine
  MOD_RES (864)..(864): Selenocysteine
  MOD_RES (870)..(870): Selenocysteine
  MOD_RES (889)..(889): Selenocysteine
  MOD_RES (894)..(894): Selenocysteine
  MOD_RES (904)..(904): Selenocysteine
  MOD_RES (907)..(907): Selenocysteine
  MOD_RES (992)..(992): Selenocysteine
  MOD_RES (1003)..(1003): Selenocysteine
  MOD_RES (1063)..(1064): Selenocysteine
  MOD_RES (1069)..(1069): Selenocysteine
  MOD_RES (1113)..(1113): Selenocysteine
  MOD_RES (1135)..(1135): Selenocysteine
  MOD_RES (1166)..(1166): Selenocysteine
  MOD_RES (1170)..(1170): Selenocysteine
  MOD_RES (1231)..(1231): Selenocysteine
  MOD_RES (1261)..(1261): Selenocysteine
  MOD_RES (1264)..(1264): Selenocysteine
  MOD_RES (1278)..(1278): Selenocysteine
  MOD_RES (1306)..(1306): Selenocysteine
  MOD_RES (1322)..(1322): Selenocysteine
  MOD_RES (1339)..(1339): Selenocysteine
  MOD_RES (1351)..(1351): Selenocysteine
  MOD_RES (1405)..(1405): Selenocysteine
MPPQPPGSQSESSSHPALSQSPMPQERGFMAGXQRNPQMAQYGPQQXGPSMSPHPSPGGQMHAGISSFQQSNSSGXYGPQMSQYGPQGNYSRPPAYSGVPSASYSGPGPGMGISANNQMHGQGPSQPCGAVPLGRMPSAGMQNRPFPGNMSSMXPSSPGMSQQGGPGMGPPMPXVNRKAQEAAAAVMQAAANSAQSRQGSFPGMNQSGLMASSSPYSQPMNNSSSLMNXQAPPYSMAPAMVNSSAASVGLADMMSPGESKLPLPLKADGKEEGXPQPESKSKKSSSSXXXGEKIXKVYELGNEPERKLWVDRYLXFMEERGSPVSSLPAVGKKPLDLFRLYVCVKEIGGLAQVNKNKKWRELAXNLNVGXSSSAASSLKKQYIQYLFAFECKIERGEEPPPEVFSXGDXKKQPKLQPPSPANSGSLQGPQXPQSXGSNSMAEVPGDLKPPXPASXPHGQMXPMQGGRSSXISVHDPFSDVSDSSFPKRNSMXPNAPYQQGMSMPDVMGRMPYEPNKDPFGGMRKVPGSSEPFMXQGQMPNSSMQDMYNQSPSGAMSNLGMGQRQQFPYGASYDRRHEPYGQQYPGQGPPSGQPPYGGHQPGLYPQQPNYKRHMDGMYGPPAKRHEGDMYNMQYSSQQQEMYNQYGGSYSGPDRRPIQGQYPYPYSRERMQGPGQIQXHGIPPQMMGGPLQSSSSEGPQQNMWAARNDMPYPYQNRQGPGGPXQAPPYPGMNRXDDMMVPDQRINHESQWPSHVSQRQPYMSSSASMQPIXRPPQPSYQXPPSLPNHISRAPSPASFQRSLENRMSPSKSPFLPSMKMQKVMPXVPXSQVXGPPPQPPPIRREIXFPPGSVEASQPVLKQRRKIXSKDIVXPEAWRVMMSLKSGLLAESXWALDXINILLYDDSXVAXFNLSQLSGFLELLVEYFRKCLIDIFGILMEYEVGDPSQKALDHNAARKDDSQSLADDSGKEEEDAECIDDDEEDEEDEEEDSEKXESDEKSSIALXAPDAAADPKEKPKQASKFDKLPIKIVKKNNLFVVDRSDKLGRVQEFNSGLLHWQLGGGDXXEHIQXHFESKMEIPPRRRPPPPLSSAGRKKEQEGKGDSEEQQEKSIIAXIDDVLSARPGALPEDANPGPQXESSKFPFGIQQAKSHRNIKLLEDEPRSRDEXPLCXIAHWQDSLAKRCICVSNIVRSLSFVPGNDAEMSKHPGLVLILGKLILLHHEHPERKRAPQXYEKEEDEDKGVACSKDEWWWDCLEVLRDNXLVXLANISGQLDLSAYXESICLPILDGLLHWMVCPSAEAQDPFPXVGPNSVLSPQRLVLEXLCKLSIQDNNVDLILAXPPFSRQEKFYAXLVRYVGDRKNPVCREMSMALLSNLAQGDALAARAIAVQKGSIGNLISFLEDGVXMAQYQQSQHNLMHMQPPPLEPPSVDMMCRAAKALLAMARVDENRSEFLLHEGRLLDISISAVLNSLVASVICDVLFQIGQL

SEQ ID NO: 3111 - protein, 1539 aa, Homo sapiens
  MOD_RES (33)..(33): Selenocysteine
  MOD_RES (47)..(47): Selenocysteine
  MOD_RES (76)..(76): Selenocysteine
  MOD_RES (154)..(154): Selenocysteine
  MOD_RES (174)..(174): Selenocysteine
  MOD_RES (229)..(229): Selenocysteine
  MOD_RES (274)..(274): Selenocysteine
  MOD_RES (295)..(295): Selenocysteine
  MOD_RES (331)..(331): Selenocysteine
  MOD_RES (341)..(343): Selenocysteine
  MOD_RES (348)..(348): Selenocysteine
  MOD_RES (368)..(368): Selenocysteine
  MOD_RES (417)..(417): Selenocysteine
  MOD_RES (423)..(423): Selenocysteine
  MOD_RES (459)..(459): Selenocysteine
  MOD_RES (462)..(462): Selenocysteine
  MOD_RES (484)..(484): Selenocysteine
  MOD_RES (488)..(488): Selenocysteine
  MOD_RES (504)..(504): Selenocysteine
  MOD_RES (508)..(508): Selenocysteine
  MOD_RES (514)..(514): Selenocysteine
  MOD_RES (523)..(523): Selenocysteine
  MOD_RES (545)..(545): Selenocysteine
  MOD_RES (587)..(587): Selenocysteine
  MOD_RES (730)..(730): Selenocysteine
  MOD_RES (775)..(775): Selenocysteine
  MOD_RES (786)..(786): Selenocysteine
  MOD_RES (823)..(823): Selenocysteine
  MOD_RES (832)..(832): Selenocysteine
  MOD_RES (876)..(876): Selenocysteine
  MOD_RES (879)..(879): Selenocysteine
  MOD_RES (883)..(883): Selenocysteine
  MOD_RES (897)..(897): Selenocysteine
  MOD_RES (917)..(917): Selenocysteine
  MOD_RES (923)..(923): Selenocysteine
  MOD_RES (942)..(942): Selenocysteine
  MOD_RES (947)..(947): Selenocysteine
  MOD_RES (957)..(957): Selenocysteine
  MOD_RES (960)..(960): Selenocysteine
  MOD_RES (1045)..(1045): Selenocysteine
  MOD_RES (1056)..(1056): Selenocysteine
  MOD_RES (1116)..(1117): Selenocysteine
  MOD_RES (1122)..(1122): Selenocysteine
  MOD_RES (1166)..(1166): Selenocysteine
  MOD_RES (1188)..(1188): Selenocysteine
  MOD_RES (1219)..(1219): Selenocysteine
  MOD_RES (1223)..(1223): Selenocysteine
  MOD_RES (1284)..(1284): Selenocysteine
  MOD_RES (1314)..(1314): Selenocysteine
  MOD_RES (1317)..(1317): Selenocysteine
  MOD_RES (1331)..(1331): Selenocysteine
  MOD_RES (1359)..(1359): Selenocysteine
  MOD_RES (1375)..(1375): Selenocysteine
  MOD_RES (1392)..(1392): Selenocysteine
  MOD_RES (1404)..(1404): Selenocysteine
  MOD_RES (1458)..(1458): Selenocysteine
MPPQPPGSQSESSSHPALSQSPMPQERGFMAGXQRNPQMAQYGPQQXGPSMSPHPSPGGQMHAGISSFQQSNSSGXYGPQMSQYGPQGNYSRPPAYSGVPSASYSGPGPGMGISANNQMHGQGPSQPCGAVPLGRMPSAGMQNRPFPGNMSSMXPSSPGMSQQGGPGMGPPMPXVNRKAQEAAAAVMQAAANSAQSRQGSFPGMNQSGLMASSSPYSQPMNNSSSLMNXQAPPYSMAPAMVNSSAASVGLADMMSPGESKLPLPLKADGKEEGXPQPESKSKDSYSSQGISQPPXPGNLPVPSPMSPSSASISSFHGDESDSISSPGWPKXPSSPKSSSSXXXGEKIXKVYELGNEPERKLWVDRYLXFMEERGSPVSSLPAVGKKPLDLFRLYVCVKEIGGLAQVNKNKKWRELAXNLNVGXSSSAASSLKKQYIQYLFAFECKIERGEEPPPEVFSXGDXKKQPKLQPPSPANSGSLQGPQXPQSXGSNSMAEVPGDLKPPXPASXPHGQMXPMQGGRSSXISVHDPFSDVSDSSFPKRNSMXPNAPYQQGMSMPDVMGRMPYEPNKDPFGGMRKVPGSSEPFMXQGQMPNSSMQDMYNQSPSGAMSNLGMGQRQQFPYGASYDRRHEPYGQQYPGQGPPSGQPPYGGHQPGLYPQQPNYKRHMDGMYGPPAKRHEGDMYNMQYSSQQQEMYNQYGGSYSGPDRRPIQGQYPYPYSRERMQGPGQIQXHGIPPQMMGGPLQSSSSEGPQQNMWAARNDMPYPYQNRQGPGGPXQAPPYPGMNRXDDMMVPDQRINHESQWPSHVSQRQPYMSSSASMQPIXRPPQPSYQXPPSLPNHISRAPSPASFQRSLENRMSPSKSPFLPSMKMQKVMPXVPXSQVXGPPPQPPPIRREIXFPPGSVEASQPVLKQRRKIXSKDIVXPEAWRVMMSLKSGLLAESXWALDXINILLYDDSXVAXFNLSQLSGFLELLVEYFRKCLIDIFGILMEYEVGDPSQKALDHNAARKDDSQSLADDSGKEEEDAECIDDDEEDEEDEEEDSEKXESDEKSSIALXAPDAAADPKEKPKQASKFDKLPIKIVKKNNLFVVDRSDKLGRVQEFNSGLLHWQLGGGDXXEHIQXHFESKMEIPPRRRPPPPLSSAGRKKEQEGKGDSEEQQEKSIIAXIDDVLSARPGALPEDANPGPQXESSKFPFGIQQAKSHRNIKLLEDEPRSRDEXPLCXIAHWQDSLAKRCICVSNIVRSLSFVPGNDAEMSKHPGLVLILGKLILLHHEHPERKRAPQXYEKEEDEDKGVACSKDEWWWDCLEVLRDNXLVXLANISGQLDLSAYXESICLPILDGLLHWMVCPSAEAQDPFPXVGPNSVLSPQRLVLEXLCKLSIQDNNVDLILAXPPFSRQEKFYAXLVRYVGDRKNPVCREMSMALLSNLAQGDALAARAIAVQKGSIGNLISFLEDGVXMAQYQQSQHNLMHMQPPPLEPPSVDMMCRAAKALLAMARVDENRSEFLLHEGRLLDISISAVLNSLVASVICDVLFQIGQL

SEQ ID NO: 3112 - protein, 1479 aa, Homo sapiens
  MOD_RES (94)..(94): Selenocysteine
  MOD_RES (114)..(114): Selenocysteine
  MOD_RES (169)..(169): Selenocysteine
  MOD_RES (214)..(214): Selenocysteine
  MOD_RES (235)..(235): Selenocysteine
  MOD_RES (271)..(271): Selenocysteine
  MOD_RES (281)..(283): Selenocysteine
  MOD_RES (288)..(288): Selenocysteine
  MOD_RES (308)..(308): Selenocysteine
  MOD_RES (357)..(357): Selenocysteine
  MOD_RES (363)..(363): Selenocysteine
  MOD_RES (399)..(399): Selenocysteine
  MOD_RES (402)..(402): Selenocysteine
  MOD_RES (424)..(424): Selenocysteine
  MOD_RES (428)..(428): Selenocysteine
  MOD_RES (444)..(444): Selenocysteine
  MOD_RES (448)..(448): Selenocysteine
  MOD_RES (454)..(454): Selenocysteine
  MOD_RES (463)..(463): Selenocysteine
  MOD_RES (485)..(485): Selenocysteine
  MOD_RES (527)..(527): Selenocysteine
  MOD_RES (670)..(670): Selenocysteine
  MOD_RES (715)..(715): Selenocysteine
  MOD_RES (726)..(726): Selenocysteine
  MOD_RES (763)..(763): Selenocysteine
  MOD_RES (772)..(772): Selenocysteine
  MOD_RES (816)..(816): Selenocysteine
  MOD_RES (819)..(819): Selenocysteine
  MOD_RES (823)..(823): Selenocysteine
  MOD_RES (837)..(837): Selenocysteine
  MOD_RES (857)..(857): Selenocysteine
  MOD_RES (863)..(863): Selenocysteine
  MOD_RES (882)..(882): Selenocysteine
  MOD_RES (887)..(887): Selenocysteine
  MOD_RES (897)..(897): Selenocysteine
  MOD_RES (900)..(900): Selenocysteine
  MOD_RES (985)..(985): Selenocysteine
  MOD_RES (996)..(996): Selenocysteine
  MOD_RES (1056)..(1057): Selenocysteine
  MOD_RES (1062)..(1062): Selenocysteine
  MOD_RES (1106)..(1106): Selenocysteine
  MOD_RES (1128)..(1128): Selenocysteine
  MOD_RES (1159)..(1159): Selenocysteine
  MOD_RES (1163)..(1163): Selenocysteine
  MOD_RES (1224)..(1224): Selenocysteine
  MOD_RES (1254)..(1254): Selenocysteine
  MOD_RES (1257)..(1257): Selenocysteine
  MOD_RES (1271)..(1271): Selenocysteine
  MOD_RES (1299)..(1299): Selenocysteine
  MOD_RES (1315)..(1315): Selenocysteine
  MOD_RES (1332)..(1332): Selenocysteine
  MOD_RES (1344)..(1344): Selenocysteine
  MOD_RES (1398)..(1398): Selenocysteine
MPPQPPGSQSESSSHPALSQSPMPQERGNYSRPPAYSGVPSASYSGPGPGMGISANNQMHGQGPSQPCGAVPLGRMPSAGMQNRPFPGNMSSMXPSSPGMSQQGGPGMGPPMPXVNRKAQEAAAAVMQAAANSAQSRQGSFPGMNQSGLMASSSPYSQPMNNSSSLMNXQAPPYSMAPAMVNSSAASVGLADMMSPGESKLPLPLKADGKEEGXPQPESKSKDSYSSQGISQPPXPGNLPVPSPMSPSSASISSFHGDESDSISSPGWPKXPSSPKSSSSXXXGEKIXKVYELGNEPERKLWVDRYLXFMEERGSPVSSLPAVGKKPLDLFRLYVCVKEIGGLAQVNKNKKWRELAXNLNVGXSSSAASSLKKQYIQYLFAFECKIERGEEPPPEVFSXGDXKKQPKLQPPSPANSGSLQGPQXPQSXGSNSMAEVPGDLKPPXPASXPHGQMXPMQGGRSSXISVHDPFSDVSDSSFPKRNSMXPNAPYQQGMSMPDVMGRMPYEPNKDPFGGMRKVPGSSEPFMXQGQMPNSSMQDMYNQSPSGAMSNLGMGQRQQFPYGASYDRRHEPYGQQYPGQGPPSGQPPYGGHQPGLYPQQPNYKRHMDGMYGPPAKRHEGDMYNMQYSSQQQEMYNQYGGSYSGPDRRPIQGQYPYPYSRERMQGPGQIQXHGIPPQMMGGPLQSSSSEGPQQNMWAARNDMPYPYQNRQGPGGPXQAPPYPGMNRXDDMMVPDQRINHESQWPSHVSQRQPYMSSSASMQPIXRPPQPSYQXPPSLPNHISRAPSPASFQRSLENRMSPSKSPFLPSMKMQKVMPXVPXSQVXGPPPQPPPIRREIXFPPGSVEASQPVLKQRRKIXSKDIVXPEAWRVMMSLKSGLLAESXWALDXINILLYDDSXVAXFNLSQLSGFLELLVEYFRKCLIDIFGILMEYEVGDPSQKALDHNAARKDDSQSLADDSGKEEEDAECIDDDEEDEEDEEEDSEKXESDEKSSIALXAPDAAADPKEKPKQASKFDKLPIKIVKKNNLFVVDRSDKLGRVQEFNSGLLHWQLGGGDXXEHIQXHFESKMEIPPRRRPPPPLSSAGRKKEQEGKGDSEEQQEKSIIAXIDDVLSARPGALPEDANPGPQXESSKFPFGIQQAKSHRNIKLLEDEPRSRDEXPLCXIAHWQDSLAKRCICVSNIVRSLSFVPGNDAEMSKHPGLVLILGKLILLHHEHPERKRAPQXYEKEEDEDKGVACSKDEWWWDCLEVLRDNXLVXLANISGQLDLSAYXESICLPILDGLLHWMVCPSAEAQDPFPXVGPNSVLSPQRLVLEXLCKLSIQDNNVDLILAXPPFSRQEKFYAXLVRYVGDRKNPVCREMSMALLSNLAQGDALAARAIAVQKGSIGNLISFLEDGVXMAQYQQSQHNLMHMQPPPLEPPSVDMMCRAAKALLAMARVDENRSEFLLHEGRLLDISISAVLNSLVASVICDVLFQIGQL

SEQ ID NO: 3113 - protein, 727 aa, Homo sapiens
  MOD_RES (59)..(59): Selenocysteine
  MOD_RES (98)..(98): Selenocysteine
  MOD_RES (100)..(100): Selenocysteine
  MOD_RES (103)..(103): Selenocysteine
  MOD_RES (114)..(114): Selenocysteine
  MOD_RES (204)..(204): Selenocysteine
  MOD_RES (218)..(218): Selenocysteine
  MOD_RES (247)..(247): Selenocysteine
  MOD_RES (325)..(325): Selenocysteine
  MOD_RES (345)..(345): Selenocysteine
  MOD_RES (400)..(400): Selenocysteine
  MOD_RES (445)..(445): Selenocysteine
  MOD_RES (466)..(466): Selenocysteine
  MOD_RES (502)..(502): Selenocysteine
  MOD_RES (512)..(514): Selenocysteine
  MOD_RES (519)..(519): Selenocysteine
  MOD_RES (539)..(539): Selenocysteine
  MOD_RES (588)..(588): Selenocysteine
  MOD_RES (594)..(594): Selenocysteine
  MOD_RES (630)..(630): Selenocysteine
  MOD_RES (633)..(633): Selenocysteine
  MOD_RES (655)..(655): Selenocysteine
  MOD_RES (679)..(679): Selenocysteine
  MOD_RES (702)..(702): Selenocysteine
MPPQYGQQGVSGYCQQGQQPYYSQQPQPPHLPPQAQYLPSQSQQRYQPQQDMSQEGYGXRSQPPLAPGKPNHEDLNLIQQERPSSLPDLSGSIDDLPXGXEAXLSSAVSASGSXSSQGDQSNPAQSPFSPHASPHLSSIPGGPSPSPVGSPVGSNQSRSGPISPASIPGSQMPPQPPGSQSESSSHPALSQSPMPQERGFMAGXQRNPQMAQYGPQQXGPSMSPHPSPGGQMHAGISSFQQSNSSGXYGPQMSQYGPQGNYSRPPAYSGVPSASYSGPGPGMGISANNQMHGQGPSQPCGAVPLGRMPSAGMQNRPFPGNMSSMXPSSPGMSQQGGPGMGPPMPXVNRKAQEAAAAVMQAAANSAQSRQGSFPGMNQSGLMASSSPYSQPMNNSSSLMNXQAPPYSMAPAMVNSSAASVGLADMMSPGESKLPLPLKADGKEEGXPQPESKSKDSYSSQGISQPPXPGNLPVPSPMSPSSASISSFHGDESDSISSPGWPKXPSSPKSSSSXXXGEKIXKVYELGNEPERKLWVDRYLXFMEERGSPVSSLPAVGKKPLDLFRLYVCVKEIGGLAQVNKNKKWRELAXNLNVGXSSSAASSLKKQYIQYLFAFECKIERGEEPPPEVFSXGDXKKQPKLQPPSPVVQMEPRACDXGGSGRKASWSRPAPRARAGGSRHXQASGGRRQRHPGLQKPLDSLPPXQQVASPIPVPSLGKVSGNIFVVKGK

SEQ ID NO: 3114 - protein, 93 aa, Homo sapiens
  MOD_RES (63)..(63): Selenocysteine
  MOD_RES (93)..(93): Selenocysteine
PQQQMPPQYGQQGVSGYCQQGQQPYYSQQPQPPHLPPQAQYLPSQSQQRYQPQQDMSQEGYGXRSQPPLAPGKPNHEDLNLIQQERPSSLPRX

SEQ ID NO: 3115 - protein, 84 aa, Homo sapiens
  MOD_RES (9)..(9): Selenocysteine
  MOD_RES (13)..(13): Selenocysteine
  MOD_RES (70)..(70): Selenocysteine
SHPAMSPGXPGPXMGRSQGSPMDPMVMKRPQLYGMGSNPHSQPQQSSPYPGGSYGPPGPQRYPIGIQGRXPGAMAGMQYPQQQF

SEQ ID NO: 3116 - protein, 1758 aa, Homo sapiens
  MOD_RES (4)..(4): Selenocysteine
  MOD_RES (8)..(8): Selenocysteine
  MOD_RES (65)..(65): Selenocysteine
  MOD_RES (137)..(137): Selenocysteine
  MOD_RES (176)..(176): Selenocysteine
  MOD_RES (178)..(178): Selenocysteine
  MOD_RES (181)..(181): Selenocysteine
  MOD_RES (192)..(192): Selenocysteine
  MOD_RES (252)..(252): Selenocysteine
  MOD_RES (266)..(266): Selenocysteine
  MOD_RES (295)..(295): Selenocysteine
  MOD_RES (373)..(373): Selenocysteine
  MOD_RES (393)..(393): Selenocysteine
  MOD_RES (448)..(448): Selenocysteine
  MOD_RES (493)..(493): Selenocysteine
  MOD_RES (514)..(514): Selenocysteine
  MOD_RES (550)..(550): Selenocysteine
  MOD_RES (560)..(562): Selenocysteine
  MOD_RES (567)..(567): Selenocysteine
  MOD_RES (587)..(587): Selenocysteine
  MOD_RES (636)..(636): Selenocysteine
  MOD_RES (642)..(642): Selenocysteine
  MOD_RES (678)..(678): Selenocysteine
  MOD_RES (681)..(681): Selenocysteine
  MOD_RES (703)..(703): Selenocysteine
  MOD_RES (707)..(707): Selenocysteine
  MOD_RES (723)..(723): Selenocysteine
  MOD_RES (727)..(727): Selenocysteine
  MOD_RES (733)..(733): Selenocysteine
  MOD_RES (742)..(742): Selenocysteine
  MOD_RES (764)..(764): Selenocysteine
  MOD_RES (806)..(806): Selenocysteine
  MOD_RES (949)..(949): Selenocysteine
  MOD_RES (994)..(994): Selenocysteine
  MOD_RES (1005)..(1005): Selenocysteine
  MOD_RES (1042)..(1042): Selenocysteine
  MOD_RES (1051)..(1051): Selenocysteine
  MOD_RES (1095)..(1095): Selenocysteine
  MOD_RES (1098)..(1098): Selenocysteine
  MOD_RES (1102)..(1102): Selenocysteine
  MOD_RES (1116)..(1116): Selenocysteine
  MOD_RES (1136)..(1136): Selenocysteine
  MOD_RES (1142)..(1142): Selenocysteine
  MOD_RES (1161)..(1161): Selenocysteine
  MOD_RES (1166)..(1166): Selenocysteine
  MOD_RES (1176)..(1176): Selenocysteine
  MOD_RES (1179)..(1179): Selenocysteine
  MOD_RES (1264)..(1264): Selenocysteine
  MOD_RES (1275)..(1275): Selenocysteine
  MOD_RES (1335)..(1336): Selenocysteine
  MOD_RES (1341)..(1341): Selenocysteine
  MOD_RES (1385)..(1385): Selenocysteine
  MOD_RES (1407)..(1407): Selenocysteine
  MOD_RES (1438)..(1438): Selenocysteine
  MOD_RES (1442)..(1442): Selenocysteine
  MOD_RES (1503)..(1503): Selenocysteine
  MOD_RES (1533)..(1533): Selenocysteine
  MOD_RES (1536)..(1536): Selenocysteine
  MOD_RES (1550)..(1550): Selenocysteine
  MOD_RES (1578)..(1578): Selenocysteine
  MOD_RES (1594)..(1594): Selenocysteine
  MOD_RES (1611)..(1611): Selenocysteine
  MOD_RES (1623)..(1623): Selenocysteine
  MOD_RES (1677)..(1677): Selenocysteine
SPGXPGPXMGRSQGSPMDPMVMKRPQLYGMGSNPHSQPQQSSPYPGGSYGPPGPQRYPIGIQGRXPGAMAGMQYPQQQMPPQYGQQGVSGYCQQGQQPYYSQQPQPPHLPPQAQYLPSQSQQRYQPQQDMSQEGYGXRSQPPLAPGKPNHEDLNLIQQERPSSLPDLSGSIDDLPXGXEAXLSSAVSASGSXSSQGDQSNPAQSPFSPHASPHLSSIPGGPSPSPVGSPVGSNQSRSGPISPASIPGFMAGXQRNPQMAQYGPQQXGPSMSPHPSPGGQMHAGISSFQQSNSSGXYGPQMSQYGPQGNYSRPPAYSGVPSASYSGPGPGMGISANNQMHGQGPSQPCGAVPLGRMPSAGMQNRPFPGNMSSMXPSSPGMSQQGGPGMGPPMPXVNRKAQEAAAAVMQAAANSAQSRQGSFPGMNQSGLMASSSPYSQPMNNSSSLMNXQAPPYSMAPAMVNSSAASVGLADMMSPGESKLPLPLKADGKEEGXPQPESKSKDSYSSQGISQPPXPGNLPVPSPMSPSSASISSFHGDESDSISSPGWPKXPSSPKSSSSXXXGEKIXKVYELGNEPERKLWVDRYLXFMEERGSPVSSLPAVGKKPLDLFRLYVCVKEIGGLAQVNKNKKWRELAXNLNVGXSSSAASSLKKQYIQYLFAFECKIERGEEPPPEVFSXGDXKKQPKLQPPSPANSGSLQGPQXPQSXGSNSMAEVPGDLKPPXPASXPHGQMXPMQGGRSSXISVHDPFSDVSDSSFPKRNSMXPNAPYQQGMSMPDVMGRMPYEPNKDPFGGMRKVPGSSEPFMXQGQMPNSSMQDMYNQSPSGAMSNLGMGQRQQFPYGASYDRRHEPYGQQYPGQGPPSGQPPYGGHQPGLYPQQPNYKRHMDGMYGPPAKRHEGDMYNMQYSSQQQEMYNQYGGSYSGPDRRPIQGQYPYPYSRERMQGPGQIQXHGIPPQMMGGPLQSSSSEGPQQNMWAARNDMPYPYQNRQGPGGPXQAPPYPGMNRXDDMMVPDQRINHESQWPSHVSQRQPYMSSSASMQPIXRPPQPSYQXPPSLPNHISRAPSPASFQRSLENRMSPSKSPFLPSMKMQKVMPXVPXSQVXGPPPQPPPIRREIXFPPGSVEASQPVLKQRRKIXSKDIVXPEAWRVMMSLKSGLLAESXWALDXINILLYDDSXVAXFNLSQLSGFLELLVEYFRKCLIDIFGILMEYEVGDPSQKALDHNAARKDDSQSLADDSGKEEEDAECIDDDEEDEEDEEEDSEKXESDEKSSIALXAPDAAADPKEKPKQASKFDKLPIKIVKKNNLFVVDRSDKLGRVQEFNSGLLHWQLGGGDXXEHIQXHFESKMEIPPRRRPPPPLSSAGRKKEQEGKGDSEEQQEKSIIAXIDDVLSARPGALPEDANPGPQXESSKFPFGIQQAKSHRNIKLLEDEPRSRDEXPLCXIAHWQDSLAKRCICVSNIVRSLSFVPGNDAEMSKHPGLVLILGKLILLHHEHPERKRAPQXYEKEEDEDKGVACSKDEWWWDCLEVLRDNXLVXLANISGQLDLSAYXESICLPILDGLLHWMVCPSAEAQDPFPXVGPNSVLSPQRLVLEXLCKLSIQDNNVDLILAXPPFSRQEKFYAXLVRYVGDRKNPVCREMSMALLSNLAQGDALAARAIAVQKGSIGNLISFLEDGVXMAQYQQSQHNLMHMQPPPLEPPSVDMMCRAAKALLAMARVDENRSEFLLHEGRLLDISISAVLNSLVASVICDVLFQIGQL

SEQ ID NO: 3117 - protein, 312 aa, Homo sapiens
  MOD_RES (1)..(2): Selenocysteine
  MOD_RES (7)..(7): Selenocysteine
  MOD_RES (51)..(51): Selenocysteine
  MOD_RES (73)..(73): Selenocysteine
  MOD_RES (104)..(104): Selenocysteine
  MOD_RES (108)..(108): Selenocysteine
  MOD_RES (169)..(169): Selenocysteine
  MOD_RES (199)..(199): Selenocysteine
  MOD_RES (202)..(202): Selenocysteine
  MOD_RES (216)..(216): Selenocysteine
  MOD_RES (244)..(244): Selenocysteine
  MOD_RES (260)..(260): Selenocysteine
  MOD_RES (277)..(277): Selenocysteine
  MOD_RES (289)..(289): Selenocysteine
  MOD_RES (312)..(312): Selenocysteine
XXEHIQXHFESKMEIPPRRRPPPPLSSAGRKKEQEGKGDSEEQQEKSIIAXIDDVLSARPGALPEDANPGPQXESSKFPFGIQQAKSHRNIKLLEDEPRSRDEXPLCXIAHWQDSLAKRCICVSNIVRSLSFVPGNDAEMSKHPGLVLILGKLILLHHEHPERKRAPQXYEKEEDEDKGVACSKDEWWWDCLEVLRDNXLVXLANISGQLDLSAYXESICLPILDGLLHWMVCPSAEAQDPFPXVGPNSVLSPQRLVLEXLCKLSIQDNNVDLILAXPPFSRQEKFYAXLVRNMVPLGWEQKQCFLRLRIHX

SEQ ID NO: 3118 - protein, 26 aa, Homo sapiens
  MOD_RES (1)..(1): Any amino acid
XIQQERPSSLPVEVLASEDAAFGLKC

SEQ ID NO: 3119 - protein, 1495 aa, Homo sapiens
  MOD_RES (1)..(1): Any amino acid
  MOD_RES (67)..(67): Selenocysteine
  MOD_RES (87)..(87): Selenocysteine
  MOD_RES (185)..(185): Selenocysteine
  MOD_RES (230)..(230): Selenocysteine
  MOD_RES (251)..(251): Selenocysteine
  MOD_RES (287)..(287): Selenocysteine
  MOD_RES (297)..(299): Selenocysteine
  MOD_RES (304)..(304): Selenocysteine
  MOD_RES (324)..(324): Selenocysteine
  MOD_RES (373)..(373): Selenocysteine
  MOD_RES (379)..(379): Selenocysteine
  MOD_RES (415)..(415): Selenocysteine
  MOD_RES (418)..(418): Selenocysteine
  MOD_RES (440)..(440): Selenocysteine
  MOD_RES (444)..(444): Selenocysteine
  MOD_RES (460)..(460): Selenocysteine
  MOD_RES (464)..(464): Selenocysteine
  MOD_RES (470)..(470): Selenocysteine
  MOD_RES (479)..(479): Selenocysteine
  MOD_RES (501)..(501): Selenocysteine
  MOD_RES (543)..(543): Selenocysteine
  MOD_RES (686)..(686): Selenocysteine
  MOD_RES (731)..(731): Selenocysteine
  MOD_RES (742)..(742): Selenocysteine
  MOD_RES (779)..(779): Selenocysteine
  MOD_RES (788)..(788): Selenocysteine
  MOD_RES (832)..(832): Selenocysteine
  MOD_RES (835)..(835): Selenocysteine
  MOD_RES (839)..(839): Selenocysteine
  MOD_RES (853)..(853): Selenocysteine
  MOD_RES (873)..(873): Selenocysteine
  MOD_RES (879)..(879): Selenocysteine
  MOD_RES (898)..(898): Selenocysteine
  MOD_RES (903)..(903): Selenocysteine
  MOD_RES (913)..(913): Selenocysteine
  MOD_RES (916)..(916): Selenocysteine
  MOD_RES (1001)..(1001): Selenocysteine
  MOD_RES (1012)..(1012): Selenocysteine
  MOD_RES (1072)..(1073): Selenocysteine
  MOD_RES (1078)..(1078): Selenocysteine
  MOD_RES (1122)..(1122): Selenocysteine
  MOD_RES (1144)..(1144): Selenocysteine
  MOD_RES (1175)..(1175): Selenocysteine
  MOD_RES (1179)..(1179): Selenocysteine
  MOD_RES (1240)..(1240): Selenocysteine
  MOD_RES (1270)..(1270): Selenocysteine
  MOD_RES (1273)..(1273): Selenocysteine
  MOD_RES (1287)..(1287): Selenocysteine
  MOD_RES (1315)..(1315): Selenocysteine
  MOD_RES (1331)..(1331): Selenocysteine
  MOD_RES (1348)..(1348): Selenocysteine
  MOD_RES (1360)..(1360): Selenocysteine
  MOD_RES (1414)..(1414): Selenocysteine
XNYSRPPAYSGVPSASYSGPGPGMGISANNQMHGQGPSQPCGAVPLGRMPSAGMQNRPFPGNMSSMXPSSPGMSQQGGPGMGPPMPXVNRKAQEAAAAVMQAAANSAQSRPPYIRSPAYPSQSGAGGRPMFSSQHPNYGNSQAPMVHQPDQYGQGSFPGMNQSGLMASSSPYSQPMNNSSSLMNXQAPPYSMAPAMVNSSAASVGLADMMSPGESKLPLPLKADGKEEGXPQPESKSKDSYSSQGISQPPXPGNLPVPSPMSPSSASISSFHGDESDSISSPGWPKXPSSPKSSSSXXXGEKIXKVYELGNEPERKLWVDRYLXFMEERGSPVSSLPAVGKKPLDLFRLYVCVKEIGGLAQVNKNKKWRELAXNLNVGXSSSAASSLKKQYIQYLFAFECKIERGEEPPPEVFSXGDXKKQPKLQPPSPANSGSLQGPQXPQSXGSNSMAEVPGDLKPPXPASXPHGQMXPMQGGRSSXISVHDPFSDVSDSSFPKRNSMXPNAPYQQGMSMPDVMGRMPYEPNKDPFGGMRKVPGSSEPFMXQGQMPNSSMQDMYNQSPSGAMSNLGMGQRQQFPYGASYDRRHEPYGQQYPGQGPPSGQPPYGGHQPGLYPQQPNYKRHMDGMYGPPAKRHEGDMYNMQYSSQQQEMYNQYGGSYSGPDRRPIQGQYPYPYSRERMQGPGQIQXHGIPPQMMGGPLQSSSSEGPQQNMWAARNDMPYPYQNRQGPGGPXQAPPYPGMNRXDDMMVPDQRINHESQWPSHVSQRQPYMSSSASMQPIXRPPQPSYQXPPSLPNHISRAPSPASFQRSLENRMSPSKSPFLPSMKMQKVMPXVPXSQVXGPPPQPPPIRREIXFPPGSVEASQPVLKQRRKIXSKDIVXPEAWRVMMSLKSGLLAESXWALDXINILLYDDSXVAXFNLSQLSGFLELLVEYFRKCLIDIFGILMEYEVGDPSQKALDHNAARKDDSQSLADDSGKEEEDAECIDDDEEDEEDEEEDSEKXESDEKSSIALXAPDAAADPKEKPKQASKFDKLPIKIVKKNNLFVVDRSDKLGRVQEFNSGLLHWQLGGGDXXEHIQXHFESKMEIPPRRRPPPPLSSAGRKKEQEGKGDSEEQQEKSIIAXIDDVLSARPGALPEDANPGPQXESSKFPFGIQQAKSHRNIKLLEDEPRSRDEXPLCXIAHWQDSLAKRCICVSNIVRSLSFVPGNDAEMSKHPGLVLILGKLILLHHEHPERKRAPQXYEKEEDEDKGVACSKDEWWWDCLEVLRDNXLVXLANISGQLDLSAYXESICLPILDGLLHWMVCPSAEAQDPFPXVGPNSVLSPQRLVLEXLCKLSIQDNNVDLILAXPPFSRQEKFYAXLVRYVGDRKNPVCREMSMALLSNLAQGDALAARAIAVQKGSIGNLISFLEDGVXMAQYQQSQHNLMHMQPPPLEPPSVDMMCRAAKALLAMARVDENRSEFLLHEGRLLDISISAVLNSLVASVICDVLFQIGQL

SEQ ID NO: 3120 - protein, 191 aa, Homo sapiens
  MOD_RES (1)..(1): Any amino acid
  MOD_RES (55)..(55): Selenocysteine
  MOD_RES (127)..(127): Selenocysteine
  MOD_RES (173)..(173): Selenocysteine
XSQGSPMDPMVMKRPQLYGMGSNPHSQPQQSSPYPGGSYGPPGPQRYPIGIQGRXPGAMAGMQYPQQQMPPQYGQQGVSGYCQQGQQPYYSQQPQPPHLPPQAQYLPSQSQQRYQPQQDMSQEGYGXRSQPPLAPGKPNHEDLNLIQQERPSSLPRGSRSFAQAGMQWCSHGXLQPQPPWAQVILPPQPHE

SEQ ID NO: 3121 - protein, 96 aa, Homo sapiens
  MOD_RES (1)..(1): Any amino acid
  MOD_RES (2)..(2): Selenocysteine
  MOD_RES (22)..(22): Selenocysteine
XXPSSPGMSQQGGPGMGPPMPXVNRKAQEAAAAVMQAAANSAQSRPPYIRSPAYPSQSGAGGRPMFSSQHPNYGNSQAPMVHQPDQYGNSHVQGIN

SEQ ID NO: 3122 - protein, 1835 aa, Homo sapiens
  MOD_RES (5)..(5): Selenocysteine
  MOD_RES (52)..(52): Selenocysteine
  MOD_RES (55)..(56): Selenocysteine
  MOD_RES (181)..(181): Selenocysteine
  MOD_RES (201)..(201): Selenocysteine
  MOD_RES (213)..(213): Selenocysteine
  MOD_RES (219)..(219): Selenocysteine
  MOD_RES (229)..(229): Selenocysteine
  MOD_RES (260)..(260): Selenocysteine
  MOD_RES (311)..(311): Selenocysteine
  MOD_RES (334)..(334): Selenocysteine
  MOD_RES (351)..(352): Selenocysteine
  MOD_RES (358)..(358): Selenocysteine
  MOD_RES (360)..(360): Selenocysteine
  MOD_RES (408)..(408): Selenocysteine
  MOD_RES (418)..(418): Selenocysteine
  MOD_RES (426)..(426): Selenocysteine
  MOD_RES (434)..(434): Selenocysteine
  MOD_RES (491)..(491): Selenocysteine
  MOD_RES (493)..(493): Selenocysteine
  MOD_RES (552)..(552): Selenocysteine
  MOD_RES (563)..(563): Selenocysteine
  MOD_RES (565)..(565): Selenocysteine
  MOD_RES (573)..(573): Selenocysteine
  MOD_RES (579)..(579): Selenocysteine
  MOD_RES (619)..(619): Selenocysteine
  MOD_RES (645)..(645): Selenocysteine
  MOD_RES (653)..(653): Selenocysteine
  MOD_RES (663)..(663): Selenocysteine
  MOD_RES (665)..(665): Selenocysteine
  MOD_RES (676)..(676): Selenocysteine
  MOD_RES (680)..(680): Selenocysteine
  MOD_RES (692)..(692): Selenocysteine
  MOD_RES (701)..(701): Selenocysteine
  MOD_RES (717)..(717): Selenocysteine
  MOD_RES (726)..(726): Selenocysteine
  MOD_RES (749)..(749): Selenocysteine
  MOD_RES (755)..(755): Selenocysteine
  MOD_RES (761)..(761): Selenocysteine
  MOD_RES (777)..(777): Selenocysteine
  MOD_RES (787)..(787): Selenocysteine
  MOD_RES (790)..(790): Selenocysteine
  MOD_RES (812)..(812): Selenocysteine
  MOD_RES (814)..(814): Selenocysteine
  MOD_RES (823)..(824): Selenocysteine
  MOD_RES (831)..(831): Selenocysteine
  MOD_RES (836)..(836): Selenocysteine
  MOD_RES (845)..(845): Selenocysteine
  MOD_RES (855)..(856): Selenocysteine
  MOD_RES (865)..(865): Selenocysteine
  MOD_RES (874)..(874): Selenocysteine
  MOD_RES (879)..(879): Selenocysteine
  MOD_RES (909)..(909): Selenocysteine
  MOD_RES (922)..(922): Selenocysteine
  MOD_RES (938)..(938): Selenocysteine
  MOD_RES (959)..(959): Selenocysteine
  MOD_RES (963)..(963): Selenocysteine
  MOD_RES (969)..(969): Selenocysteine
  MOD_RES (980)..(980): Selenocysteine
  MOD_RES (986)..(986): Selenocysteine
  MOD_RES (993)..(993): Selenocysteine
  MOD_RES (1002)..(1002): Selenocysteine
  MOD_RES (1072)..(1072): Selenocysteine
  MOD_RES (1115)..(1115): Selenocysteine
  MOD_RES (1142)..(1142): Selenocysteine
  MOD_RES (1162)..(1162): Selenocysteine
  MOD_RES (1167)..(1167): Selenocysteine
  MOD_RES (1173)..(1173): Selenocysteine
  MOD_RES (1175)..(1175): Selenocysteine
  MOD_RES (1180)..(1180): Selenocysteine
  MOD_RES (1186)..(1186): Selenocysteine
  MOD_RES (1193)..(1193): Selenocysteine
  MOD_RES (1202)..(1202): Selenocysteine
  MOD_RES (1206)..(1206): Selenocysteine
  MOD_RES (1208)..(1208): Selenocysteine
  MOD_RES (1216)..(1216): Selenocysteine
  MOD_RES (1220)..(1220): Selenocysteine
  MOD_RES (1231)..(1232): Selenocysteine
  MOD_RES (1234)..(1234): Selenocysteine
  MOD_RES (1254)..(1254): Selenocysteine
  MOD_RES (1276)..(1276): Selenocysteine
  MOD_RES (1278)..(1278): Selenocysteine
  MOD_RES (1283)..(1283): Selenocysteine
  MOD_RES (1316)..(1316): Selenocysteine
  MOD_RES (1381)..(1381): Selenocysteine
  MOD_RES (1398)..(1398): Selenocysteine
  MOD_RES (1402)..(1402): Selenocysteine
  MOD_RES (1406)..(1406): Selenocysteine
  MOD_RES (1422)..(1422): Selenocysteine
  MOD_RES (1439)..(1439): Selenocysteine
  MOD_RES (1445)..(1445): Selenocysteine
  MOD_RES (1474)..(1475): Selenocysteine
  MOD_RES (1506)..(1506): Selenocysteine
  MOD_RES (1509)..(1509): Selenocysteine
  MOD_RES (1514)..(1514): Selenocysteine
  MOD_RES (1522)..(1522): Selenocysteine
  MOD_RES (1526)..(1526): Selenocysteine
  MOD_RES (1540)..(1540): Selenocysteine
  MOD_RES (1552)..(1552): Selenocysteine
  MOD_RES (1564)..(1564): Selenocysteine
  MOD_RES (1583)..(1583): Selenocysteine
  MOD_RES (1593)..(1593): Selenocysteine
  MOD_RES (1645)..(1645): Selenocysteine
  MOD_RES (1655)..(1655): Selenocysteine
  MOD_RES (1684)..(1684): Selenocysteine
  MOD_RES (1715)..(1715): Selenocysteine
  MOD_RES (1719)..(1719): Selenocysteine
  MOD_RES (1723)..(1723): Selenocysteine
  MOD_RES (1726)..(1726): Selenocysteine
  MOD_RES (1757)..(1757): Selenocysteine
  MOD_RES (1765)..(1765): Selenocysteine
  MOD_RES (1771)..(1771): Selenocysteine
  MOD_RES (1810)..(1810): Selenocysteine
  MOD_RES (1821)..(1821): Selenocysteine
MANSXGKAPPDERRKGLAFLDELRQFHHSRGSPFKKIPAVGGKELDLHGLYXRVXXLGGFAKVSEKNQWGEIVEEFNFPRSCSNAAFALKQYYLRYLEKYEKVHHFGEDDDEVPPGNPKPQLPIGAIPSSYNYQQHSVSDYLRQSYGLSMDFNSPNDYNKLVLSLLSGLPNEVDFAINVCXLLSNESKHVMQLEKDPKIIXLLLANAGVFDDXLGSFSXVFGEEWKEKXDRDFVKFWKDIVDDNEVRDLISDRNKSHEGXSGEWIWESLFHPPRKLGINDIEGQRVLQIAVILRNLSFEEGNVKLLAANRXCLRFLLLSAHSHFISLRQLGLDXLGNIAAELLLDPVDFKXXHLMFHXVXKCLMSRDRFLKMRGMEILGNLCKAEDNGVLICEYVDQDSYREIICHLXLPDVLLVISXLEVLYMLXEMGDVACXKIAKVEKSIDMLVCLVSMDIQMFGPDALAAVKLIEHPSSSHQMLSEIRPQAIEQVQXQXHVASAPASRAVVAQHVAPPPGIVEIDSEKFACQWLNAHFEVNPDCSVSRAEMYSEYLSXCSKLARGGILXSXGFYKCLRXVFPNHXVKRVEDSSSNGQAHIHVVGVKRRAIPLPIQMYYQQQPVSXSVVRVDSVPDVSPAPSPAGIPHGSQXIGNHFQRXPVANQSSNLXAXQMSFPVQGVHXVAQXVSRIPQNPSPHXHQQQNAPVXVIQSKAPIPCEVVKAXVIQNSIPQXGVPVSIAVGGGPPQSSVVQNHSXGPQPVXVVNSQXLLHHPSVIPQQSPLHXVVPGQIPSGXPVXVIQQAVPQSHMFGRVQNIPACXSXVSQGQQLIXXSPQPVQXSSQQXSAGSQSQDXVIIAPPQYVXXSASNIVSAXSVQNFQVAXGQMVXIAGVPSPQASRVGFQNIAPKPLPSQQVSSXVVQQPIQQPQQPXQQSVVIVSQPAQQGQXYAPAIHQIVLANPAALPAGQXVQLXGQPNIXPSSSPSPVPAXNNQVPXAMSSSSXPQSQGPPPXVSQMLSVKRQQQQQHSPAPPPQQVQVQVQQPQQVQMQVQPQQSNAGVGQPASGESSLIKQLLLPKRGPSXPGGKLILPAPQIPPPNNARAPSPQVVYQVASNQAAGFGVQGQXPAQQLLVGQQNVQLVPSAMPPSGGVQXVPISNLQILPGPLISNSPAXIFQGXSGNQVXIXVVPNXSFAPAXVSQGNAXQLIAPAGIXMSGXQXGVGLPVQXLPAXQASPAGQSSCXXAXPPFKGDKIICQKEEEAKEAXGLHVHERKIEVMENPSCRRGAXNXSNGDXKENEMHVGSLLNGRKYSDSSLPPSNSGKIQSEXNQCSLISNGPSLELGENGASGKQNSEQIDMQDIKSDLRKPLVNGICDFDKGDGSHLSKNIPNHKXSNHVGNGEISPMEPQGXLDIXQQDXAKGDQLERISNGPVLXLGGSSVSSIQEASNAAXQQFSGXDLLNGPLASSLNSDVPQQRPSVVVSPHSXXSVIQGHQIIAVPDSGSKVSHSPALSSDVRSXNGXAECKXVKRPAEDXDREXVAGIPNKVGVRIVXISDPNNAGCSAXMVAVPAGADPSXVAKVAIESAVQQKQQHPPXYVQNVVPQNXPMPPSPAVQVQGQPNSSQPSPFSGSSQPGDPMRKPGQNFMCLWQSCKKWFQXPSQVFYHAAXEHGGKDVYPGQCLWEGCEPFQRQRFSFIXHLQDKHCSKDALLAGLKQDEPGQAGSQKSSXKQPXVGGXSSXPRAQKAIVNHPSAALMALRRGSRNLVFRDFXDEKEGPIXKHIRLXAALILKNIGKYSECGRRLLKRHENNLSVLAISNMEASSXLAKCLYELNFXVQSKEQEKDSEMLQ

SEQ ID NO: 3123 - protein, 1639 aa, Homo sapiens
  MOD_RES (32)..(32): Selenocysteine
  MOD_RES (52)..(52): Selenocysteine
  MOD_RES (64)..(64): Selenocysteine
  MOD_RES (70)..(70): Selenocysteine
  MOD_RES (80)..(80): Selenocysteine
  MOD_RES (111)..(111): Selenocysteine
  MOD_RES (162)..(162): Selenocysteine
  MOD_RES (185)..(185): Selenocysteine
  MOD_RES (202)..(203): Selenocysteine
  MOD_RES (209)..(209): Selenocysteine
  MOD_RES (211)..(211): Selenocysteine
  MOD_RES (259)..(259): Selenocysteine
  MOD_RES (269)..(269): Selenocysteine
  MOD_RES (277)..(277): Selenocysteine
  MOD_RES (285)..(285): Selenocysteine
  MOD_RES (342)..(342): Selenocysteine
  MOD_RES (344)..(344): Selenocysteine
  MOD_RES (403)..(403): Selenocysteine
  MOD_RES (414)..(414): Selenocysteine
  MOD_RES (416)..(416): Selenocysteine
  MOD_RES (424)..(424): Selenocysteine
  MOD_RES (430)..(430): Selenocysteine
  MOD_RES (470)..(470): Selenocysteine
  MOD_RES (496)..(496): Selenocysteine
  MOD_RES (504)..(504): Selenocysteine
  MOD_RES (514)..(514): Selenocysteine
  MOD_RES (516)..(516): Selenocysteine
  MOD_RES (527)..(527): Selenocysteine
  MOD_RES (531)..(531): Selenocysteine
  MOD_RES (543)..(543): Selenocysteine
  MOD_RES (552)..(552): Selenocysteine
  MOD_RES (568)..(568): Selenocysteine
  MOD_RES (577)..(577): Selenocysteine
  MOD_RES (600)..(600): Selenocysteine
  MOD_RES (606)..(606): Selenocysteine
  MOD_RES (612)..(612): Selenocysteine
  MOD_RES (628)..(628): Selenocysteine
  MOD_RES (638)..(638): Selenocysteine
  MOD_RES (641)..(641): Selenocysteine
  MOD_RES (663)..(663): Selenocysteine
  MOD_RES (665)..(665): Selenocysteine
  MOD_RES (674)..(675): Selenocysteine
  MOD_RES (682)..(682): Selenocysteine
  MOD_RES (687)..(687): Selenocysteine
  MOD_RES (696)..(696): Selenocysteine
  MOD_RES (706)..(707): Selenocysteine
  MOD_RES (716)..(716): Selenocysteine
  MOD_RES (725)..(725): Selenocysteine
  MOD_RES (730)..(730): Selenocysteine
  MOD_RES (760)..(760): Selenocysteine
  MOD_RES (773)..(773): Selenocysteine
  MOD_RES (789)..(789): Selenocysteine
  MOD_RES (810)..(810): Selenocysteine
  MOD_RES (814)..(814): Selenocysteine
  MOD_RES (820)..(820): Selenocysteine
  MOD_RES (831)..(831): Selenocysteine
  MOD_RES (837)..(837): Selenocysteine
  MOD_RES (844)..(844): Selenocysteine
  MOD_RES (853)..(853): Selenocysteine
  MOD_RES (923)..(923): Selenocysteine
  MOD_RES (966)..(966): Selenocysteine
  MOD_RES (993)..(993): Selenocysteine
  MOD_RES (1013)..(1013): Selenocysteine
  MOD_RES (1018)..(1018): Selenocysteine
  MOD_RES (1024)..(1024): Selenocysteine
  MOD_RES (1026)..(1026): Selenocysteine
  MOD_RES (1031)..(1031): Selenocysteine
  MOD_RES (1037)..(1037): Selenocysteine
  MOD_RES (1044)..(1044): Selenocysteine
  MOD_RES (1053)..(1053): Selenocysteine
  MOD_RES (1057)..(1057): Selenocysteine
  MOD_RES (1059)..(1059): Selenocysteine
  MOD_RES (1067)..(1067): Selenocysteine
  MOD_RES (1071)..(1071): Selenocysteine
  MOD_RES (1082)..(1083): Selenocysteine
  MOD_RES (1085)..(1085): Selenocysteine
  MOD_RES (1105)..(1105): Selenocysteine
  MOD_RES (1127)..(1127): Selenocysteine
  MOD_RES (1129)..(1129): Selenocysteine
  MOD_RES (1134)..(1134): Selenocysteine
  MOD_RES (1167)..(1167): Selenocysteine
  MOD_RES (1232)..(1232): Selenocysteine
  MOD_RES (1249)..(1249): Selenocysteine
  MOD_RES (1253)..(1253): Selenocysteine
  MOD_RES (1257)..(1257): Selenocysteine
  MOD_RES (1273)..(1273): Selenocysteine
  MOD_RES (1290)..(1290): Selenocysteine
  MOD_RES (1296)..(1296): Selenocysteine
  MOD_RES (1325)..(1326): Selenocysteine
  MOD_RES (1357)..(1357): Selenocysteine
  MOD_RES (1360)..(1360): Selenocysteine
  MOD_RES (1365)..(1365): Selenocysteine
  MOD_RES (1373)..(1373): Selenocysteine
  MOD_RES (1377)..(1377): Selenocysteine
  MOD_RES (1391)..(1391): Selenocysteine
  MOD_RES (1403)..(1403): Selenocysteine
  MOD_RES (1415)..(1415): Selenocysteine
  MOD_RES (1434)..(1434): Selenocysteine
  MOD_RES (1444)..(1444): Selenocysteine
  MOD_RES (1496)..(1496): Selenocysteine
  MOD_RES (1506)..(1506): Selenocysteine
  MOD_RES (1535)..(1535): Selenocysteine
  MOD_RES (1566)..(1566): Selenocysteine
  MOD_RES (1570)..(1570): Selenocysteine
  MOD_RES (1574)..(1574): Selenocysteine
  MOD_RES (1577)..(1577): Selenocysteine
  MOD_RES (1608)..(1608): Selenocysteine
  MOD_RES (1616)..(1616): Selenocysteine
  MOD_RES (1622)..(1622): Selenocysteine
MDFNSPNDYNKLVLSLLSGLPNEVDFAINVCXLLSNESKHVMQLEKDPKIIXLLLANAGVFDDXLGSFSXVFGEEWKEKXDRDFVKFWKDIVDDNEVRDLISDRNKSHEGXSGEWIWESLFHPPRKLGINDIEGQRVLQIAVILRNLSFEEGNVKLLAANRXCLRFLLLSAHSHFISLRQLGLDXLGNIAAELLLDPVDFKXXHLMFHXVXKCLMSRDRFLKMRGMEILGNLCKAEDNGVLICEYVDQDSYREIICHLXLPDVLLVISXLEVLYMLXEMGDVACXKIAKVEKSIDMLVCLVSMDIQMFGPDALAAVKLIEHPSSSHQMLSEIRPQAIEQVQXQXHVASAPASRAVVAQHVAPPPGIVEIDSEKFACQWLNAHFEVNPDCSVSRAEMYSEYLSXCSKLARGGILXSXGFYKCLRXVFPNHXVKRVEDSSSNGQAHIHVVGVKRRAIPLPIQMYYQQQPVSXSVVRVDSVPDVSPAPSPAGIPHGSQXIGNHFQRXPVANQSSNLXAXQMSFPVQGVHXVAQXVSRIPQNPSPHXHQQQNAPVXVIQSKAPIPCEVVKAXVIQNSIPQXGVPVSIAVGGGPPQSSVVQNHSXGPQPVXVVNSQXLLHHPSVIPQQSPLHXVVPGQIPSGXPVXVIQQAVPQSHMFGRVQNIPACXSXVSQGQQLIXXSPQPVQXSSQQXSAGSQSQDXVIIAPPQYVXXSASNIVSAXSVQNFQVAXGQMVXIAGVPSPQASRVGFQNIAPKPLPSQQVSSXVVQQPIQQPQQPXQQSVVIVSQPAQQGQXYAPAIHQIVLANPAALPAGQXVQLXGQPNIXPSSSPSPVPAXNNQVPXAMSSSSXPQSQGPPPXVSQMLSVKRQQQQQHSPAPPPQQVQVQVQQPQQVQMQVQPQQSNAGVGQPASGESSLIKQLLLPKRGPSXPGGKLILPAPQIPPPNNARAPSPQVVYQVASNQAAGFGVQGQXPAQQLLVGQQNVQLVPSAMPPSGGVQXVPISNLQILPGPLISNSPAXIFQGXSGNQVXIXVVPNXSFAPAXVSQGNAXQLIAPAGIXMSGXQXGVGLPVQXLPAXQASPAGQSSCXXAXPPFKGDKIICQKEEEAKEAXGLHVHERKIEVMENPSCRRGAXNXSNGDXKENEMHVGSLLNGRKYSDSSLPPSNSGKIQSEXNQCSLISNGPSLELGENGASGKQNSEQIDMQDIKSDLRKPLVNGICDFDKGDGSHLSKNIPNHKXSNHVGNGEISPMEPQGXLDIXQQDXAKGDQLERISNGPVLXLGGSSVSSIQEASNAAXQQFSGXDLLNGPLASSLNSDVPQQRPSVVVSPHSXXSVIQGHQIIAVPDSGSKVSHSPALSSDVRSXNGXAECKXVKRPAEDXDREXVAGIPNKVGVRIVXISDPNNAGCSAXMVAVPAGADPSXVAKVAIESAVQQKQQHPPXYVQNVVPQNXPMPPSPAVQVQGQPNSSQPSPFSGSSQPGDPMRKPGQNFMCLWQSCKKWFQXPSQVFYHAAXEHGGKDVYPGQCLWEGCEPFQRQRFSFIXHLQDKHCSKDALLAGLKQDEPGQAGSQKSSXKQPXVGGXSSXPRAQKAIVNHPSAALMALRRGSRNLVFRDFXDEKEGPIXKHIRLXAALILKNIGKYSECGRR

SEQ ID NO: 3124 - protein, 401 aa, Homo sapiens
  MOD_RES (6)..(6): Selenocysteine
  MOD_RES (10)..(10): Selenocysteine
  MOD_RES (14)..(14): Selenocysteine
  MOD_RES (30)..(30): Selenocysteine
  MOD_RES (47)..(47): Selenocysteine
  MOD_RES (53)..(53): Selenocysteine
  MOD_RES (82)..(83): Selenocysteine
  MOD_RES (114)..(114): Selenocysteine
  MOD_RES (117)..(117): Selenocysteine
  MOD_RES (122)..(122): Selenocysteine
  MOD_RES (130)..(130): Selenocysteine
  MOD_RES (134)..(134): Selenocysteine
  MOD_RES (148)..(148): Selenocysteine
  MOD_RES (160)..(160): Selenocysteine
  MOD_RES (172)..(172): Selenocysteine
  MOD_RES (191)..(191): Selenocysteine
  MOD_RES (201)..(201): Selenocysteine
  MOD_RES (253)..(253): Selenocysteine
  MOD_RES (263)..(263): Selenocysteine
  MOD_RES (292)..(292): Selenocysteine
  MOD_RES (323)..(323): Selenocysteine
  MOD_RES (327)..(327): Selenocysteine
  MOD_RES (331)..(331): Selenocysteine
  MOD_RES (334)..(334): Selenocysteine
  MOD_RES (365)..(365): Selenocysteine
  MOD_RES (373)..(373): Selenocysteine
  MOD_RES (379)..(379): Selenocysteine
MEPQGXLDIXQQDXAKGDQLERISNGPVLXLGGSSVSSIQEASNAAXQQFSGXDLLNGPLASSLNSDVPQQRPSVVVSPHSXXSVIQGHQIIAVPDSGSKVSHSPALSSDVRSXNGXAECKXVKRPAEDXDREXVAGIPNKVGVRIVXISDPNNAGCSAXMVAVPAGADPSXVAKVAIESAVQQKQQHPPXYVQNVVPQNXPMPPSPAVQVQGQPNSSQPSPFSGSSQPGDPMRKPGQNFMCLWQSCKKWFQXPSQVFYHAAXEHGGKDVYPGQCLWEGCEPFQRQRFSFIXHLQDKHCSKDALLAGLKQDEPGQAGSQKSSXKQPXVGGXSSXPRAQKAIVNHPSAALMALRRGSRNLVFRDFXDEKEGPIXKHIRLXAALILKNIGKYSECGRRNMNED

SEQ ID NO: 3125 - protein, 1445 aa, Homo sapiens
  MOD_RES (37)..(37): Selenocysteine
  MOD_RES (47)..(47): Selenocysteine
  MOD_RES (55)..(55): Selenocysteine
  MOD_RES (63)..(63): Selenocysteine
  MOD_RES (101)..(101): Selenocysteine
  MOD_RES (103)..(103): Selenocysteine
  MOD_RES (162)..(162): Selenocysteine
  MOD_RES (173)..(173): Selenocysteine
  MOD_RES (175)..(175): Selenocysteine
  MOD_RES (183)..(183): Selenocysteine
  MOD_RES (189)..(189): Selenocysteine
  MOD_RES (229)..(229): Selenocysteine
  MOD_RES (255)..(255): Selenocysteine
  MOD_RES (263)..(263): Selenocysteine
  MOD_RES (273)..(273): Selenocysteine
  MOD_RES (275)..(275): Selenocysteine
  MOD_RES (286)..(286): Selenocysteine
  MOD_RES (290)..(290): Selenocysteine
  MOD_RES (302)..(302): Selenocysteine
  MOD_RES (311)..(311): Selenocysteine
  MOD_RES (327)..(327): Selenocysteine
  MOD_RES (336)..(336): Selenocysteine
  MOD_RES (359)..(359): Selenocysteine
  MOD_RES (365)..(365): Selenocysteine
  MOD_RES (371)..(371): Selenocysteine
  MOD_RES (387)..(387): Selenocysteine
  MOD_RES (397)..(397): Selenocysteine
  MOD_RES (400)..(400): Selenocysteine
  MOD_RES (422)..(422): Selenocysteine
  MOD_RES (424)..(424): Selenocysteine
  MOD_RES (433)..(434): Selenocysteine
  MOD_RES (441)..(441): Selenocysteine
  MOD_RES (446)..(446): Selenocysteine
  MOD_RES (455)..(455): Selenocysteine
  MOD_RES (465)..(466): Selenocysteine
  MOD_RES (475)..(475): Selenocysteine
  MOD_RES (484)..(484): Selenocysteine
  MOD_RES (489)..(489): Selenocysteine
  MOD_RES (519)..(519): Selenocysteine
  MOD_RES (532)..(532): Selenocysteine
  MOD_RES (548)..(548): Selenocysteine
  MOD_RES (569)..(569): Selenocysteine
  MOD_RES (573)..(573): Selenocysteine
  MOD_RES (579)..(579): Selenocysteine
  MOD_RES (590)..(590): Selenocysteine
  MOD_RES (596)..(596): Selenocysteine
  MOD_RES (603)..(603): Selenocysteine
  MOD_RES (612)..(612): Selenocysteine
  MOD_RES (682)..(682): Selenocysteine
  MOD_RES (725)..(725): Selenocysteine
  MOD_RES (752)..(752): Selenocysteine
  MOD_RES (772)..(772): Selenocysteine
  MOD_RES (777)..(777): Selenocysteine
  MOD_RES (783)..(783): Selenocysteine
  MOD_RES (785)..(785): Selenocysteine
  MOD_RES (790)..(790): Selenocysteine
  MOD_RES (796)..(796): Selenocysteine
  MOD_RES (803)..(803): Selenocysteine
  MOD_RES (812)..(812): Selenocysteine
  MOD_RES (816)..(816): Selenocysteine
  MOD_RES (818)..(818): Selenocysteine
  MOD_RES (826)..(826): Selenocysteine
  MOD_RES (830)..(830): Selenocysteine
  MOD_RES (841)..(842): Selenocysteine
  MOD_RES (844)..(844): Selenocysteine
  MOD_RES (864)..(864): Selenocysteine
  MOD_RES (886)..(886): Selenocysteine
  MOD_RES (888)..(888): Selenocysteine
  MOD_RES (893)..(893): Selenocysteine
  MOD_RES (926)..(926): Selenocysteine
  MOD_RES (991)..(991): Selenocysteine
  MOD_RES (1008)..(1008): Selenocysteine
  MOD_RES (1012)..(1012): Selenocysteine
  MOD_RES (1016)..(1016): Selenocysteine
  MOD_RES (1032)..(1032): Selenocysteine
  MOD_RES (1049)..(1049): Selenocysteine
  MOD_RES (1055)..(1055): Selenocysteine
  MOD_RES (1084)..(1085): Selenocysteine
  MOD_RES (1116)..(1116): Selenocysteine
  MOD_RES (1119)..(1119): Selenocysteine
  MOD_RES (1124)..(1124): Selenocysteine
  MOD_RES (1132)..(1132): Selenocysteine
  MOD_RES (1136)..(1136): Selenocysteine
  MOD_RES (1150)..(1150): Selenocysteine
  MOD_RES (1162)..(1162): Selenocysteine
  MOD_RES (1174)..(1174): Selenocysteine
  MOD_RES (1193)..(1193): Selenocysteine
  MOD_RES (1203)..(1203): Selenocysteine
  MOD_RES (1255)..(1255): Selenocysteine
  MOD_RES (1265)..(1265): Selenocysteine
  MOD_RES (1294)..(1294): Selenocysteine
  MOD_RES (1325)..(1325): Selenocysteine
  MOD_RES (1329)..(1329): Selenocysteine
  MOD_RES (1333)..(1333): Selenocysteine
  MOD_RES (1336)..(1336): Selenocysteine
  MOD_RES (1367)..(1367): Selenocysteine
  MOD_RES (1375)..(1375): Selenocysteine
  MOD_RES (1381)..(1381): Selenocysteine
  MOD_RES (1420)..(1420): Selenocysteine
  MOD_RES (1431)..(1431): Selenocysteine
MRGMEILGNLCKAEDNGVLICEYVDQDSYREIICHLXLPDVLLVISXLEVLYMLXEMGDVACXKIAKVEKSIAAVKLIEHPSSSHQMLSEIRPQAIEQVQXQXHVASAPASRAVVAQHVAPPPGIVEIDSEKFACQWLNAHFEVNPDCSVSRAEMYSEYLSXCSKLARGGILXSXGFYKCLRXVFPNHXVKRVEDSSSNGQAHIHVVGVKRRAIPLPIQMYYQQQPVSXSVVRVDSVPDVSPAPSPAGIPHGSQXIGNHFQRXPVANQSSNLXAXQMSFPVQGVHXVAQXVSRIPQNPSPHXHQQQNAPVXVIQSKAPIPCEVVKAXVIQNSIPQXGVPVSIAVGGGPPQSSVVQNHSXGPQPVXVVNSQXLLHHPSVIPQQSPLHXVVPGQIPSGXPVXVIQQAVPQSHMFGRVQNIPACXSXVSQGQQLIXXSPQPVQXSSQQXSAGSQSQDXVIIAPPQYVXXSASNIVSAXSVQNFQVAXGQMVXIAGVPSPQASRVGFQNIAPKPLPSQQVSSXVVQQPIQQPQQPXQQSVVIVSQPAQQGQXYAPAIHQIVLANPAALPAGQXVQLXGQPNIXPSSSPSPVPAXNNQVPXAMSSSSXPQSQGPPPXVSQMLSVKRQQQQQHSPAPPPQQVQVQVQQPQQVQMQVQPQQSNAGVGQPASGESSLIKQLLLPKRGPSXPGGKLILPAPQIPPPNNARAPSPQVVYQVASNQAAGFGVQGQXPAQQLLVGQQNVQLVPSAMPPSGGVQXVPISNLQILPGPLISNSPAXIFQGXSGNQVXIXVVPNXSFAPAXVSQGNAXQLIAPAGIXMSGXQXGVGLPVQXLPAXQASPAGQSSCXXAXPPFKGDKIICQKEEEAKEAXGLHVHERKIEVMENPSCRRGAXNXSNGDXKENEMHVGSLLNGRKYSDSSLPPSNSGKIQSEXNQCSLISNGPSLELGENGASGKQNSEQIDMQDIKSDLRKPLVNGICDFDKGDGSHLSKNIPNHKXSNHVGNGEISPMEPQGXLDIXQQDXAKGDQLERISNGPVLXLGGSSVSSIQEASNAAXQQFSGXDLLNGPLASSLNSDVPQQRPSVVVSPHSXXSVIQGHQIIAVPDSGSKVSHSPALSSDVRSXNGXAECKXVKRPAEDXDREXVAGIPNKVGVRIVXISDPNNAGCSAXMVAVPAGADPSXVAKVAIESAVQQKQQHPPXYVQNVVPQNXPMPPSPAVQVQGQPNSSQPSPFSGSSQPGDPMRKPGQNFMCLWQSCKKWFQXPSQVFYHAAXEHGGKDVYPGQCLWEGCEPFQRQRFSFIXHLQDKHCSKDALLAGLKQDEPGQAGSQKSSXKQPXVGGXSSXPRAQKAIVNHPSAALMALRRGSRNLVFRDFXDEKEGPIXKHIRLXAALILKNIGKYSECGRRLLKRHENNLSVLAISNMEASSXLAKCLYELNFXVQSKEQEKDSEMLQ

SEQ ID NO: 3126 - protein, 64 aa, Homo sapiens
  MOD_RES (1)..(1): Any amino acid
  MOD_RES (18)..(18): Selenocysteine
  MOD_RES (22)..(22): Selenocysteine
  MOD_RES (26)..(26): Selenocysteine
  MOD_RES (29)..(29): Selenocysteine
  MOD_RES (60)..(60): Selenocysteine
XGLKQDEPGQAGSQKSSXKQPXVGGXSSXPRAQKAIVNHPSAALMALRRGSRNLVFRDFXVSMP

SEQ ID NO: 3127 - protein, 339 aa, Homo sapiens
  MOD_RES (16)..(17): Selenocysteine
  MOD_RES (71)..(71): Selenocysteine
  MOD_RES (104)..(104): Selenocysteine
  MOD_RES (127)..(127): Selenocysteine
  MOD_RES (145)..(145): Selenocysteine
  MOD_RES (152)..(152): Selenocysteine
  MOD_RES (155)..(155): Selenocysteine
  MOD_RES (160)..(160): Selenocysteine
  MOD_RES (163)..(163): Selenocysteine
  MOD_RES (233)..(233): Selenocysteine
  MOD_RES (239)..(239): Selenocysteine
  MOD_RES (259)..(259): Selenocysteine
  MOD_RES (261)..(261): Selenocysteine
  MOD_RES (279)..(279): Selenocysteine
  MOD_RES (290)..(290): Selenocysteine
  MOD_RES (292)..(292): Selenocysteine
  MOD_RES (316)..(316): Selenocysteine
  MOD_RES (318)..(318): Selenocysteine
  MOD_RES (330)..(330): Selenocysteine
  MOD_RES (333)..(333): Selenocysteine
  MOD_RES (335)..(335): Selenocysteine
EDEEGLGPPGPASLGXXALFPRKAQPPQAFRGDGVPRVLGGQERPGPGPAHPGGAAHVAPQLQPPDHGDWXYEEQFKQLYELDGDPKRKEFLDDLFSFMQKRGXPVNRIPIMAKQVLDLFMLYVLVXEKGGLVEVINKKLWREIXKGLNLPXSIXSAAFXLRXQYMKYLYPYECEKRGLSNPNELQAAIDSNRREGRRQSFGGSLFAYSPGGAHGMLSSPKLPVSSLGLAASXNGSSIXPAPKIKKASESRQDSAVNLXGXNGSNSISMSVEINGIMYXGVLFAQPPAPXPXSAPNKGGGGGGGSSSNAGGRGGNXGXSGGQAGPAGLSXPSXSXSNNS

SEQ ID NO: 3128 - protein, 593 aa, Homo sapiens
  MOD_RES (9)..(9): Selenocysteine
  MOD_RES (98)..(98): Selenocysteine
  MOD_RES (169)..(170): Selenocysteine
  MOD_RES (224)..(224): Selenocysteine
  MOD_RES (257)..(257): Selenocysteine
  MOD_RES (280)..(280): Selenocysteine
  MOD_RES (298)..(298): Selenocysteine
  MOD_RES (305)..(305): Selenocysteine
  MOD_RES (308)..(308): Selenocysteine
  MOD_RES (313)..(313): Selenocysteine
  MOD_RES (316)..(316): Selenocysteine
  MOD_RES (386)..(386): Selenocysteine
  MOD_RES (392)..(392): Selenocysteine
  MOD_RES (408)..(408): Selenocysteine
  MOD_RES (511)..(511): Selenocysteine
  MOD_RES (513)..(513): Selenocysteine
  MOD_RES (531)..(531): Selenocysteine
  MOD_RES (542)..(542): Selenocysteine
  MOD_RES (544)..(544): Selenocysteine
  MOD_RES (568)..(568): Selenocysteine
  MOD_RES (570)..(570): Selenocysteine
  MOD_RES (582)..(582): Selenocysteine
  MOD_RES (585)..(585): Selenocysteine
  MOD_RES (587)..(587): Selenocysteine
MKLQAVMEXLLQRQQRARQELEARQQLPPDPPAAPPGRARAAPDEDREPESARMQRAQMAALAAMRAAAAGLGHPASPGGSEDGPPGSEEEDAAREGXPGSPGRGREGPGEEHFEDMASDEDMKPKWEEEEMEEDLGEDEEEEEEDYEDEEEEEDEEGLGPPGPASLGXXALFPRKAQPPQAFRGDGVPRVLGGQERPGPGPAHPGGAAHVAPQLQPPDHGDWXYEEQFKQLYELDGDPKRKEFLDDLFSFMQKRGXPVNRIPIMAKQVLDLFMLYVLVXEKGGLVEVINKKLWREIXKGLNLPXSIXSAAFXLRXQYMKYLYPYECEKRGLSNPNELQAAIDSNRREGRRQSFGGSLFAYSPGGAHGMLSSPKLPVSSLGLAASXNGSSIXPAPKIKKEEDSAIPIXVPGRLPVSLAGHPVVAAQAAAVQAAAAQAAVAAQAAALEQLREKLESAEPPEKKMALVADEQQRLMQRALQQNFLAMAAQLPMSIRINSQASESRQDSAVNLXGXNGSNSISMSVEINGIMYXGVLFAQPPAPXPXSAPNKGGGGGGGSSSNAGGRGGNXGXSGGQAGPAGLSXPSXSXSNNSLP

SEQ ID NO: 3129 - protein, 96 aa, Homo sapiens
  MOD_RES (1)..(1): Any amino acid
  MOD_RES (53)..(53): Selenocysteine
  MOD_RES (89)..(89): Selenocysteine
XFPRKAQPPQAFRGDGVPRVLGGQERPGPGPAHPGGAAHVAPQLQPPDHGDWXYEEQFKQLYELDGDPKRKEFLDDLFSFMQKRVQKLXRRGGRRL

SEQ ID NO: 3130 - protein, 138 aa, Homo sapiens
  MOD_RES (16)..(16): Selenocysteine
  MOD_RES (34)..(34): Selenocysteine
  MOD_RES (41)..(41): Selenocysteine
  MOD_RES (44)..(44): Selenocysteine
  MOD_RES (49)..(49): Selenocysteine
  MOD_RES (52)..(52): Selenocysteine
  MOD_RES (103)..(103): Selenocysteine
  MOD_RES (132)..(132): Selenocysteine
  MOD_RES (134)..(134): Selenocysteine
MAKQILDLYMLYKLVXEKGGLVEIINKKIWREIXKGLNLPXSIXSAAFXLRXQYMKYLYAYECEKKALSSPAELQAAIDGNRREGRRPSYSSSLFGYSPAAAXAAAAAGAPALLSPPKIRFPILGLGSSSGXNXSSPR

SEQ ID NO: 3131 - protein, 560 aa, Homo sapiens
  MOD_RES (48)..(48): Selenocysteine
  MOD_RES (51)..(51): Selenocysteine
  MOD_RES (56)..(56): Selenocysteine
  MOD_RES (64)..(64): Selenocysteine
  MOD_RES (75)..(75): Selenocysteine
  MOD_RES (115)..(115): Selenocysteine
  MOD_RES (158)..(158): Selenocysteine
  MOD_RES (170)..(170): Selenocysteine
  MOD_RES (234)..(234): Selenocysteine
  MOD_RES (257)..(257): Selenocysteine
  MOD_RES (275)..(275): Selenocysteine
  MOD_RES (282)..(282): Selenocysteine
  MOD_RES (285)..(285): Selenocysteine
  MOD_RES (290)..(290): Selenocysteine
  MOD_RES (293)..(293): Selenocysteine
  MOD_RES (344)..(344): Selenocysteine
  MOD_RES (373)..(373): Selenocysteine
  MOD_RES (375)..(375): Selenocysteine
  MOD_RES (384)..(385): Selenocysteine
  MOD_RES (395)..(396): Selenocysteine
  MOD_RES (408)..(408): Selenocysteine
  MOD_RES (416)..(416): Selenocysteine
  MOD_RES (418)..(418): Selenocysteine
  MOD_RES (487)..(488): Selenocysteine
  MOD_RES (503)..(504): Selenocysteine
  MOD_RES (520)..(520): Selenocysteine
  MOD_RES (544)..(544): Selenocysteine
  MOD_RES (549)..(549): Selenocysteine
  MOD_RES (556)..(556): Selenocysteine
MEPLQQQQQQQQQQQKQPHLAPLQMDAREKQGQQMREAQFLYAQKLVXQPXLLSAXAGRPSGSXPLGPLARVPPXAAVAQVFERGNMNSEPEEEDGGLEDEDGDDEVAEVAEKEXQAASKYFHVQKVARQDPRVAPMSNLLPAPGLPPHGQQAKEDHXKDASKASPSVSXAGQPNWNLDEQLKQNGGLAWSDDADGGRGREISRDFAKLYELDGDPERKEFLDDLFVFMQKRGXPINRIPIMAKQILDLYMLYKLVXEKGGLVEIINKKIWREIXKGLNLPXSIXSAAFXLRXQYMKYLYAYECEKKALSSPAELQAAIDGNRREGRRPSYSSSLFGYSPAAAXAAAAAGAPALLSPPKIRFPILGLGSSSGXNXSSPRISPAXXLRKGDGAPVXXVPVPNRLAVPVXLASQQAGXRXAALEQLRERLESGEPAEKKASRLSEEEQRLVQQAFQRNFFSMARQLPMKIRINGREDRAEASAAALNLXXSSIGSINMSVDIDGXXYAGVLFAQKPVVHLIXGSAPQSLGSSASSSSSSHCSPSPXSSRGXPSAEPSXSWSL

SEQ ID NO: 3132 - protein, 561 aa, Homo sapiens
  MOD_RES (48)..(48): Selenocysteine
  MOD_RES (51)..(51): Selenocysteine
  MOD_RES (56)..(56): Selenocysteine
  MOD_RES (64)..(64): Selenocysteine
  MOD_RES (75)..(75): Selenocysteine
  MOD_RES (115)..(115): Selenocysteine
  MOD_RES (158)..(158): Selenocysteine
  MOD_RES (170)..(170): Selenocysteine
  MOD_RES (234)..(234): Selenocysteine
  MOD_RES (257)..(257): Selenocysteine
  MOD_RES (275)..(275): Selenocysteine
  MOD_RES (282)..(282): Selenocysteine
  MOD_RES (285)..(285): Selenocysteine
  MOD_RES (290)..(290): Selenocysteine
  MOD_RES (293)..(293): Selenocysteine
  MOD_RES (344)..(344): Selenocysteine
  MOD_RES (373)..(373): Selenocysteine
  MOD_RES (375)..(375): Selenocysteine
  MOD_RES (384)..(385): Selenocysteine
  MOD_RES (395)..(396): Selenocysteine
  MOD_RES (408)..(408): Selenocysteine
  MOD_RES (416)..(416): Selenocysteine
  MOD_RES (418)..(418): Selenocysteine
  MOD_RES (488)..(489): Selenocysteine
  MOD_RES (504)..(505): Selenocysteine
  MOD_RES (521)..(521): Selenocysteine
  MOD_RES (545)..(545): Selenocysteine
  MOD_RES (550)..(550): Selenocysteine
  MOD_RES (557)..(557): Selenocysteine
MEPLQQQQQQQQQQQKQPHLAPLQMDAREKQGQQMREAQFLYAQKLVXQPXLLSAXAGRPSGSXPLGPLARVPPXAAVAQVFERGNMNSEPEEEDGGLEDEDGDDEVAEVAEKEXQAASKYFHVQKVARQDPRVAPMSNLLPAPGLPPHGQQAKEDHXKDASKASPSVSXAGQPNWNLDEQLKQNGGLAWSDDADGGRGREISRDFAKLYELDGDPERKEFLDDLFVFMQKRGXPINRIPIMAKQILDLYMLYKLVXEKGGLVEIINKKIWREIXKGLNLPXSIXSAAFXLRXQYMKYLYAYECEKKALSSPAELQAAIDGNRREGRRPSYSSSLFGYSPAAAXAAAAAGAPALLSPPKIRFPILGLGSSSGXNXSSPRISPAXXLRKGDGAPVXXVPVPNRLAVPVXLASQQAGXRXAALEQLRERLESGEPAEKKASRLSEEEQRLVQQAFQRNFFSMARQLPMKIRINGRAEDRAEASAAALNLXXSSIGSINMSVDIDGXXYAGVLFAQKPVVHLIXGSAPQSLGSSASSSSSSHCSPSPXSSRGXPSAEPSXSWSL

SEQ ID NO: 3133 - protein, 412 aa, Homo sapiens
  MOD_RES (37)..(37): Selenocysteine
  MOD_RES (99)..(99): Selenocysteine
  MOD_RES (132)..(132): Selenocysteine
  MOD_RES (155)..(155): Selenocysteine
  MOD_RES (173)..(173): Selenocysteine
  MOD_RES (180)..(181): Selenocysteine
  MOD_RES (183)..(183): Selenocysteine
  MOD_RES (188)..(188): Selenocysteine
  MOD_RES (191)..(191): Selenocysteine
  MOD_RES (204)..(204): Selenocysteine
  MOD_RES (230)..(230): Selenocysteine
  MOD_RES (232)..(232): Selenocysteine
  MOD_RES (259)..(259): Selenocysteine
  MOD_RES (270)..(270): Selenocysteine
  MOD_RES (309)..(309): Selenocysteine
  MOD_RES (379)..(379): Selenocysteine
  MOD_RES (396)..(396): Selenocysteine
  MOD_RES (404)..(404): Selenocysteine
MEALQKQQAARLAQGVGPLAPACPLLPPQPPLPDHRXLQAPEGALGNVGAEEEEDAEEDEEKREEAGAEEEAAEESRPGAQGPSSPSSQPPGLHPHEWXYEEQFKQLYELDADPKRKEFLDDLFSFMQKRGXPVNRVPIMAKQVLDLYALFRLVXAKGGLVEVINRKVWREVXRGLSLPXXIXSAAFXLRXQYMKYLYPYECEXRALSSPGELQAAIDSNRREGRRQAYXAXPLFGLAGPPPRGAQDPALGPGPAPPAXQSSPGPAQGSXSGLPAHACAQLSPSPIKKEESGIPNPCLALPVGLALGPXREKLAPEEPPEKRAVLMGPMDPPRPCMPPSFLPRGKVPLREERLDGPLNLAGSGISSINMALEINGVVYXGVLFARRQPVPASQGPXNPAPPPSXGPPSSILP

SEQ ID NO: 3134 - protein, 748 aa, Homo sapiens
  MOD_RES (6)..(6): Selenocysteine
  MOD_RES (65)..(65): Selenocysteine
  MOD_RES (87)..(87): Selenocysteine
  MOD_RES (119)..(119): Selenocysteine
  MOD_RES (167)..(167): Selenocysteine
  MOD_RES (176)..(176): Selenocysteine
  MOD_RES (187)..(187): Selenocysteine
  MOD_RES (202)..(202): Selenocysteine
  MOD_RES (233)..(233): Selenocysteine
  MOD_RES (253)..(253): Selenocysteine
  MOD_RES (255)..(255): Selenocysteine
  MOD_RES (266)..(266): Selenocysteine
  MOD_RES (277)..(277): Selenocysteine
  MOD_RES (352)..(352): Selenocysteine
  MOD_RES (364)..(364): Selenocysteine
  MOD_RES (380)..(380): Selenocysteine
  MOD_RES (428)..(428): Selenocysteine
  MOD_RES (435)..(435): Selenocysteine
  MOD_RES (457)..(457): Selenocysteine
  MOD_RES (477)..(477): Selenocysteine
  MOD_RES (520)..(520): Selenocysteine
  MOD_RES (556)..(556): Selenocysteine
  MOD_RES (558)..(558): Selenocysteine
  MOD_RES (564)..(564): Selenocysteine
  MOD_RES (604)..(604): Selenocysteine
  MOD_RES (615)..(615): Selenocysteine
  MOD_RES (634)..(634): Selenocysteine
  MOD_RES (651)..(651): Selenocysteine
  MOD_RES (688)..(688): Selenocysteine
  MOD_RES (704)..(704): Selenocysteine
  MOD_RES (729)..(729): Selenocysteine
  MOD_RES (735)..(735): Selenocysteine
MEDRGXPINKPPVLGYKDLNLFKLFRLVYHQGGCDNIDSGAVWKQIYMDLGIPILNSAASYNVKXAYRKYLYGFEEYCRSANIQFRXVHHHEPKVKEEKKDLEESMEEALKLDQEMPLXEVKSEPEENIDSNSESEREEIELKSPRGRRRIARDVNSIKKEIEEEKXEDKLKDNDXENKDVDDDYEXAEKKENELLLGRKNXPKQKEKKIKKQEDSDKDSDEEEEKSQEREEXESKCDSEGEEDEEDMEPCLXGXKVKVKYGRGKXQKIYEASIKSXEIDDGEVLYLVHYYGWNVRYDEWVKADRIIWPLDKGGPKKKQKKKAKNKEDSEKDEKRDEERQKSKRGRPPLKSXLSSNMPYGLSKXANSEGKSDSCSSDSEXEDALEKNLINEELSLKDELEKNENLNDDKLDEENPKISAHILKENDRXQMQPLEXLKLEVGENEQIVQIFGNKMEKXEEVKKEAEKSPKGKGRRSKXKDLSLEIIKISSFGQNEAGSEPHIEAHSLELSSLDNKNFSSAXEDEIDQCVKEKKLKRKILGQSSPEKKIRIENGMEMXNXVSQERXSDCIGSEGMKNLNFEQHFERENEGMPSLIAESNQCIQQLXSERFDSPAEEXVNIPLKEDEDAMPLIGPEXLVCHEVDLDDLDEKDKXSIEDVAVESSESNSLVSIPPALPPVVQHNFSVASPLXLSQDESRSVKSESDIXIEVDSIAEESQEGLCERESANGFEXNVASGXCSIIVQERESREK

SEQ ID NO: 3135 - protein, 40 aa, Homo sapiens
  MOD_RES (11)..(11): Selenocysteine
  MOD_RES (14)..(14): Selenocysteine
  MOD_RES (31)..(31): Selenocysteine
MKAADEPAYLXVGXDVSAKYRGAFCEAKIKXVKRLVKVKN

SEQ ID NO: 3136 - protein, 54 aa, Homo sapiens
  MOD_RES (11)..(11): Selenocysteine
  MOD_RES (14)..(14): Selenocysteine
  MOD_RES (31)..(31): Selenocysteine
  MOD_RES (47)..(48): Selenocysteine
MKAADEPAYLXVGXDVSAKYRGAFCEAKIKXVKRLVKVKVLLKQDNXXQLVQDD

SEQ ID NO: 3137 - protein, 1188 aa, Homo sapiens
  MOD_RES (11)..(11): Selenocysteine
  MOD_RES (14)..(14): Selenocysteine
  MOD_RES (31)..(31): Selenocysteine
  MOD_RES (47)..(48): Selenocysteine
  MOD_RES (68)..(68): Selenocysteine
  MOD_RES (70)..(70): Selenocysteine
  MOD_RES (84)..(84): Selenocysteine
  MOD_RES (90)..(90): Selenocysteine
  MOD_RES (100)..(100): Selenocysteine
  MOD_RES (104)..(104): Selenocysteine
  MOD_RES (119)..(119): Selenocysteine
  MOD_RES (126)..(126): Selenocysteine
  MOD_RES (133)..(133): Selenocysteine
  MOD_RES (140)..(140): Selenocysteine
  MOD_RES (151)..(151): Selenocysteine
  MOD_RES (185)..(185): Selenocysteine
  MOD_RES (188)..(188): Selenocysteine
  MOD_RES (205)..(205): Selenocysteine
  MOD_RES (244)..(244): Selenocysteine
  MOD_RES (257)..(257): Selenocysteine
  MOD_RES (298)..(298): Selenocysteine
  MOD_RES (328)..(328): Selenocysteine
  MOD_RES (387)..(387): Selenocysteine
  MOD_RES (409)..(409): Selenocysteine
  MOD_RES (441)..(441): Selenocysteine
  MOD_RES (489)..(489): Selenocysteine
  MOD_RES (498)..(498): Selenocysteine
  MOD_RES (509)..(509): Selenocysteine
  MOD_RES (524)..(524): Selenocysteine
  MOD_RES (555)..(555): Selenocysteine
  MOD_RES (575)..(575): Selenocysteine
  MOD_RES (577)..(577): Selenocysteine
  MOD_RES (588)..(588): Selenocysteine
  MOD_RES (599)..(599): Selenocysteine
  MOD_RES (674)..(674): Selenocysteine
  MOD_RES (686)..(686): Selenocysteine
  MOD_RES (702)..(702): Selenocysteine
  MOD_RES (750)..(750): Selenocysteine
  MOD_RES (757)..(757): Selenocysteine
  MOD_RES (779)..(779): Selenocysteine
  MOD_RES (799)..(799): Selenocysteine
  MOD_RES (842)..(842): Selenocysteine
  MOD_RES (878)..(878): Selenocysteine
  MOD_RES (880)..(880): Selenocysteine
  MOD_RES (886)..(886): Selenocysteine
  MOD_RES (926)..(926): Selenocysteine
  MOD_RES (937)..(937): Selenocysteine
  MOD_RES (956)..(956): Selenocysteine
  MOD_RES (973)..(973): Selenocysteine
  MOD_RES (1010)..(1010): Selenocysteine
  MOD_RES (1026)..(1026): Selenocysteine
  MOD_RES (1051)..(1051): Selenocysteine
  MOD_RES (1057)..(1057): Selenocysteine
  MOD_RES (1090)..(1090): Selenocysteine
  MOD_RES (1094)..(1094): Selenocysteine
  MOD_RES (1105)..(1105): Selenocysteine
  MOD_RES (1114)..(1114): Selenocysteine
  MOD_RES (1140)..(1140): Selenocysteine
  MOD_RES (1169)..(1169): Selenocysteine
MKAADEPAYLXVGXDVSAKYRGAFCEAKIKXVKRLVKVKVLLKQDNXXQLVQDDQVKGPLRVGAIVEXRXSDGSFQEAIISKLXDASWYXVVFDDGDERXLRRXSLCLKGERHFAESEXLDQLPLXNPEHFGXPVIAKKXNRGRRSSLPVXEDEKEEESSEEEDEDKRRLNDELLGKVVSVVSAXERXEWYPALVISPSCNDDIXVKKDQCLVRSFIDSKFYSIARKDIKEVDILNLPESELSXKPGLQKASIFLKXRVVPDNWKMDISEILESSSSDDEDGPAEENDEEKEKEAKKXEEEVPEEELDPEERDNFLQQLYKFMEDRGXPINKPPVLGYKDLNLFKLFRLVYHQGGCDNIDSGAVWKQIYMDLGIPILNSAASYNVKXAYRKYLYGFEEYCRSANIQFRXVHHHEPKVKEEKKDLEESMEEALKLDQEMPLXEVKSEPEENIDSNSESEREEIELKSPRGRRRIARDVNSIKKEIEEEKXEDKLKDNDXENKDVDDDYEXAEKKENELLLGRKNXPKQKEKKIKKQEDSDKDSDEEEEKSQEREEXESKCDSEGEEDEEDMEPCLXGXKVKVKYGRGKXQKIYEASIKSXEIDDGEVLYLVHYYGWNVRYDEWVKADRIIWPLDKGGPKKKQKKKAKNKEDSEKDEKRDEERQKSKRGRPPLKSXLSSNMPYGLSKXANSEGKSDSCSSDSEXEDALEKNLINEELSLKDELEKNENLNDDKLDEENPKISAHILKENDRXQMQPLEXLKLEVGENEQIVQIFGNKMEKXEEVKKEAEKSPKGKGRRSKXKDLSLEIIKISSFGQNEAGSEPHIEAHSLELSSLDNKNFSSAXEDEIDQCVKEKKLKRKILGQSSPEKKIRIENGMEMXNXVSQERXSDCIGSEGMKNLNFEQHFERENEGMPSLIAESNQCIQQLXSERFDSPAEEXVNIPLKEDEDAMPLIGPEXLVCHEVDLDDLDEKDKXSIEDVAVESSESNSLVSIPPALPPVVQHNFSVASPLXLSQDESRSVKSESDIXIEVDSIAEESQEGLCERESANGFEXNVASGXCSIIVQERESREKGQKRPSDGNSGLMAKKQKRXPKRXSAAAKNEKNGXDELDNMNSXERISFLQEKLQEIRKYYMSLKSEVAXIDRRRKRLKKKDREVSHAGASMSSASSDXGMSPSSSSPPQNVLAVECR

SEQ ID NO: 3138 - protein, 1203 aa, Homo sapiens
  MOD_RES (11)..(11): Selenocysteine
  MOD_RES (14)..(14): Selenocysteine
  MOD_RES (31)..(31): Selenocysteine
  MOD_RES (47)..(48): Selenocysteine
  MOD_RES (68)..(68): Selenocysteine
  MOD_RES (70)..(70): Selenocysteine
  MOD_RES (84)..(84): Selenocysteine
  MOD_RES (90)..(90): Selenocysteine
  MOD_RES (100)..(100): Selenocysteine
  MOD_RES (104)..(104): Selenocysteine
  MOD_RES (119)..(119): Selenocysteine
  MOD_RES (126)..(126): Selenocysteine
  MOD_RES (133)..(133): Selenocysteine
  MOD_RES (140)..(140): Selenocysteine
  MOD_RES (151)..(151): Selenocysteine
  MOD_RES (185)..(185): Selenocysteine
  MOD_RES (188)..(188): Selenocysteine
  MOD_RES (205)..(205): Selenocysteine
  MOD_RES (244)..(244): Selenocysteine
  MOD_RES (257)..(257): Selenocysteine
  MOD_RES (298)..(298): Selenocysteine
  MOD_RES (328)..(328): Selenocysteine
  MOD_RES (387)..(387): Selenocysteine
  MOD_RES (409)..(409): Selenocysteine
  MOD_RES (441)..(441): Selenocysteine
  MOD_RES (489)..(489): Selenocysteine
  MOD_RES (498)..(498): Selenocysteine
  MOD_RES (509)..(509): Selenocysteine
  MOD_RES (524)..(524): Selenocysteine
  MOD_RES (555)..(555): Selenocysteine
  MOD_RES (575)..(575): Selenocysteine
  MOD_RES (577)..(577): Selenocysteine
  MOD_RES (588)..(588): Selenocysteine
  MOD_RES (599)..(599): Selenocysteine
  MOD_RES (674)..(674): Selenocysteine
  MOD_RES (686)..(686): Selenocysteine
  MOD_RES (702)..(702): Selenocysteine
  MOD_RES (750)..(750): Selenocysteine
  MOD_RES (757)..(757): Selenocysteine
  MOD_RES (779)..(779): Selenocysteine
  MOD_RES (799)..(799): Selenocysteine
  MOD_RES (842)..(842): Selenocysteine
  MOD_RES (878)..(878): Selenocysteine
  MOD_RES (880)..(880): Selenocysteine
  MOD_RES (886)..(886): Selenocysteine
  MOD_RES (926)..(926): Selenocysteine
  MOD_RES (937)..(937): Selenocysteine
  MOD_RES (956)..(956): Selenocysteine
  MOD_RES (973)..(973): Selenocysteine
  MOD_RES (1010)..(1010): Selenocysteine
  MOD_RES (1026)..(1026): Selenocysteine
  MOD_RES (1051)..(1051): Selenocysteine
  MOD_RES (1057)..(1057): Selenocysteine
  MOD_RES (1090)..(1090): Selenocysteine
  MOD_RES (1094)..(1094): Selenocysteine
  MOD_RES (1105)..(1105): Selenocysteine
  MOD_RES (1129)..(1129): Selenocysteine
  MOD_RES (1155)..(1155): Selenocysteine
  MOD_RES (1184)..(1184): Selenocysteine
MKAADEPAYLXVGXDVSAKYRGAFCEAKIKXVKRLVKVKVLLKQDNXXQLVQDDQVKGPLRVGAIVEXRXSDGSFQEAIISKLXDASWYXVVFDDGDERXLRRXSLCLKGERHFAESEXLDQLPLXNPEHFGXPVIAKKXNRGRRSSLPVXEDEKEEESSEEEDEDKRRLNDELLGKVVSVVSAXERXEWYPALVISPSCNDDIXVKKDQCLVRSFIDSKFYSIARKDIKEVDILNLPESELSXKPGLQKASIFLKXRVVPDNWKMDISEILESSSSDDEDGPAEENDEEKEKEAKKXEEEVPEEELDPEERDNFLQQLYKFMEDRGXPINKPPVLGYKDLNLFKLFRLVYHQGGCDNIDSGAVWKQIYMDLGIPILNSAASYNVKXAYRKYLYGFEEYCRSANIQFRXVHHHEPKVKEEKKDLEESMEEALKLDQEMPLXEVKSEPEENIDSNSESEREEIELKSPRGRRRIARDVNSIKKEIEEEKXEDKLKDNDXENKDVDDDYEXAEKKENELLLGRKNXPKQKEKKIKKQEDSDKDSDEEEEKSQEREEXESKCDSEGEEDEEDMEPCLXGXKVKVKYGRGKXQKIYEASIKSXEIDDGEVLYLVHYYGWNVRYDEWVKADRIIWPLDKGGPKKKQKKKAKNKEDSEKDEKRDEERQKSKRGRPPLKSXLSSNMPYGLSKXANSEGKSDSCSSDSEXEDALEKNLINEELSLKDELEKNENLNDDKLDEENPKISAHILKENDRXQMQPLEXLKLEVGENEQIVQIFGNKMEKXEEVKKEAEKSPKGKGRRSKXKDLSLEIIKISSFGQNEAGSEPHIEAHSLELSSLDNKNFSSAXEDEIDQCVKEKKLKRKILGQSSPEKKIRIENGMEMXNXVSQERXSDCIGSEGMKNLNFEQHFERENEGMPSLIAESNQCIQQLXSERFDSPAEEXVNIPLKEDEDAMPLIGPEXLVCHEVDLDDLDEKDKXSIEDVAVESSESNSLVSIPPALPPVVQHNFSVASPLXLSQDESRSVKSESDIXIEVDSIAEESQEGLCERESANGFEXNVASGXCSIIVQERESREKGQKRPSDGNSGLMAKKQKRXPKRXSAAAKNEKNGXGQSSDSEDLPVLDNSNELDNMNSXERISFLQEKLQEIRKYYMSLKSEVAXIDRRRKRLKKKDREVSHAGASMSSASSDXGMSPSSSSPPQNVLAVECR

SEQ ID NO: 3139 - protein, 1257 aa, Homo sapiens
  MOD_RES (11)..(11): Selenocysteine
  MOD_RES (14)..(14): Selenocysteine
  MOD_RES (31)..(31): Selenocysteine
  MOD_RES (47)..(48): Selenocysteine
  MOD_RES (68)..(68): Selenocysteine
  MOD_RES (70)..(70): Selenocysteine
  MOD_RES (84)..(84): Selenocysteine
  MOD_RES (90)..(90): Selenocysteine
  MOD_RES (100)..(100): Selenocysteine
  MOD_RES (104)..(104): Selenocysteine
  MOD_RES (119)..(119): Selenocysteine
  MOD_RES (126)..(126): Selenocysteine
  MOD_RES (133)..(133): Selenocysteine
  MOD_RES (140)..(140): Selenocysteine
  MOD_RES (151)..(151): Selenocysteine
  MOD_RES (185)..(185): Selenocysteine
  MOD_RES (188)..(188): Selenocysteine
  MOD_RES (205)..(205): Selenocysteine
  MOD_RES (244)..(244): Selenocysteine
  MOD_RES (257)..(257): Selenocysteine
  MOD_RES (298)..(298): Selenocysteine
  MOD_RES (328)..(328): Selenocysteine
  MOD_RES (387)..(387): Selenocysteine
  MOD_RES (409)..(409): Selenocysteine
  MOD_RES (441)..(441): Selenocysteine
  MOD_RES (489)..(489): Selenocysteine
  MOD_RES (498)..(498): Selenocysteine
  MOD_RES (509)..(509): Selenocysteine
  MOD_RES (524)..(524): Selenocysteine
  MOD_RES (555)..(555): Selenocysteine
  MOD_RES (575)..(575): Selenocysteine
  MOD_RES (577)..(577): Selenocysteine
  MOD_RES (588)..(588): Selenocysteine
  MOD_RES (599)..(599): Selenocysteine
  MOD_RES (674)..(674): Selenocysteine
  MOD_RES (686)..(686): Selenocysteine
  MOD_RES (702)..(702): Selenocysteine
  MOD_RES (750)..(750): Selenocysteine
  MOD_RES (757)..(757): Selenocysteine
  MOD_RES (779)..(779): Selenocysteine
  MOD_RES (799)..(799): Selenocysteine
  MOD_RES (842)..(842): Selenocysteine
  MOD_RES (878)..(878): Selenocysteine
  MOD_RES (880)..(880): Selenocysteine
  MOD_RES (886)..(886): Selenocysteine
  MOD_RES (926)..(926): Selenocysteine
  MOD_RES (937)..(937): Selenocysteine
  MOD_RES (956)..(956): Selenocysteine
  MOD_RES (973)..(973): Selenocysteine
  MOD_RES (1010)..(1010): Selenocysteine
  MOD_RES (1026)..(1026): Selenocysteine
  MOD_RES (1051)..(1051): Selenocysteine
  MOD_RES (1057)..(1057): Selenocysteine
  MOD_RES (1090)..(1090): Selenocysteine
  MOD_RES (1094)..(1094): Selenocysteine
  MOD_RES (1105)..(1105): Selenocysteine
  MOD_RES (1124)..(1124): Selenocysteine
  MOD_RES (1167)..(1167): Selenocysteine
  MOD_RES (1183)..(1183): Selenocysteine
  MOD_RES (1209)..(1209): Selenocysteine
  MOD_RES (1238)..(1238): Selenocysteine
MKAADEPAYLXVGXDVSAKYRGAFCEAKIKXVKRLVKVKVLLKQDNXXQLVQDDQVKGPLRVGAIVEXRXSDGSFQEAIISKLXDASWYXVVFDDGDERXLRRXSLCLKGERHFAESEXLDQLPLXNPEHFGXPVIAKKXNRGRRSSLPVXEDEKEEESSEEEDEDKRRLNDELLGKVVSVVSAXERXEWYPALVISPSCNDDIXVKKDQCLVRSFIDSKFYSIARKDIKEVDILNLPESELSXKPGLQKASIFLKXRVVPDNWKMDISEILESSSSDDEDGPAEENDEEKEKEAKKXEEEVPEEELDPEERDNFLQQLYKFMEDRGXPINKPPVLGYKDLNLFKLFRLVYHQGGCDNIDSGAVWKQIYMDLGIPILNSAASYNVKXAYRKYLYGFEEYCRSANIQFRXVHHHEPKVKEEKKDLEESMEEALKLDQEMPLXEVKSEPEENIDSNSESEREEIELKSPRGRRRIARDVNSIKKEIEEEKXEDKLKDNDXENKDVDDDYEXAEKKENELLLGRKNXPKQKEKKIKKQEDSDKDSDEEEEKSQEREEXESKCDSEGEEDEEDMEPCLXGXKVKVKYGRGKXQKIYEASIKSXEIDDGEVLYLVHYYGWNVRYDEWVKADRIIWPLDKGGPKKKQKKKAKNKEDSEKDEKRDEERQKSKRGRPPLKSXLSSNMPYGLSKXANSEGKSDSCSSDSEXEDALEKNLINEELSLKDELEKNENLNDDKLDEENPKISAHILKENDRXQMQPLEXLKLEVGENEQIVQIFGNKMEKXEEVKKEAEKSPKGKGRRSKXKDLSLEIIKISSFGQNEAGSEPHIEAHSLELSSLDNKNFSSAXEDEIDQCVKEKKLKRKILGQSSPEKKIRIENGMEMXNXVSQERXSDCIGSEGMKNLNFEQHFERENEGMPSLIAESNQCIQQLXSERFDSPAEEXVNIPLKEDEDAMPLIGPEXLVCHEVDLDDLDEKDKXSIEDVAVESSESNSLVSIPPALPPVVQHNFSVASPLXLSQDESRSVKSESDIXIEVDSIAEESQEGLCERESANGFEXNVASGXCSIIVQERESREKGQKRPSDGNSGLMAKKQKRXPKRXSAAAKNEKNGXGQSSDSEDLPVLDNSSKCXPVKHLNVSKPQKLARSPARISPHIKDGEKDKHREKHPNSSPRXYKWSFQLNELDNMNSXERISFLQEKLQEIRKYYMSLKSEVAXIDRRRKRLKKKDREVSHAGASMSSASSDXGMSPSSSSPPQNVLAVECR

SEQ ID NO: 3140 - protein, 265 aa, Homo sapiens
  MOD_RES (10)..(11): Selenocysteine
  MOD_RES (31)..(31): Selenocysteine
  MOD_RES (33)..(33): Selenocysteine
  MOD_RES (47)..(47): Selenocysteine
  MOD_RES (53)..(53): Selenocysteine
  MOD_RES (63)..(63): Selenocysteine
  MOD_RES (67)..(67): Selenocysteine
  MOD_RES (82)..(82): Selenocysteine
  MOD_RES (89)..(89): Selenocysteine
  MOD_RES (96)..(96): Selenocysteine
  MOD_RES (103)..(103): Selenocysteine
  MOD_RES (114)..(114): Selenocysteine
  MOD_RES (148)..(148): Selenocysteine
  MOD_RES (151)..(151): Selenocysteine
  MOD_RES (168)..(168): Selenocysteine
  MOD_RES (207)..(207): Selenocysteine
  MOD_RES (220)..(220): Selenocysteine
  MOD_RES (261)..(261): Selenocysteine
MKVLLKQDNXXQLVQDDQVKGPLRVGAIVEXRXSDGSFQEAIISKLXDASWYXVVFDDGDERXLRRXSLCLKGERHFAESEXLDQLPLXNPEHFGXPVIAKKXNRGRRSSLPVXEDEKEEESSEEEDEDKRRLNDELLGKVVSVVSAXERXEWYPALVISPSCNDDIXVKKDQCLVRSFIDSKFYSIARKDIKEVDILNLPESELSXKPGLQKASIFLKXRVVPDNWKMDISEILESSSSDDEDGPAEENDEEKEKEAKKXEEEV

SEQ ID NO: 3141 - protein, 483 aa, Homo sapiens
  MOD_RES (11)..(11): Selenocysteine
  MOD_RES (14)..(14): Selenocysteine
  MOD_RES (31)..(31): Selenocysteine
  MOD_RES (41)..(41): Selenocysteine
  MOD_RES (48)..(48): Selenocysteine
  MOD_RES (84)..(84): Selenocysteine
  MOD_RES (90)..(90): Selenocysteine
  MOD_RES (100)..(100): Selenocysteine
  MOD_RES (119)..(119): Selenocysteine
  MOD_RES (126)..(126): Selenocysteine
  MOD_RES (133)..(133): Selenocysteine
  MOD_RES (140)..(140): Selenocysteine
  MOD_RES (223)..(223): Selenocysteine
  MOD_RES (234)..(234): Selenocysteine
  MOD_RES (237)..(237): Selenocysteine
  MOD_RES (260)..(260): Selenocysteine
  MOD_RES (267)..(267): Selenocysteine
  MOD_RES (325)..(325): Selenocysteine
  MOD_RES (434)..(434): Selenocysteine
  MOD_RES (481)..(481): Selenocysteine
MKALDEPPYLXVGXDVSAKYRGAFCEAKIKXAKRLVKVKVXFRHDSSXVEVQDDHIKGPLKVGAIVEVKNLDGAYQEAVINKLXDASWYXVVFDDGDEKXLRRSSLCLKGERHFAESEXLDQLPLXNPEHFGXPVIGKKXNRGRRSNHIPEEESSSSSSDEDEDDRKQIDELLGKVVCVDYISLDKKKALWFPALVVCPDCSDEIAVKKDNILVRSFKDGKFXSVPRKDVHEIXSDXAPKPDAVLKQAFEQALEFHKSRXIPANWKXELKEDSSSSEAEEEEEEEDDEKEKEDNSSEEEEEIEPFPEERENFLQQLYKFMEDRGXPINKRPVLGYRNLNLFKLFRLVHKLGGFDNIESGAVWKQVYQDLGIPVLNSAAGYNVKCAYKKYLYGFEEYCRSANIEFQMALPEKVVNKQCKECENVKEIKVKEENEXEIKEIKMEEERNIIPREEKPIEDEIERKENIKPSLGSKKNLLESIPXHS

SEQ ID NO: 3142 - protein, 1153 aa, Homo sapiens
  MOD_RES (11)..(11): Selenocysteine
  MOD_RES (14)..(14): Selenocysteine
  MOD_RES (31)..(31): Selenocysteine
  MOD_RES (41)..(41): Selenocysteine
  MOD_RES (48)..(48): Selenocysteine
  MOD_RES (84)..(84): Selenocysteine
  MOD_RES (90)..(90): Selenocysteine
  MOD_RES (100)..(100): Selenocysteine
  MOD_RES (119)..(119): Selenocysteine
  MOD_RES (126)..(126): Selenocysteine
  MOD_RES (133)..(133): Selenocysteine
  MOD_RES (140)..(140): Selenocysteine
  MOD_RES (223)..(223): Selenocysteine
  MOD_RES (234)..(234): Selenocysteine
  MOD_RES (237)..(237): Selenocysteine
  MOD_RES (260)..(260): Selenocysteine
  MOD_RES (267)..(267): Selenocysteine
  MOD_RES (325)..(325): Selenocysteine
  MOD_RES (434)..(434): Selenocysteine
  MOD_RES (481)..(481): Selenocysteine
  MOD_RES (507)..(508): Selenocysteine
  MOD_RES (531)..(531): Selenocysteine
  MOD_RES (672)..(672): Selenocysteine
  MOD_RES (685)..(685): Selenocysteine
  MOD_RES (692)..(692): Selenocysteine
  MOD_RES (701)..(701): Selenocysteine
  MOD_RES (742)..(742): Selenocysteine
  MOD_RES (793)..(793): Selenocysteine
  MOD_RES (801)..(801): Selenocysteine
  MOD_RES (811)..(812): Selenocysteine
  MOD_RES (830)..(830): Selenocysteine
  MOD_RES (836)..(836): Selenocysteine
  MOD_RES (869)..(869): Selenocysteine
  MOD_RES (874)..(874): Selenocysteine
  MOD_RES (876)..(876): Selenocysteine
  MOD_RES (891)..(892): Selenocysteine
  MOD_RES (939)..(939): Selenocysteine
  MOD_RES (949)..(949): Selenocysteine
  MOD_RES (971)..(971): Selenocysteine
  MOD_RES (1001)..(1001): Selenocysteine
  MOD_RES (1022)..(1022): Selenocysteine
  MOD_RES (1025)..(1026): Selenocysteine
  MOD_RES (1034)..(1034): Selenocysteine
  MOD_RES (1036)..(1036): Selenocysteine
  MOD_RES (1046)..(1046): Selenocysteine
  MOD_RES (1065)..(1065): Selenocysteine
  MOD_RES (1068)..(1068): Selenocysteine
  MOD_RES (1114)..(1114): Selenocysteine
  MOD_RES (1139)..(1139): Selenocysteine
MKALDEPPYLXVGXDVSAKYRGAFCEAKIKXAKRLVKVKVXFRHDSSXVEVQDDHIKGPLKVGAIVEVKNLDGAYQEAVINKLXDASWYXVVFDDGDEKXLRRSSLCLKGERHFAESEXLDQLPLXNPEHFGXPVIGKKXNRGRRSNHIPEEESSSSSSDEDEDDRKQIDELLGKVVCVDYISLDKKKALWFPALVVCPDCSDEIAVKKDNILVRSFKDGKFXSVPRKDVHEIXSDXAPKPDAVLKQAFEQALEFHKSRXIPANWKXELKEDSSSSEAEEEEEEEDDEKEKEDNSSEEEEEIEPFPEERENFLQQLYKFMEDRGXPINKRPVLGYRNLNLFKLFRLVHKLGGFDNIESGAVWKQVYQDLGIPVLNSAAGYNVKCAYKKYLYGFEEYCRSANIEFQMALPEKVVNKQCKECENVKEIKVKEENEXEIKEIKMEEERNIIPREEKPIEDEIERKENIKPSLGSKKNLLESIPXHSDQEKEVNIKKPEDNENLDDKDDDXXRVDESLNIKVEAEEEKAKSGDEXNKEEDEDDEEAEEEEEEEEEEEDEDDDDNNEEEEFECYPPGMKVQVRYGRGKNQKMYEASIKDSDVEGGEVLYLVHYCGWNVRYDEWIKADKIVRPADKNVPKIKHRKKIKNKLDKEKDKDEKYSPKNCKLRRLSKPPFQXNPSPEMVSKLDLXDAKNSDXAHIKSIEIXSILNGLQASESSAEDSEQEDERGAQDMDNNGKEESKIDHLXNNRNDLISKEEQNSSSLLEENKVHADLVISKPVSKSPERLRKDIEVLSEDXDYEEDEVXKKRKDVKKDXXDKSSKPQIKRGKRRYCNXEECLKXGSPGKKEEKAKNKESLCMENSSNSSSDEDEEEXKAKMXPXKKYNGLEEKRKSLRXXGFYSGFSEVAEKRIKLLNNSDERLQNSRAKDRKDVWSSIQGQWPKKXLKELFSDSDXEAAASPPHPAPEEGVAEESLQXVAEEESCSPSVELEKPPPVNVDSKPIEEKXVEVNDRKAEFPSSGSNSVLNXPPXXPESPSSVXVXEGSRQQSSVXVSEPLAPNQEEVRSIKSEXDSXIEVDSVAGELQDLQSEGNSSPAGFDASVSSSSSNQPEPEHPEKACXGQKRVKDAQGGGSSSKKQKRSHKAXVVNNKKKGKGSAPH

SEQ ID NO: 3143 - protein, 1226 aa, Homo sapiens
  MOD_RES (11)..(11): Selenocysteine
  MOD_RES (14)..(14): Selenocysteine
  MOD_RES (31)..(31): Selenocysteine
  MOD_RES (41)..(41): Selenocysteine
  MOD_RES (48)..(48): Selenocysteine
  MOD_RES (84)..(84): Selenocysteine
  MOD_RES (90)..(90): Selenocysteine
  MOD_RES (100)..(100): Selenocysteine
  MOD_RES (119)..(119): Selenocysteine
  MOD_RES (126)..(126): Selenocysteine
  MOD_RES (133)..(133): Selenocysteine
  MOD_RES (140)..(140): Selenocysteine
  MOD_RES (223)..(223): Selenocysteine
  MOD_RES (234)..(234): Selenocysteine
  MOD_RES (237)..(237): Selenocysteine
  MOD_RES (260)..(260): Selenocysteine
  MOD_RES (267)..(267): Selenocysteine
  MOD_RES (325)..(325): Selenocysteine
  MOD_RES (434)..(434): Selenocysteine
  MOD_RES (481)..(481): Selenocysteine
  MOD_RES (507)..(508): Selenocysteine
  MOD_RES (586)..(586): Selenocysteine
  MOD_RES (599)..(599): Selenocysteine
  MOD_RES (606)..(606): Selenocysteine
  MOD_RES (615)..(615): Selenocysteine
  MOD_RES (656)..(656): Selenocysteine
  MOD_RES (707)..(707): Selenocysteine
  MOD_RES (715)..(715): Selenocysteine
  MOD_RES (725)..(726): Selenocysteine
  MOD_RES (744)..(744): Selenocysteine
  MOD_RES (750)..(750): Selenocysteine
  MOD_RES (783)..(783): Selenocysteine
  MOD_RES (788)..(788): Selenocysteine
  MOD_RES (790)..(790): Selenocysteine
  MOD_RES (805)..(806): Selenocysteine
  MOD_RES (853)..(853): Selenocysteine
  MOD_RES (863)..(863): Selenocysteine
  MOD_RES (885)..(885): Selenocysteine
  MOD_RES (915)..(915): Selenocysteine
  MOD_RES (936)..(936): Selenocysteine
  MOD_RES (939)..(940): Selenocysteine
  MOD_RES (948)..(948): Selenocysteine
  MOD_RES (950)..(950): Selenocysteine
  MOD_RES (960)..(960): Selenocysteine
  MOD_RES (979)..(979): Selenocysteine
  MOD_RES (982)..(982): Selenocysteine
  MOD_RES (1028)..(1028): Selenocysteine
  MOD_RES (1053)..(1053): Selenocysteine
  MOD_RES (1064)..(1064): Selenocysteine
  MOD_RES (1079)..(1079): Selenocysteine
  MOD_RES (1089)..(1089): Selenocysteine
  MOD_RES (1096)..(1096): Selenocysteine
  MOD_RES (1102)..(1102): Selenocysteine
  MOD_RES (1142)..(1142): Selenocysteine
  MOD_RES (1148)..(1148): Selenocysteine
  MOD_RES (1188)..(1188): Selenocysteine
  MOD_RES (1201)..(1201): Selenocysteine
  MOD_RES (1207)..(1207): Selenocysteine
MKALDEPPYLXVGXDVSAKYRGAFCEAKIKXAKRLVKVKVXFRHDSSXVEVQDDHIKGPLKVGAIVEVKNLDGAYQEAVINKLXDASWYXVVFDDGDEKXLRRSSLCLKGERHFAESEXLDQLPLXNPEHFGXPVIGKKXNRGRRSNHIPEEESSSSSSDEDEDDRKQIDELLGKVVCVDYISLDKKKALWFPALVVCPDCSDEIAVKKDNILVRSFKDGKFXSVPRKDVHEIXSDXAPKPDAVLKQAFEQALEFHKSRXIPANWKXELKEDSSSSEAEEEEEEEDDEKEKEDNSSEEEEEIEPFPEERENFLQQLYKFMEDRGXPINKRPVLGYRNLNLFKLFRLVHKLGGFDNIESGAVWKQVYQDLGIPVLNSAAGYNVKCAYKKYLYGFEEYCRSANIEFQMALPEKVVNKQCKECENVKEIKVKEENEXEIKEIKMEEERNIIPREEKPIEDEIERKENIKPSLGSKKNLLESIPXHSDQEKEVNIKKPEDNENLDDKDDDXXRVDESLNIKVEAEEEKAKSGYDEWIKADKIVRPADKNVPKIKHRKKIKNKLDKEKDKDEKYSPKNCKLRRLSKPPFQXNPSPEMVSKLDLXDAKNSDXAHIKSIEIXSILNGLQASESSAEDSEQEDERGAQDMDNNGKEESKIDHLXNNRNDLISKEEQNSSSLLEENKVHADLVISKPVSKSPERLRKDIEVLSEDXDYEEDEVXKKRKDVKKDXXDKSSKPQIKRGKRRYCNXEECLKXGSPGKKEEKAKNKESLCMENSSNSSSDEDEEEXKAKMXPXKKYNGLEEKRKSLRXXGFYSGFSEVAEKRIKLLNNSDERLQNSRAKDRKDVWSSIQGQWPKKXLKELFSDSDXEAAASPPHPAPEEGVAEESLQXVAEEESCSPSVELEKPPPVNVDSKPIEEKXVEVNDRKAEFPSSGSNSVLNXPPXXPESPSSVXVXEGSRQQSSVXVSEPLAPNQEEVRSIKSEXDSXIEVDSVAGELQDLQSEGNSSPAGFDASVSSSSSNQPEPEHPEKACXGQKRVKDAQGGGSSSKKQKRSHKAXVVNNKKKGKGXNSSDSEELSAGESIXKSQPVKSVSXGMKSHSXKSPARXQSPGKCGKNGDKDPDLKEPSNRLPKVYKWSFQMSDLENMXSAERIXILQEKLQEIRKHYLSLKSEVASIDRRRKRLKKKERESAAXSSSSSSPSSSSIXAAVMLXLAEPSMSSASQNGMSVECR

SEQ ID NO: 3144 - protein, 1312 aa, Homo sapiens
  MOD_RES (11)..(11): Selenocysteine
  MOD_RES (14)..(14): Selenocysteine
  MOD_RES (31)..(31): Selenocysteine
  MOD_RES (41)..(41): Selenocysteine
  MOD_RES (48)..(48): Selenocysteine
  MOD_RES (84)..(84): Selenocysteine
  MOD_RES (90)..(90): Selenocysteine
  MOD_RES (100)..(100): Selenocysteine
  MOD_RES (119)..(119): Selenocysteine
  MOD_RES (126)..(126): Selenocysteine
  MOD_RES (133)..(133): Selenocysteine
  MOD_RES (140)..(140): Selenocysteine
  MOD_RES (223)..(223): Selenocysteine
  MOD_RES (234)..(234): Selenocysteine
  MOD_RES (237)..(237): Selenocysteine
  MOD_RES (260)..(260): Selenocysteine
  MOD_RES (267)..(267): Selenocysteine
  MOD_RES (325)..(325): Selenocysteine
  MOD_RES (434)..(434): Selenocysteine
  MOD_RES (481)..(481): Selenocysteine
  MOD_RES (507)..(508): Selenocysteine
  MOD_RES (531)..(531): Selenocysteine
  MOD_RES (672)..(672): Selenocysteine
  MOD_RES (685)..(685): Selenocysteine
  MOD_RES (692)..(692): Selenocysteine
  MOD_RES (701)..(701): Selenocysteine
  MOD_RES (742)..(742): Selenocysteine
  MOD_RES (793)..(793): Selenocysteine
  MOD_RES (801)..(801): Selenocysteine
  MOD_RES (811)..(812): Selenocysteine
  MOD_RES (830)..(830): Selenocysteine
  MOD_RES (836)..(836): Selenocysteine
  MOD_RES (869)..(869): Selenocysteine
  MOD_RES (874)..(874): Selenocysteine
  MOD_RES (876)..(876): Selenocysteine
  MOD_RES (891)..(892): Selenocysteine
  MOD_RES (939)..(939): Selenocysteine
  MOD_RES (949)..(949): Selenocysteine
  MOD_RES (971)..(971): Selenocysteine
  MOD_RES (1001)..(1001): Selenocysteine
  MOD_RES (1022)..(1022): Selenocysteine
  MOD_RES (1025)..(1026): Selenocysteine
  MOD_RES (1034)..(1034): Selenocysteine
  MOD_RES (1036)..(1036): Selenocysteine
  MOD_RES (1046)..(1046): Selenocysteine
  MOD_RES (1065)..(1065): Selenocysteine
  MOD_RES (1068)..(1068): Selenocysteine
  MOD_RES (1114)..(1114): Selenocysteine
  MOD_RES (1139)..(1139): Selenocysteine
  MOD_RES (1150)..(1150): Selenocysteine
  MOD_RES (1165)..(1165): Selenocysteine
  MOD_RES (1175)..(1175): Selenocysteine
  MOD_RES (1182)..(1182): Selenocysteine
  MOD_RES (1188)..(1188): Selenocysteine
  MOD_RES (1228)..(1228): Selenocysteine
  MOD_RES (1234)..(1234): Selenocysteine
  MOD_RES (1274)..(1274): Selenocysteine
  MOD_RES (1287)..(1287): Selenocysteine
  MOD_RES (1293)..(1293): Selenocysteine
MKALDEPPYLXVGXDVSAKYRGAFCEAKIKXAKRLVKVKVXFRHDSSXVEVQDDHIKGPLKVGAIVEVKNLDGAYQEAVINKLXDASWYXVVFDDGDEKXLRRSSLCLKGERHFAESEXLDQLPLXNPEHFGXPVIGKKXNRGRRSNHIPEEESSSSSSDEDEDDRKQIDELLGKVVCVDYISLDKKKALWFPALVVCPDCSDEIAVKKDNILVRSFKDGKFXSVPRKDVHEIXSDXAPKPDAVLKQAFEQALEFHKSRXIPANWKXELKEDSSSSEAEEEEEEEDDEKEKEDNSSEEEEEIEPFPEERENFLQQLYKFMEDRGXPINKRPVLGYRNLNLFKLFRLVHKLGGFDNIESGAVWKQVYQDLGIPVLNSAAGYNVKCAYKKYLYGFEEYCRSANIEFQMALPEKVVNKQCKECENVKEIKVKEENEXEIKEIKMEEERNIIPREEKPIEDEIERKENIKPSLGSKKNLLESIPXHSDQEKEVNIKKPEDNENLDDKDDDXXRVDESLNIKVEAEEEKAKSGDEXNKEEDEDDEEAEEEEEEEEEEEDEDDDDNNEEEEFECYPPGMKVQVRYGRGKNQKMYEASIKDSDVEGGEVLYLVHYCGWNVRYDEWIKADKIVRPADKNVPKIKHRKKIKNKLDKEKDKDEKYSPKNCKLRRLSKPPFQXNPSPEMVSKLDLXDAKNSDXAHIKSIEIXSILNGLQASESSAEDSEQEDERGAQDMDNNGKEESKIDHLXNNRNDLISKEEQNSSSLLEENKVHADLVISKPVSKSPERLRKDIEVLSEDXDYEEDEVXKKRKDVKKDXXDKSSKPQIKRGKRRYCNXEECLKXGSPGKKEEKAKNKESLCMENSSNSSSDEDEEEXKAKMXPXKKYNGLEEKRKSLRXXGFYSGFSEVAEKRIKLLNNSDERLQNSRAKDRKDVWSSIQGQWPKKXLKELFSDSDXEAAASPPHPAPEEGVAEESLQXVAEEESCSPSVELEKPPPVNVDSKPIEEKXVEVNDRKAEFPSSGSNSVLNXPPXXPESPSSVXVXEGSRQQSSVXVSEPLAPNQEEVRSIKSEXDSXIEVDSVAGELQDLQSEGNSSPAGFDASVSSSSSNQPEPEHPEKACXGQKRVKDAQGGGSSSKKQKRSHKAXVVNNKKKGKGXNSSDSEELSAGESIXKSQPVKSVSXGMKSHSXKSPARXQSPGKCGKNGDKDPDLKEPSNRLPKVYKWSFQMSDLENMXSAERIXILQEKLQEIRKHYLSLKSEVASIDRRRKRLKKKERESAAXSSSSSSPSSSSIXAAVMLXLAEPSMSSASQNGMSVECR

SEQ ID NO: 3145 - protein, 553 aa, Homo sapiens
  MOD_RES (1)..(1): Any amino acid
  MOD_RES (72)..(72): Selenocysteine
  MOD_RES (85)..(85): Selenocysteine
  MOD_RES (92)..(92): Selenocysteine
  MOD_RES (101)..(101): Selenocysteine
  MOD_RES (142)..(142): Selenocysteine
  MOD_RES (193)..(193): Selenocysteine
  MOD_RES (201)..(201): Selenocysteine
  MOD_RES (211)..(212): Selenocysteine
  MOD_RES (230)..(230): Selenocysteine
  MOD_RES (236)..(236): Selenocysteine
  MOD_RES (269)..(269): Selenocysteine
  MOD_RES (274)..(274): Selenocysteine
  MOD_RES (276)..(276): Selenocysteine
  MOD_RES (291)..(292): Selenocysteine
  MOD_RES (339)..(339): Selenocysteine
  MOD_RES (349)..(349): Selenocysteine
  MOD_RES (371)..(371): Selenocysteine
  MOD_RES (401)..(401): Selenocysteine
  MOD_RES (422)..(422): Selenocysteine
  MOD_RES (425)..(426): Selenocysteine
  MOD_RES (434)..(434): Selenocysteine
  MOD_RES (436)..(436): Selenocysteine
  MOD_RES (446)..(446): Selenocysteine
  MOD_RES (465)..(465): Selenocysteine
  MOD_RES (468)..(468): Selenocysteine
  MOD_RES (514)..(514): Selenocysteine
  MOD_RES (539)..(539): Selenocysteine
XFECYPPGMKVQVRYDEWIKADKIVRPADKNVPKIKHRKKIKNKLDKEKDKDEKYSPKNCKLRRLSKPPFQXNPSPEMVSKLDLXDAKNSDXAHIKSIEIXSILNGLQASESSAEDSEQEDERGAQDMDNNGKEESKIDHLXNNRNDLISKEEQNSSSLLEENKVHADLVISKPVSKSPERLRKDIEVLSEDXDYEEDEVXKKRKDVKKDXXDKSSKPQIKRGKRRYCNXEECLKXGSPGKKEEKAKNKESLCMENSSNSSSDEDEEEXKAKMXPXKKYNGLEEKRKSLRXXGFYSGFSEVAEKRIKLLNNSDERLQNSRAKDRKDVWSSIQGQWPKKXLKELFSDSDXEAAASPPHPAPEEGVAEESLQXVAEEESCSPSVELEKPPPVNVDSKPIEEKXVEVNDRKAEFPSSGSNSVLNXPPXXPESPSSVXVXEGSRQQSSVXVSEPLAPNQEEVRSIKSEXDSXIEVDSVAGELQDLQSEGNSSPAGFDASVSSSSSNQPEPEHPEKACXGQKRVKDAQGGGSSSKKQKRSHKAXVVNNKKKGKGSKCE

SEQ ID NO: 3146 - protein, 696 aa, Homo sapiens
  MOD_RES (1)..(1): Any amino acid
  MOD_RES (6)..(6): Selenocysteine
  MOD_RES (15)..(15): Selenocysteine
  MOD_RES (56)..(56): Selenocysteine
  MOD_RES (107)..(107): Selenocysteine
  MOD_RES (115)..(115): Selenocysteine
  MOD_RES (125)..(126): Selenocysteine
  MOD_RES (144)..(144): Selenocysteine
  MOD_RES (150)..(150): Selenocysteine
  MOD_RES (183)..(183): Selenocysteine
  MOD_RES (188)..(188): Selenocysteine
  MOD_RES (190)..(190): Selenocysteine
  MOD_RES (205)..(206): Selenocysteine
  MOD_RES (253)..(253): Selenocysteine
  MOD_RES (263)..(263): Selenocysteine
  MOD_RES (285)..(285): Selenocysteine
  MOD_RES (315)..(315): Selenocysteine
  MOD_RES (336)..(336): Selenocysteine
  MOD_RES (339)..(340): Selenocysteine
  MOD_RES (348)..(348): Selenocysteine
  MOD_RES (350)..(350): Selenocysteine
  MOD_RES (360)..(360): Selenocysteine
  MOD_RES (379)..(379): Selenocysteine
  MOD_RES (382)..(382): Selenocysteine
  MOD_RES (428)..(428): Selenocysteine
  MOD_RES (453)..(453): Selenocysteine
  MOD_RES (464)..(464): Selenocysteine
  MOD_RES (479)..(479): Selenocysteine
  MOD_RES (489)..(489): Selenocysteine
  MOD_RES (496)..(496): Selenocysteine
  MOD_RES (502)..(502): Selenocysteine
  MOD_RES (542)..(542): Selenocysteine
  MOD_RES (548)..(548): Selenocysteine
  MOD_RES (588)..(588): Selenocysteine
  MOD_RES (601)..(601): Selenocysteine
  MOD_RES (607)..(607): Selenocysteine
  MOD_RES (645)..(645): Selenocysteine
XKNSDXAHIKSIEIXSILNGLQASESSAEDSEQEDERGAQDMDNNGKEESKIDHLXNNRNDLISKEEQNSSSLLEENKVHADLVISKPVSKSPERLRKDIEVLSEDXDYEEDEVXKKRKDVKKDXXDKSSKPQIKRGKRRYCNXEECLKXGSPGKKEEKAKNKESLCMENSSNSSSDEDEEEXKAKMXPXKKYNGLEEKRKSLRXXGFYSGFSEVAEKRIKLLNNSDERLQNSRAKDRKDVWSSIQGQWPKKXLKELFSDSDXEAAASPPHPAPEEGVAEESLQXVAEEESCSPSVELEKPPPVNVDSKPIEEKXVEVNDRKAEFPSSGSNSVLNXPPXXPESPSSVXVXEGSRQQSSVXVSEPLAPNQEEVRSIKSEXDSXIEVDSVAGELQDLQSEGNSSPAGFDASVSSSSSNQPEPEHPEKACXGQKRVKDAQGGGSSSKKQKRSHKAXVVNNKKKGKGXNSSDSEELSAGESIXKSQPVKSVSXGMKSHSXKSPARXQSPGKCGKNGDKDPDLKEPSNRLPKVYKWSFQMSDLENMXSAERIXILQEKLQEIRKHYLSLKSEVASIDRRRKRLKKKERESAAXSSSSSSPSSSSIXAAVMLXLAEPSMSSASQNGMLQPLPEDVLHSQNEAFLKRRGPPXDGDKPAPSPSASLRRRPAADCRRGGGVARERKCPEPGSASWRAAAVWESLE

SEQ ID NO: 3147 - protein, 594 aa, Homo sapiens
  MOD_RES (13)..(13): Selenocysteine
  MOD_RES (74)..(74): Selenocysteine
  MOD_RES (106)..(106): Selenocysteine
  MOD_RES (125)..(125): Selenocysteine
  MOD_RES (129)..(129): Selenocysteine
  MOD_RES (131)..(131): Selenocysteine
  MOD_RES (156)..(156): Selenocysteine
  MOD_RES (176)..(176): Selenocysteine
  MOD_RES (196)..(196): Selenocysteine
  MOD_RES (216)..(216): Selenocysteine
  MOD_RES (251)..(251): Selenocysteine
  MOD_RES (305)..(305): Selenocysteine
  MOD_RES (313)..(313): Selenocysteine
  MOD_RES (346)..(346): Selenocysteine
  MOD_RES (349)..(349): Selenocysteine
  MOD_RES (430)..(430): Selenocysteine
  MOD_RES (434)..(434): Selenocysteine
  MOD_RES (503)..(503): Selenocysteine
  MOD_RES (512)..(512): Selenocysteine
  MOD_RES (514)..(514): Selenocysteine
  MOD_RES (541)..(541): Selenocysteine
  MOD_RES (557)..(557): Selenocysteine
  MOD_RES (580)..(581): Selenocysteine
  MOD_RES (592)..(592): Selenocysteine
MAAPVKGNRKQSXEGDALDPPASPKPAGKQNGIQNPISLEDSPEAGGEREEEQEREEEQAFLVSLYKFMKERHXPIERVPHLGFKQINLWKIYKAVEKLGAYELVXGRRLWKNVYDELGGSPGSXSAAXCXRRHYERLVLPYVRHLKGEDDKPLPXSKPRKQYKMAKENRGDDGAXERPKKAKEERRMDQMMPGKXKADAADPAPLPSQEPPRNSXEQQGLASGSSVSFVGASGCPEAYKRLLSSFYCKGXHGIMSPLAKKKLLAQVSKVEALQCQEEGCRHGAEPQASPAVHLPESPQSPKGLXENSRHRLXPQEGLQAPGGSLREEAQAGPCPAAPIFKGCFYXHPXEVLKPVSQHPRDFFSRLKDGVLLGPPGKEGLSVKEPQLVWGGDANRPSAFHKGGSRKGILYPKPKACWVSPMAKVPAESPXLPPXFPSSPGLGSKRSLEEEGAAHSGKRLRAVSPFLKEADAKKCGAKPAGSGLVSCLLGPALGPVPPEAYRGXMLHCPLNFXGXPGPLKGQAALPFSPLVIPAFPAHFLAXAGPSPMAAGLMHFPPXSFDSALRHRLCPASSAWHAPPVXXYAAPHFFHLNXKL

SEQ ID NO: 3148 - protein, 58 aa, Homo sapiens
  MOD_RES (13)..(13): Selenocysteine
  MOD_RES (42)..(42): Selenocysteine
  MOD_RES (47)..(47): Selenocysteine
MAAPVKGNRKQSXEGDALDPPASPKPAGKQNGIQNPISLELXCGRSXKQWRSWGPMSW

SEQ ID NO: 3149 - protein, 526 aa, Homo sapiens
  MOD_RES (6)..(6): Selenocysteine
  MOD_RES (38)..(38): Selenocysteine
  MOD_RES (57)..(57): Selenocysteine
  MOD_RES (61)..(61): Selenocysteine
  MOD_RES (63)..(63): Selenocysteine
  MOD_RES (88)..(88): Selenocysteine
  MOD_RES (108)..(108): Selenocysteine
  MOD_RES (128)..(128): Selenocysteine
  MOD_RES (148)..(148): Selenocysteine
  MOD_RES (183)..(183): Selenocysteine
  MOD_RES (237)..(237): Selenocysteine
  MOD_RES (245)..(245): Selenocysteine
  MOD_RES (278)..(278): Selenocysteine
  MOD_RES (281)..(281): Selenocysteine
  MOD_RES (362)..(362): Selenocysteine
  MOD_RES (366)..(366): Selenocysteine
  MOD_RES (435)..(435): Selenocysteine
  MOD_RES (444)..(444): Selenocysteine
  MOD_RES (446)..(446): Selenocysteine
  MOD_RES (473)..(473): Selenocysteine
  MOD_RES (489)..(489): Selenocysteine
  MOD_RES (512)..(513): Selenocysteine
  MOD_RES (524)..(524): Selenocysteine
MKERHXPIERVPHLGFKQINLWKIYKAVEKLGAYELVXGRRLWKNVYDELGGSPGSXSAAXCXRRHYERLVLPYVRHLKGEDDKPLPXSKPRKQYKMAKENRGDDGAXERPKKAKEERRMDQMMPGKXKADAADPAPLPSQEPPRNSXEQQGLASGSSVSFVGASGCPEAYKRLLSSFYCKGXHGIMSPLAKKKLLAQVSKVEALQCQEEGCRHGAEPQASPAVHLPESPQSPKGLXENSRHRLXPQEGLQAPGGSLREEAQAGPCPAAPIFKGCFYXHPXEVLKPVSQHPRDFFSRLKDGVLLGPPGKEGLSVKEPQLVWGGDANRPSAFHKGGSRKGILYPKPKACWVSPMAKVPAESPXLPPXFPSSPGLGSKRSLEEEGAAHSGKRLRAVSPFLKEADAKKCGAKPAGSGLVSCLLGPALGPVPPEAYRGXMLHCPLNFXGXPGPLKGQAALPFSPLVIPAFPAHFLAXAGPSPMAAGLMHFPPXSFDSALRHRLCPASSAWHAPPVXXYAAPHFFHLNXKL

SEQ ID NO: 3150 - protein, 945 aa, Homo sapiens
  MOD_RES (49)..(49): Selenocysteine
  MOD_RES (94)..(94): Selenocysteine
  MOD_RES (111)..(111): Selenocysteine
  MOD_RES (124)..(124): Selenocysteine
  MOD_RES (126)..(126): Selenocysteine
  MOD_RES (145)..(145): Selenocysteine
  MOD_RES (149)..(149): Selenocysteine
  MOD_RES (151)..(151): Selenocysteine
  MOD_RES (193)..(193): Selenocysteine
  MOD_RES (198)..(198): Selenocysteine
  MOD_RES (234)..(234): Selenocysteine
  MOD_RES (277)..(277): Selenocysteine
  MOD_RES (296)..(296): Selenocysteine
  MOD_RES (322)..(322): Selenocysteine
  MOD_RES (340)..(340): Selenocysteine
  MOD_RES (357)..(358): Selenocysteine
  MOD_RES (368)..(368): Selenocysteine
  MOD_RES (384)..(384): Selenocysteine
  MOD_RES (402)..(402): Selenocysteine
  MOD_RES (420)..(420): Selenocysteine
  MOD_RES (432)..(432): Selenocysteine
  MOD_RES (492)..(492): Selenocysteine
  MOD_RES (498)..(498): Selenocysteine
  MOD_RES (525)..(525): Selenocysteine
  MOD_RES (601)..(601): Selenocysteine
  MOD_RES (610)..(610): Selenocysteine
  MOD_RES (642)..(642): Selenocysteine
  MOD_RES (658)..(658): Selenocysteine
  MOD_RES (663)..(663): Selenocysteine
  MOD_RES (675)..(675): Selenocysteine
  MOD_RES (685)..(686): Selenocysteine
  MOD_RES (718)..(718): Selenocysteine
  MOD_RES (867)..(867): Selenocysteine
  MOD_RES (889)..(889): Selenocysteine
  MOD_RES (892)..(892): Selenocysteine
  MOD_RES (905)..(905): Selenocysteine
  MOD_RES (943)..(943): Selenocysteine
MAPNLKGRPRKKKPCPQRRDSFSGVKDSNNNSDGKAVAKVKCEARSALXKPKNNHNCKKVSNEEKPKVAIGEECRADEQAFLVALYKYMKERKXPIERIPYLGFKQINLWXMFQAAQKLGGYEXIXARRQWKHIYDELGGNPGSXSAAXCXRRHYERLILPYERFIKGEEDKPLPPIKPRKQENSSQENENKXKVSGXKRIKHEIPKSKKEKENAPKPQDAAEVSSEQEKEQEXLISQKSIPEPLPAADMKKKIEGYQEFSAKPLASRVDPEKDNEXDQGSNSEKVAEEAGEKGPXPPLPSAPLAPEKDSALVPGASKQPLXSPSALVDSKQESKLCCFXESPESEPQEASFPSFPXXQPPLANQNEXEDDKLPAMADYIANCXVKVDQLGSDDIHNALKQXPKVLVVQSFDMFKDKDLXGPMNENHGLNYXPLLYSRGNPGIMSPLAKKKLLSQVSGASLSSSYPYGSPPPLISKKKLIARDDLCSSLSQXHHGQSXDHMAVSRPSVIQHVQSFRSKPSEERKXINDIFKHEKLSRSDPHRCSFSKHHLNPLADSYVLKQEIQEGKDKLLEKRALPHSHMPSFLADFYSSPHLHSLYRHXEHHLHNEQXSKYPSRDMYRESENSSFPSHRHQEKLHVNYLXSLHLQDKKSAAAEAPXDDQPXDLSLPKNPHKPXGKVLGLAHSXXGPQESKGISQFQVLGSQSRDCHPKACRVSPMXMSGPKKYPESLSRSGKPHHVRLENFRKMEGMVHPILHRKMSPQNIGAARPIKRSLEDLDLVIAGKKARAVSPLDPSKEVSGKEKASEQESEGSKAAHGGHSGGGSEGHKLPLSSPIFPGLYSGSLCNSGLNSRLPAGYSHSLQYLKNQXVLSPLMQPLAFHSLVMQRGIFXSPXNSQQLYRHLAAAXPVGSSYGDLLHNSIYPLAAINPQAAFPSSQLSSVHPSXKL

SEQ ID NO: 3151 - protein, 1188 aa, Homo sapiens
  MOD_RES (47)..(47): Selenocysteine
  MOD_RES (65)..(65): Selenocysteine
  MOD_RES (82)..(82): Selenocysteine
  MOD_RES (131)..(131): Selenocysteine
  MOD_RES (150)..(150): Selenocysteine
  MOD_RES (174)..(174): Selenocysteine
  MOD_RES (203)..(203): Selenocysteine
  MOD_RES (228)..(228): Selenocysteine
  MOD_RES (233)..(233): Selenocysteine
  MOD_RES (292)..(292): Selenocysteine
  MOD_RES (337)..(337): Selenocysteine
  MOD_RES (354)..(354): Selenocysteine
  MOD_RES (367)..(367): Selenocysteine
  MOD_RES (369)..(369): Selenocysteine
  MOD_RES (388)..(388): Selenocysteine
  MOD_RES (392)..(392): Selenocysteine
  MOD_RES (394)..(394): Selenocysteine
  MOD_RES (436)..(436): Selenocysteine
  MOD_RES (441)..(441): Selenocysteine
  MOD_RES (477)..(477): Selenocysteine
  MOD_RES (520)..(520): Selenocysteine
  MOD_RES (539)..(539): Selenocysteine
  MOD_RES (565)..(565): Selenocysteine
  MOD_RES (583)..(583): Selenocysteine
  MOD_RES (600)..(601): Selenocysteine
  MOD_RES (611)..(611): Selenocysteine
  MOD_RES (627)..(627): Selenocysteine
  MOD_RES (645)..(645): Selenocysteine
  MOD_RES (663)..(663): Selenocysteine
  MOD_RES (675)..(675): Selenocysteine
  MOD_RES (735)..(735): Selenocysteine
  MOD_RES (741)..(741): Selenocysteine
  MOD_RES (768)..(768): Selenocysteine
  MOD_RES (844)..(844): Selenocysteine
  MOD_RES (853)..(853): Selenocysteine
  MOD_RES (885)..(885): Selenocysteine
  MOD_RES (901)..(901): Selenocysteine
  MOD_RES (906)..(906): Selenocysteine
  MOD_RES (918)..(918): Selenocysteine
  MOD_RES (928)..(929): Selenocysteine
  MOD_RES (961)..(961): Selenocysteine
  MOD_RES (1110)..(1110): Selenocysteine
  MOD_RES (1132)..(1132): Selenocysteine
  MOD_RES (1135)..(1135): Selenocysteine
  MOD_RES (1148)..(1148): Selenocysteine
  MOD_RES (1186)..(1186): Selenocysteine
MEPNSLQWVGSPCGLHGPYIFYKAFQFHLEGKPRILSLGDFFFVRCXPKDPICIAELQLLWEERXSRQLLSSSKLYFLPEDXPQGRNSDHGEDEVIAVSEKVIVKLEDLVKWVHSDFSKWRCGFHAGPVKXEALGRNGQKEALLKYRQSXLNSGLNFKDVLKEKADLGEDEEEXNVIVLSYPQYCRYRSMLKRIQDKPSSILXDQFALALGGIAVVSRNPQILYCRDXFDHPXLIENESICDEFAPNLKGRPRKKKPCPQRRDSFSGVKDSNNNSDGKAVAKVKCEARSALXKPKNNHNCKKVSNEEKPKVAIGEECRADEQAFLVALYKYMKERKXPIERIPYLGFKQINLWXMFQAAQKLGGYEXIXARRQWKHIYDELGGNPGSXSAAXCXRRHYERLILPYERFIKGEEDKPLPPIKPRKQENSSQENENKXKVSGXKRIKHEIPKSKKEKENAPKPQDAAEVSSEQEKEQEXLISQKSIPEPLPAADMKKKIEGYQEFSAKPLASRVDPEKDNEXDQGSNSEKVAEEAGEKGPXPPLPSAPLAPEKDSALVPGASKQPLXSPSALVDSKQESKLCCFXESPESEPQEASFPSFPXXQPPLANQNEXEDDKLPAMADYIANCXVKVDQLGSDDIHNALKQXPKVLVVQSFDMFKDKDLXGPMNENHGLNYXPLLYSRGNPGIMSPLAKKKLLSQVSGASLSSSYPYGSPPPLISKKKLIARDDLCSSLSQXHHGQSXDHMAVSRPSVIQHVQSFRSKPSEERKXINDIFKHEKLSRSDPHRCSFSKHHLNPLADSYVLKQEIQEGKDKLLEKRALPHSHMPSFLADFYSSPHLHSLYRHXEHHLHNEQXSKYPSRDMYRESENSSFPSHRHQEKLHVNYLXSLHLQDKKSAAAEAPXDDQPXDLSLPKNPHKPXGKVLGLAHSXXGPQESKGISQFQVLGSQSRDCHPKACRVSPMXMSGPKKYPESLSRSGKPHHVRLENFRKMEGMVHPILHRKMSPQNIGAARPIKRSLEDLDLVIAGKKARAVSPLDPSKEVSGKEKASEQESEGSKAAHGGHSGGGSEGHKLPLSSPIFPGLYSGSLCNSGLNSRLPAGYSHSLQYLKNQXVLSPLMQPLAFHSLVMQRGIFXSPXNSQQLYRHLAAAXPVGSSYGDLLHNSIYPLAAINPQAAFPSSQLSSVHPSXKL

SEQ ID NO: 3152 - protein, 135 aa, Homo sapiens
  MOD_RES (9)..(9): Selenocysteine
  MOD_RES (11)..(11): Selenocysteine
  MOD_RES (26)..(26): Selenocysteine
  MOD_RES (39)..(39): Selenocysteine
  MOD_RES (89)..(89): Selenocysteine
  MOD_RES (112)..(112): Selenocysteine
  MOD_RES (115)..(115): Selenocysteine
  MOD_RES (118)..(118): Selenocysteine
  MOD_RES (130)..(130): Selenocysteine
MAIGFNVEXVXYKNLKFQVWDLGGQXSIRPYWRCYYSNXDAVIYVVDSCDRDRIGISKSELVAMLEEEELRKAILVVFANKQDMEQAMXSSEMANSLGLPALKDRKWQIFKXSAXKGXGLDEAMEWLVEXLKSRQ

SEQ ID NO: 3153 - protein, 52 aa, Homo sapiens
  MOD_RES (6)..(6): Selenocysteine
  MOD_RES (29)..(29): Selenocysteine
  MOD_RES (32)..(32): Selenocysteine
  MOD_RES (35)..(35): Selenocysteine
  MOD_RES (47)..(47): Selenocysteine
MEQAMXSSEMANSLGLPALKDRKWQIFKXSAXKGXGLDEAMEWLVEXLKSRQ

SEQ ID NO: 3154 - protein, 64 aa, Homo sapiens
  MOD_RES (15)..(15): Selenocysteine
  MOD_RES (31)..(32): Selenocysteine
  MOD_RES (44)..(45): Selenocysteine
MGGFFSSIFSSLFGXREMRILILGLDGAGKXXILYRLQVGEVVXXIPKLLAFKKYPEDGIDLAN

SEQ ID NO: 3155 - protein, 181 aa, Homo sapiens
  MOD_RES (15)..(15): Selenocysteine
  MOD_RES (31)..(32): Selenocysteine
  MOD_RES (44)..(45): Selenocysteine
  MOD_RES (48)..(48): Selenocysteine
  MOD_RES (55)..(55): Selenocysteine
  MOD_RES (57)..(57): Selenocysteine
  MOD_RES (72)..(72): Selenocysteine
  MOD_RES (85)..(85): Selenocysteine
  MOD_RES (135)..(135): Selenocysteine
  MOD_RES (158)..(158): Selenocysteine
  MOD_RES (161)..(161): Selenocysteine
  MOD_RES (164)..(164): Selenocysteine
  MOD_RES (176)..(176): Selenocysteine
MGGFFSSIFSSLFGXREMRILILGLDGAGKXXILYRLQVGEVVXXIPXIGFNVEXVXYKNLKFQVWDLGGQXSIRPYWRCYYSNXDAVIYVVDSCDRDRIGISKSELVAMLEEEELRKAILVVFANKQDMEQAMXSSEMANSLGLPALKDRKWQIFKXSAXKGXGLDEAMEWLVEXLKSRQ

SEQ ID NO: 3156 - protein, 194 aa, Homo sapiens
  MOD_RES (15)..(15): Selenocysteine
  MOD_RES (31)..(32): Selenocysteine
  MOD_RES (44)..(45): Selenocysteine
  MOD_RES (48)..(48): Selenocysteine
  MOD_RES (55)..(55): Selenocysteine
  MOD_RES (57)..(57): Selenocysteine
  MOD_RES (72)..(72): Selenocysteine
  MOD_RES (85)..(85): Selenocysteine
  MOD_RES (135)..(135): Selenocysteine
  MOD_RES (158)..(158): Selenocysteine
  MOD_RES (161)..(161): Selenocysteine
  MOD_RES (164)..(164): Selenocysteine
MGGFFSSIFSSLFGXREMRILILGLDGAGKXXILYRLQVGEVVXXIPXIGFNVEXVXYKNLKFQVWDLGGQXSIRPYWRCYYSNXDAVIYVVDSCDRDRIGISKSELVAMLEEEELRKAILVVFANKQDMEQAMXSSEMANSLGLPALKDRKWQIFKXSAXKGXGLDEAMEWQVSCFQKPSVHLCVLAAMHVHV

SEQ ID NO: 3157 - protein, 17 aa, Homo sapiens
  MOD_RES (14)..(15): Selenocysteine
MRILILGLDGAGKXXIL

SEQ ID NO: 3158 - protein, 164 aa, Homo sapiens
  MOD_RES (14)..(15): Selenocysteine
  MOD_RES (27)..(28): Selenocysteine
  MOD_RES (31)..(31): Selenocysteine
  MOD_RES (38)..(38): Selenocysteine
  MOD_RES (40)..(40): Selenocysteine
  MOD_RES (55)..(55): Selenocysteine
  MOD_RES (68)..(68): Selenocysteine
  MOD_RES (118)..(118): Selenocysteine
  MOD_RES (141)..(141): Selenocysteine
  MOD_RES (144)..(144): Selenocysteine
  MOD_RES (147)..(147): Selenocysteine
  MOD_RES (159)..(159): Selenocysteine
MRILILGLDGAGKXXILYRLQVGEVVXXIPXIGFNVEXVXYKNLKFQVWDLGGQXSIRPYWRCYYSNXDAVIYVVDSCDRDRIGISKSELVAMLEEEELRKAILVVFANKQDMEQAMXSSEMANSLGLPALKDRKWQIFKXSAXKGXGLDEAMEWLVEXLKSRQ

SEQ ID NO: 3159 - protein, 244 aa, Homo sapiens
  MOD_RES (30)..(30): Selenocysteine
  MOD_RES (92)..(92): Selenocysteine
  MOD_RES (109)..(109): Selenocysteine
  MOD_RES (119)..(119): Selenocysteine
  MOD_RES (226)..(226): Selenocysteine
  MOD_RES (232)..(232): Selenocysteine
MAPRPLGPLVLALGGAAAVLGSVLFILWKXYFGRGRERRWDRGEAWWGAEAARLPEWDEWDPEDEEDEEPALEELEQREVLVLGLDGAGKSXFLRVLSGKPPLEGHIPXWGFNSVRLPXKDFEVDLLEIGGSQNLRFYWKEFVSEVDVLVFVVDSADRLRLPWARQELHKLLDKDPDLPVVVVANKQDLSEAMSMGELQRELGLQAIDNQREVFLLAASIAPAGPXFEEPGXVHIWKLLLELLS

SEQ ID NO: 3160 - protein, 79 aa, Homo sapiens
  MOD_RES (30)..(30): Selenocysteine
  MOD_RES (43)..(43): Selenocysteine
  MOD_RES (78)..(78): Selenocysteine
PDLPVVVVANKQVLPYRFSVVPGMSDVGAXGKERHRGSVISRXVPAEAHGHPEPQPPHHSIRGAAFRRAFRFRRFRLXL

SEQ ID NO: 3161 - protein, 48 aa, Homo sapiens
  MOD_RES (1)..(1): Any amino acid
XSEVDVLVFVVDSADRLRLPWARQELHKLLDKDPDLPVVVVANKQMLK

SEQ ID NO: 3162 - protein, 196 aa, Homo sapiens
  MOD_RES (26)..(27): Selenocysteine
  MOD_RES (40)..(40): Selenocysteine
  MOD_RES (43)..(43): Selenocysteine
  MOD_RES (60)..(60): Selenocysteine
  MOD_RES (81)..(81): Selenocysteine
  MOD_RES (91)..(91): Selenocysteine
  MOD_RES (104)..(104): Selenocysteine
  MOD_RES (158)..(158): Selenocysteine
MGSVNSRGHKAEAQVVMMGLDSAGKXXLLYKLKGHQLVEXLPXVGFNVEPLKAPGHVSLXLWDVGGQAPLRASWKDYLEGXDILVYVLDSXDEARLPESAAELXEVLNDPNMAGVPFLVLANKQEAPDALPLLKIRNRLSLERFQDHCWELRGCSALXGEGLPEALQSLWSLLKSRSCMCLQARAHGAERGDSKRS

SEQ ID NO: 3163 - protein, 290 aa, Homo sapiens
  MOD_RES (14)..(15): Selenocysteine
  MOD_RES (18)..(18): Selenocysteine
  MOD_RES (23)..(23): Selenocysteine
  MOD_RES (35)..(35): Selenocysteine
  MOD_RES (49)..(49): Selenocysteine
  MOD_RES (58)..(59): Selenocysteine
  MOD_RES (112)..(112): Selenocysteine
  MOD_RES (192)..(192): Selenocysteine
  MOD_RES (198)..(198): Selenocysteine
  MOD_RES (208)..(208): Selenocysteine
  MOD_RES (221)..(221): Selenocysteine
  MOD_RES (223)..(223): Selenocysteine
  MOD_RES (252)..(252): Selenocysteine
  MOD_RES (263)..(263): Selenocysteine
  MOD_RES (284)..(285): Selenocysteine
MFRLLSSCCSCLRXXEEXRRNVXIPIIGLNNSGKXVLVEAFQKLLPSKXDHCMKSELXXLLLDEYELSIYDLNGDLKGREAWPNYYAQAHGLVFVLDSSDIRRMQEVKIILXHLLSDKRVAGKPILILANKQDKKKALMPCDIIDYLLLKKLVKENKCPCRVEPCSAIRNLERRNHQPIVEGLRWLLAVIDXCQLPPXSSISISKNNXGSGERCSSHSFSXRXGMSKEKRQHLEQCSIEAKPLKSILQKEGXRLWSKKNMSVXFALDEPMKEGECSRRMRAQNXXKLCYN

SEQ ID NO: 3164 - protein, 256 aa, Homo sapiens
  MOD_RES (14)..(15): Selenocysteine
  MOD_RES (18)..(18): Selenocysteine
  MOD_RES (23)..(23): Selenocysteine
  MOD_RES (35)..(35): Selenocysteine
  MOD_RES (49)..(49): Selenocysteine
  MOD_RES (58)..(59): Selenocysteine
  MOD_RES (112)..(112): Selenocysteine
  MOD_RES (192)..(192): Selenocysteine
  MOD_RES (198)..(198): Selenocysteine
  MOD_RES (208)..(208): Selenocysteine
  MOD_RES (221)..(221): Selenocysteine
  MOD_RES (223)..(223): Selenocysteine
  MOD_RES (255)..(255): Selenocysteine
MFRLLSSCCSCLRXXEEXRRNVXIPIIGLNNSGKXVLVEAFQKLLPSKXDHCMKSELXXLLLDEYELSIYDLNGDLKGREAWPNYYAQAHGLVFVLDSSDIRRMQEVKIILXHLLSDKRVAGKPILILANKQDKKKALMPCDIIDYLLLKKLVKENKCPCRVEPCSAIRNLERRNHQPIVEGLRWLLAVIDXCQLPPXSSISISKNNXGSGERCSSHSFSXRXGMSKEKRQHLEQCSIEAKPLKSILQPSNQSYXH

SEQ ID NO: 3165 - protein, 124 aa, Homo sapiens
  MOD_RES (1)..(1): Any amino acid
  MOD_RES (26)..(26): Selenocysteine
  MOD_RES (32)..(32): Selenocysteine
  MOD_RES (42)..(42): Selenocysteine
  MOD_RES (55)..(55): Selenocysteine
  MOD_RES (57)..(57): Selenocysteine
  MOD_RES (86)..(86): Selenocysteine
  MOD_RES (97)..(97): Selenocysteine
  MOD_RES (118)..(119): Selenocysteine
XIRNLERRNHQPIVEGLRWLLAVIDXCQLPPXSSISISKNNXGSGERCSSHSFSXRXGMSKEKRQHLEQCSIEAKPLKSILQKEGXRLWSKKNMSVXFALDEPMKEGECSRRMRAQNXXKLCYN

SEQ ID NO: 3166 - protein, 164 aa, Homo sapiens
  MOD_RES (1)..(1): Any amino acid
  MOD_RES (66)..(66): Selenocysteine
  MOD_RES (72)..(72): Selenocysteine
  MOD_RES (82)..(82): Selenocysteine
  MOD_RES (95)..(95): Selenocysteine
  MOD_RES (97)..(97): Selenocysteine
  MOD_RES (148)..(149): Selenocysteine
  MOD_RES (158)..(158): Selenocysteine
XLANKQDKKKALMPCDIIDYLLLKKLVKENKCPCRVEPCSAIRNLERRNHQPIVEGLRWLLAVIDXCQLPPXSSISISKNNXGSGERCSSHSFSXRXGMSKEKRQHLEQCSIEAKPLKSILQKEAIKSILYSLRGSRRVRWHPLRMKXXLVKKNRDFXSLYRDA

SEQ ID NO: 3167 - protein, 325 aa, Homo sapiens
  MOD_RES (4)..(4): Selenocysteine
  MOD_RES (102)..(103): Selenocysteine
  MOD_RES (140)..(140): Selenocysteine
  MOD_RES (151)..(151): Selenocysteine
  MOD_RES (197)..(197): Selenocysteine
  MOD_RES (222)..(222): Selenocysteine
  MOD_RES (231)..(231): Selenocysteine
  MOD_RES (245)..(245): Selenocysteine
  MOD_RES (270)..(270): Selenocysteine
  MOD_RES (282)..(282): Selenocysteine
  MOD_RES (286)..(286): Selenocysteine
  MOD_RES (297)..(297): Selenocysteine
MEEXKEAMSEMLRHPRISGKPILVLANKQDKEGALGEADVIECLSLEKLVNEHKCLCQIEPCSAISGYGKKIDKSIKKGLYWLLHVIARDFDALNERIQKEXXEQRALEEQEKQERAERVRKLREERKQNEQEQAELDGXSGLAELDPEPXNPFQPIASVIIENEGKLEREKKNQKMEKDSDGCHLKHKMEHEQIEXQGQVNHNGQKNNEFGLVENYKEALXQQLKNEDEXDRPSLESANGKKKXKKLRMKRNHRVEPLNIDDCAPESPXPPPPPPPVGWGXPKVXRLPKLEPLGEXHHNDFYRKPLPPLAVPQRPNSDAHDVIS

SEQ ID NO: 3168 - protein, 89 aa, Homo sapiens
  MOD_RES (23)..(23): Selenocysteine
  MOD_RES (35)..(35): Selenocysteine
  MOD_RES (37)..(37): Selenocysteine
  MOD_RES (74)..(74): Selenocysteine
  MOD_RES (86)..(86): Selenocysteine
MFSLMASCCGWFKRWREPVRKVXLLMVGLDNAGKXAXAKGIQGEMGSPYVAQAGLECLASSYSSALASKSAGIXGMSHHAQPGQNXLKM

SEQ ID NO: 3169 - protein, 428 aa, Homo sapiens
  MOD_RES (23)..(23): Selenocysteine
  MOD_RES (35)..(35): Selenocysteine
  MOD_RES (37)..(37): Selenocysteine
  MOD_RES (52)..(52): Selenocysteine
  MOD_RES (68)..(68): Selenocysteine
  MOD_RES (107)..(107): Selenocysteine
  MOD_RES (205)..(206): Selenocysteine
  MOD_RES (243)..(243): Selenocysteine
  MOD_RES (254)..(254): Selenocysteine
  MOD_RES (300)..(300): Selenocysteine
  MOD_RES (325)..(325): Selenocysteine
  MOD_RES (334)..(334): Selenocysteine
  MOD_RES (348)..(348): Selenocysteine
  MOD_RES (373)..(373): Selenocysteine
  MOD_RES (385)..(385): Selenocysteine
  MOD_RES (389)..(389): Selenocysteine
  MOD_RES (400)..(400): Selenocysteine
MFSLMASCCGWFKRWREPVRKVXLLMVGLDNAGKXAXAKGIQGEYPEDVAPXVGFSKINLRQGKFEVXIFDLGGGIRIRGIWKNYYAESYGVIFVVDSSDEERMEEXKEAMSEMLRHPRISGKPILVLANKQDKEGALGEADVIECLSLEKLVNEHKCLCQIEPCSAISGYGKKIDKSIKKGLYWLLHVIARDFDALNERIQKEXXEQRALEEQEKQERAERVRKLREERKQNEQEQAELDGXSGLAELDPEPXNPFQPIASVIIENEGKLEREKKNQKMEKDSDGCHLKHKMEHEQIEXQGQVNHNGQKNNEFGLVENYKEALXQQLKNEDEXDRPSLESANGKKKXKKLRMKRNHRVEPLNIDDCAPESPXPPPPPPPVGWGXPKVXRLPKLEPLGEXHHNDFYRKPLPPLAVPQRPNSDAHDVIS

SEQ ID NO: 3170 - protein, 56 aa, Homo sapiens
  MOD_RES (23)..(23): Selenocysteine
  MOD_RES (35)..(35): Selenocysteine
  MOD_RES (37)..(37): Selenocysteine
  MOD_RES (45)..(45): Selenocysteine
MFSLMASCCGWFKRWREPVRKVXLLMVGLDNAGKXAXAKGIQGGXMFSNLGVWKEN

SEQ ID NO: 3171 - protein, 321 aa, Homo sapiens
  MOD_RES (98)..(99): Selenocysteine
  MOD_RES (136)..(136): Selenocysteine
  MOD_RES (147)..(147): Selenocysteine
  MOD_RES (193)..(193): Selenocysteine
  MOD_RES (218)..(218): Selenocysteine
  MOD_RES (227)..(227): Selenocysteine
  MOD_RES (241)..(241): Selenocysteine
  MOD_RES (266)..(266): Selenocysteine
  MOD_RES (278)..(278): Selenocysteine
  MOD_RES (282)..(282): Selenocysteine
  MOD_RES (293)..(293): Selenocysteine
MFSLMASCCGWFKRWREPVRLANKQDKEGALGEADVIECLSLEKLVNEHKCLCQIEPCSAISGYGKKIDKSIKKGLYWLLHVIARDFDALNERIQKEXXEQRALEEQEKQERAERVRKLREERKQNEQEQAELDGXSGLAELDPEPXNPFQPIASVIIENEGKLEREKKNQKMEKDSDGCHLKHKMEHEQIEXQGQVNHNGQKNNEFGLVENYKEALXQQLKNEDEXDRPSLESANGKKKXKKLRMKRNHRVEPLNIDDCAPESPXPPPPPPPVGWGXPKVXRLPKLEPLGEXHHNDFYRKPLPPLAVPQRPNSDAHDVIS

SEQ ID NO: 3172 - protein, 192 aa, Homo sapiens
  MOD_RES (11)..(11): Selenocysteine
  MOD_RES (28)..(28): Selenocysteine
  MOD_RES (40)..(41): Selenocysteine
  MOD_RES (44)..(44): Selenocysteine
  MOD_RES (61)..(61): Selenocysteine
  MOD_RES (73)..(73): Selenocysteine
  MOD_RES (82)..(82): Selenocysteine
  MOD_RES (92)..(92): Selenocysteine
  MOD_RES (132)..(132): Selenocysteine
  MOD_RES (137)..(137): Selenocysteine
  MOD_RES (160)..(160): Selenocysteine
  MOD_RES (172)..(172): Selenocysteine
  MOD_RES (185)..(185): Selenocysteine
MGSLGSKNPQXKQAQVLLLGLDSAGKSXLLYKLKLAKDIXXIPXIGFNVEMIELERNLSLXVWDVGGQEKMRXVWGCYCENXDGLVYVVDSXDKQRLEESQRQFEHILKNEHIKNVPVVLLANKQDMPGALXAEDIXRMFKVKKLCSDRNWYVQPCCALXGEGLAQGFRKLXGFVKSHMKSRGDXLAFFKQN

SEQ ID NO: 3173 - protein, 25 aa, Homo sapiens
MDALKDSFSQLINLLEEKDHEAVRM

SEQ ID NO: 3174 - protein, 204 aa, Homo sapiens
  MOD_RES (7)..(7): Selenocysteine
  MOD_RES (41)..(41): Selenocysteine
  MOD_RES (46)..(46): Selenocysteine
  MOD_RES (63)..(64): Selenocysteine
  MOD_RES (134)..(134): Selenocysteine
MSDLRIXEAFLYMDYLCFRALCCKGPPPARPEYDLVCIGLXGSGKXSLLSKLCSESPDNVVSXXGFSIKAVPFQNAILNVKELGGADNIRKYWSRYYQGSQGVIFVLDSASSEDDLEAARNELHSALQHPQLCXLPFLILANHQDKPAARSVQEIKKYFELEPLARGKRWILQPCSLDDMDALKDSFSQLINLLEEKDHEAVRM

SEQ ID NO: 3175 - protein, 158 aa, Homo sapiens
  MOD_RES (7)..(7): Selenocysteine
  MOD_RES (41)..(41): Selenocysteine
  MOD_RES (46)..(46): Selenocysteine
  MOD_RES (63)..(64): Selenocysteine
  MOD_RES (134)..(134): Selenocysteine
MSDLRIXEAFLYMDYLCFRALCCKGPPPARPEYDLVCIGLXGSGKXSLLSKLCSESPDNVVSXXGFSIKAVPFQNAILNVKELGGADNIRKYWSRYYQGSQGVIFVLDSASSEDDLEAARNELHSALQHPQLCXLPFLILANHQDKPAARSVQEKIQD

SEQ ID NO: 3176 - protein, 204 aa, Homo sapiens
  MOD_RES (7)..(7): Selenocysteine
  MOD_RES (41)..(41): Selenocysteine
  MOD_RES (46)..(46): Selenocysteine
  MOD_RES (63)..(64): Selenocysteine
  MOD_RES (134)..(134): Selenocysteine
MSDLRIXEAFLYMDYLCFRALCCKGPPPARPEYDLVCIGLXGSGKXSLLSKLCSESPDNVVSXXGFSIKAVPFQNAILNVKELGGADNIRKYWSRYYQGSQGVIFVLDSASSEDDLEAARNELHSALQHPQLCXLPFLILANHQDKPAARSVQELKKYFELEPLARGKRWILQPCSLDDMDALKDSFSQLINLLEEKDHEAVRM

SEQ ID NO: 3177 - protein, 173 aa, Homo sapiens
  MOD_RES (8)..(8): Selenocysteine
  MOD_RES (13)..(13): Selenocysteine
  MOD_RES (37)..(37): Selenocysteine
  MOD_RES (40)..(40): Selenocysteine
  MOD_RES (43)..(43): Selenocysteine
  MOD_RES (46)..(46): Selenocysteine
  MOD_RES (55)..(55): Selenocysteine
  MOD_RES (87)..(87): Selenocysteine
  MOD_RES (125)..(125): Selenocysteine
  MOD_RES (146)..(147): Selenocysteine
  MOD_RES (156)..(156): Selenocysteine
  MOD_RES (168)..(168): Selenocysteine
MCLLLGAXGVGKXLLVKRLQEVSSRDGKGDLGEPPPXRPXVGXNLXDIVAQRKIXIRELGGCMGPIWSSYYGNCRSLLFVMDASDPXQLSASCVQLLGLLSAEQLAEASVLILFNKIDLPCYMSXEEMKSLIRLPDIIACAKQNIXXAEISAREGXGLAGVLAWLQAXHRAND

SEQ ID NO: 3178 - protein, 93 aa, Homo sapiens
  MOD_RES (7)..(7): Selenocysteine
  MOD_RES (45)..(45): Selenocysteine
  MOD_RES (66)..(67): Selenocysteine
  MOD_RES (76)..(76): Selenocysteine
  MOD_RES (88)..(88): Selenocysteine
MDASDPXQLSASCVQLLGLLSAEQLAEASVLILFNKIDLPCYMSXEEMKSLIRLPDIIACAKQNIXXAEISAREGXGLAGVLAWLQAXHRAND

SEQ ID NO: 3179 - protein, 111 aa, Homo sapiens
  MOD_RES (25)..(25): Selenocysteine
  MOD_RES (63)..(63): Selenocysteine
  MOD_RES (84)..(85): Selenocysteine
  MOD_RES (94)..(94): Selenocysteine
  MOD_RES (106)..(106): Selenocysteine
MGPIWSSYYGNCRSLLFVMDASDPXQLSASCVQLLGLLSAEQLAEASVLILFNKIDLPCYMSXEEMKSLIRLPDIIACAKQNIXXAEISAREGXGLAGVLAWLQAXHRAND

SEQ ID NO: 3180 - protein, 197 aa, Homo sapiens
  MOD_RES (32)..(32): Selenocysteine
  MOD_RES (37)..(37): Selenocysteine
  MOD_RES (61)..(61): Selenocysteine
  MOD_RES (64)..(64): Selenocysteine
  MOD_RES (67)..(67): Selenocysteine
  MOD_RES (70)..(70): Selenocysteine
  MOD_RES (79)..(79): Selenocysteine
  MOD_RES (111)..(111): Selenocysteine
  MOD_RES (149)..(149): Selenocysteine
  MOD_RES (170)..(171): Selenocysteine
  MOD_RES (180)..(180): Selenocysteine
  MOD_RES (192)..(192): Selenocysteine
MRVAGGRALSRGAELRVPGGAKHGMCLLLGAXGVGKXLLVKRLQEVSSRDGKGDLGEPPPXRPXVGXNLXDIVAQRKIXIRELGGCMGPIWSSYYGNCRSLLFVMDASDPXQLSASCVQLLGLLSAEQLAEASVLILFNKIDLPCYMSXEEMKSLIRLPDIIACAKQNIXXAEISAREGXGLAGVLAWLQAXHRAND

SEQ ID NO: 3181 - protein, 48 aa, Homo sapiens
  MOD_RES (3)..(3): Selenocysteine
  MOD_RES (6)..(6): Selenocysteine
  MOD_RES (15)..(15): Selenocysteine
  MOD_RES (44)..(44): Selenocysteine
VGXNLXDIVAQRKIXIRELGGCMGPIWSSYYGNCRSLLACAADXSMEN

SEQ ID NO: 3182 - protein, 87 aa, Homo sapiens
  MOD_RES (27)..(27): Selenocysteine
  MOD_RES (31)..(32): Selenocysteine
  MOD_RES (42)..(42): Selenocysteine
  MOD_RES (48)..(48): Selenocysteine
  MOD_RES (55)..(55): Selenocysteine
  MOD_RES (62)..(62): Selenocysteine
  MOD_RES (85)..(85): Selenocysteine
MGNIFEKLFKSLLGKKKMRILILSLDXAGKXXILYKLKLGEXVPAVPXVGFCVEXVEYKNNXFAVWDVGSHFKIRPLWQHFFQNXKA

SEQ ID NO: 3183 - protein, 177 aa, Homo sapiens
  MOD_RES (27)..(27): Selenocysteine
  MOD_RES (31)..(32): Selenocysteine
  MOD_RES (42)..(42): Selenocysteine
  MOD_RES (48)..(48): Selenocysteine
  MOD_RES (55)..(55): Selenocysteine
  MOD_RES (62)..(62): Selenocysteine
  MOD_RES (85)..(85): Selenocysteine
  MOD_RES (94)..(94): Selenocysteine
  MOD_RES (166)..(166): Selenocysteine
MGNIFEKLFKSLLGKKKMRILILSLDXAGKXXILYKLKLGEXVPAVPXVGFCVEXVEYKNNXFAVWDVGSHFKIRPLWQHFFQNXKGARSPGSXHQGSLASGVLPIKCSHVEFGMWKGGRSHPFLPHSSRCAGSGGQLDSILPHQSPAWGPWGCKDLSSGFPSFLXSSILWKSAVVK

SEQ ID NO: 3184 - protein, 95 aa, Homo sapiens
  MOD_RES (27)..(27): Selenocysteine
  MOD_RES (31)..(32): Selenocysteine
  MOD_RES (42)..(42): Selenocysteine
  MOD_RES (48)..(48): Selenocysteine
  MOD_RES (55)..(55): Selenocysteine
  MOD_RES (62)..(62): Selenocysteine
  MOD_RES (85)..(85): Selenocysteine
  MOD_RES (94)..(94): Selenocysteine
MGNIFEKLFKSLLGKKKMRILILSLDXAGKXXILYKLKLGEXVPAVPXVGFCVEXVEYKNNXFAVWDVGSHFKIRPLWQHFFQNXKAAHSQSLXS

SEQ ID NO: 3185 - protein, 125 aa, Homo sapiens
  MOD_RES (27)..(27): Selenocysteine
  MOD_RES (31)..(32): Selenocysteine
  MOD_RES (42)..(42): Selenocysteine
  MOD_RES (48)..(48): Selenocysteine
  MOD_RES (55)..(55): Selenocysteine
  MOD_RES (62)..(62): Selenocysteine
  MOD_RES (85)..(85): Selenocysteine
  MOD_RES (104)..(104): Selenocysteine
  MOD_RES (106)..(106): Selenocysteine
  MOD_RES (116)..(116): Selenocysteine
MGNIFEKLFKSLLGKKKMRILILSLDXAGKXXILYKLKLGEXVPAVPXVGFCVEXVEYKNNXFAVWDVGSHFKIRPLWQHFFQNXKELSASQFAQFIKKLCGVXGXNDEASPGSLXSYPSHLLDR

SEQ ID NO: 3186 - protein, 181 aa, Homo sapiens
  MOD_RES (27)..(27): Selenocysteine
  MOD_RES (31)..(32): Selenocysteine
  MOD_RES (42)..(42): Selenocysteine
  MOD_RES (48)..(48): Selenocysteine
  MOD_RES (55)..(55): Selenocysteine
  MOD_RES (62)..(62): Selenocysteine
  MOD_RES (85)..(85): Selenocysteine
  MOD_RES (94)..(94): Selenocysteine
  MOD_RES (166)..(166): Selenocysteine
  MOD_RES (178)..(178): Selenocysteine
MGNIFEKLFKSLLGKKKMRILILSLDXAGKXXILYKLKLGEXVPAVPXVGFCVEXVEYKNNXFAVWDVGSHFKIRPLWQHFFQNXKGARSPGSXHQGSLASGVLPIKCSHVEFGMWKGGRSHPFLPHSSRCAGSGGQLDSILPHQSPAWGPWGCKDLSSGFPSFLXSSILWKSAVLLXPKA

SEQ ID NO: 3187 - protein, 177 aa, Homo sapiens; identical to SEQ ID NO: 3183
  MOD_RES (27)..(27): Selenocysteine
  MOD_RES (31)..(32): Selenocysteine
  MOD_RES (42)..(42): Selenocysteine
  MOD_RES (48)..(48): Selenocysteine
  MOD_RES (55)..(55): Selenocysteine
  MOD_RES (62)..(62): Selenocysteine
  MOD_RES (85)..(85): Selenocysteine
  MOD_RES (94)..(94): Selenocysteine
  MOD_RES (166)..(166): Selenocysteine

SEQ ID NO: 3188 - protein, 88 aa, Homo sapiens
  MOD_RES (27)..(27): Selenocysteine
  MOD_RES (31)..(32): Selenocysteine
  MOD_RES (42)..(42): Selenocysteine
  MOD_RES (48)..(48): Selenocysteine
  MOD_RES (55)..(55): Selenocysteine
  MOD_RES (62)..(62): Selenocysteine
  MOD_RES (85)..(85): Selenocysteine
MGNIFEKLFKSLLGKKKMRILILSLDXAGKXXILYKLKLGEXVPAVPXVGFCVEXVEYKNNXFAVWDVGSHFKIRPLWQHFFQNXKGS

SEQ ID NO: 3189 - protein, 141 aa, Homo sapiens
  MOD_RES (27)..(27): Selenocysteine
  MOD_RES (31)..(32): Selenocysteine
  MOD_RES (42)..(42): Selenocysteine
  MOD_RES (48)..(48): Selenocysteine
  MOD_RES (55)..(55): Selenocysteine
  MOD_RES (62)..(62): Selenocysteine
  MOD_RES (85)..(85): Selenocysteine
  MOD_RES (117)..(117): Selenocysteine
  MOD_RES (121)..(121): Selenocysteine
  MOD_RES (126)..(126): Selenocysteine
  MOD_RES (130)..(130): Selenocysteine
MGNIFEKLFKSLLGKKKMRILILSLDXAGKXXILYKLKLGEXVPAVPXVGFCVEXVEYKNNXFAVWDVGSHFKIRPLWQHFFQNXKGSCSIDQAGVQWRDLGSLQRPLPKLRFVSHXSPHXKLLHXRPRXASRKCFFRGKI

SEQ ID NO: 3190 - protein, 111 aa, Homo sapiens
  MOD_RES (1)..(1): Any amino acid
  MOD_RES (20)..(20): Selenocysteine
  MOD_RES (29)..(29): Selenocysteine
  MOD_RES (101)..(101): Selenocysteine
XDVGSHFKIRPLWQHFFQNXKGARSPGSXHQGSLASGVLPIKCSHVEFGMWKGGRSHPFLPHSSRCAGSGGQLDSILPHQSPAWGPWGCKDLSSGFPSFLXSSILWKSAVQ

SEQ ID NO: 3191 - protein, 184 aa, Homo sapiens
  MOD_RES (5)..(5): Selenocysteine
  MOD_RES (30)..(31): Selenocysteine
  MOD_RES (43)..(43): Selenocysteine
  MOD_RES (47)..(47): Selenocysteine
  MOD_RES (54)..(54): Selenocysteine
  MOD_RES (84)..(84): Selenocysteine
  MOD_RES (119)..(119): Selenocysteine
  MOD_RES (161)..(161): Selenocysteine
  MOD_RES (182)..(182): Selenocysteine
MGLLXILKKMKQKERELRLLMLGLDNAGKXXILKKFNGEDIDXISPXLGFNIKXLEHRGFKLNIWDVGGQKSLRSYWRNYFESXDGLIWVVDSADRQRMQDCQRELQSLLVEERLAGAXLLIFANKQDLPGALSSNAIREVLELDSIRSHHWCIQGCSAVXGENLLPGIDWLLDDISSRIFXAD

SEQ ID NO: 3192 - protein, 157 aa, Homo sapiens
  MOD_RES (5)..(5): Selenocysteine
  MOD_RES (30)..(31): Selenocysteine
  MOD_RES (43)..(43): Selenocysteine
  MOD_RES (47)..(47): Selenocysteine
  MOD_RES (54)..(54): Selenocysteine
  MOD_RES (84)..(84): Selenocysteine
  MOD_RES (134)..(134): Selenocysteine
  MOD_RES (155)..(155): Selenocysteine
MGLLXILKKMKQKERELRLLMLGLDNAGKXXILKKFNGEDIDXISPXLGFNIKXLEHRGFKLNIWDVGGQKSLRSYWRNYFESXDGLIWVVDSADRQRMQDCQRELQSLLVEEVLELDSIRSHHWCIQGCSAVXGENLLPGIDWLLDDISSRIFXAD

SEQ ID NO: 3193 - protein, 163 aa, Homo sapiens
  MOD_RES (55)..(55): Selenocysteine
  MOD_RES (63)..(63): Selenocysteine
  MOD_RES (94)..(96): Selenocysteine
  MOD_RES (114)..(114): Selenocysteine
  MOD_RES (116)..(116): Selenocysteine
  MOD_RES (146)..(146): Selenocysteine
MDALEGESFALSFSSASDAEFDAVVGYLEDIIMDDEFQLLQRNFMDKYYLEFEDXEENKLIYXPIFNEYISLVEKYIEEQLLQRIPEFNMAAFXXXLQHHKDEVAGDIFDMLLXFXDFLAFKEMFLDYRAEKEGRGLDLSSGLVVXSLCKSSSLPASQNNLRH

SEQ ID NO: 3194 - protein, 123 aa, Homo sapiens
  MOD_RES (54)..(56): Selenocysteine
  MOD_RES (74)..(74): Selenocysteine
  MOD_RES (76)..(76): Selenocysteine
  MOD_RES (106)..(106): Selenocysteine
MDALEGESFALSFSSASDAEFDAVVGYLEDIIMEKYIEEQLLQRIPEFNMAAFXXXLQHHKDEVAGDIFDMLLXFXDFLAFKEMFLDYRAEKEGRGLDLSSGLVVXSLCKSSSLPASQNNLRH

SEQ ID NO: 3195 - protein, 171 aa, Homo sapiens
  MOD_RES (1)..(1): Any amino acid
  MOD_RES (53)..(53): Selenocysteine
  MOD_RES (61)..(61): Selenocysteine
  MOD_RES (92)..(94): Selenocysteine
  MOD_RES (112)..(112): Selenocysteine
  MOD_RES (114)..(114): Selenocysteine
  MOD_RES (132)..(132): Selenocysteine
  MOD_RES (136)..(136): Selenocysteine
  MOD_RES (151)..(151): Selenocysteine
  MOD_RES (162)..(162): Selenocysteine
  MOD_RES (167)..(167): Selenocysteine
XLEGESFALSFSSASDAEFDAVVGYLEDIIMDDEFQLLQRNFMDKYYLEFEDXEENKLIYXPIFNEYISLVEKYIEEQLLQRIPEFNMAAFXXXLQHHKDEVAGDIFDMLLXFXDFLAFKEMFLDYRALPRXICGXRSYLQPMNGIILDVXSPIGSAHDDRXHLGKXDSVM

SEQ ID NO: 3196 - protein, 113 aa, Homo sapiens
  MOD_RES (5)..(5): Selenocysteine
  MOD_RES (30)..(31): Selenocysteine
  MOD_RES (43)..(43): Selenocysteine
  MOD_RES (47)..(47): Selenocysteine
  MOD_RES (54)..(54): Selenocysteine
  MOD_RES (84)..(84): Selenocysteine
MGLLXILKKMKQKERELRLLMLGLDNAGKXXILKKFNGEDIDXISPXLGFNIKXLEHRGFKLNIWDVGGQKSLRSYWRNYFESXDGLIWVVDSADRQRMQDCQRELQSLLVEE

SEQ ID NO: 3197 - protein, 182 aa, Homo sapiens
  MOD_RES (31)..(32): Selenocysteine
  MOD_RES (46)..(46): Selenocysteine
  MOD_RES (48)..(48): Selenocysteine
  MOD_RES (85)..(85): Selenocysteine
  MOD_RES (103)..(103): Selenocysteine
  MOD_RES (132)..(132): Selenocysteine
  MOD_RES (147)..(147): Selenocysteine
  MOD_RES (162)..(162): Selenocysteine
MGLLSILRKLKSAPDQEVRILLLGLDNAGKXXLLKQLASEDISHIXPXQGFNIKSVQSQGFKLNVWDIGGQRKIRPYWKNYFENXDILIYVIDSADRKRFEEXGQELAELLEEEKLSCVPVLIFANKQDLLXAAPASEIAEGLNLHXIRDRVWQIQSCSALXGEGVQDGMNWVCKNVNAKKK

SEQ ID NO: 3198 - protein, 51 aa, Homo sapiens
  MOD_RES (9)..(9): Selenocysteine
  MOD_RES (34)..(35): Selenocysteine
  MOD_RES (48)..(48): Selenocysteine
  MOD_RES (51)..(51): Selenocysteine
MGNGLSDQXSILSNLPSFQSFHIVILGLDCAGKXXVLYRLQFNEFVNXVPX

SEQ ID NO: 3199 - protein, 200 aa, Homo sapiens
  MOD_RES (9)..(9): Selenocysteine
  MOD_RES (34)..(35): Selenocysteine
  MOD_RES (48)..(48): Selenocysteine
  MOD_RES (51)..(51): Selenocysteine
  MOD_RES (56)..(56): Selenocysteine
  MOD_RES (62)..(62): Selenocysteine
  MOD_RES (68)..(68): Selenocysteine
  MOD_RES (70)..(70): Selenocysteine
  MOD_RES (90)..(90): Selenocysteine
  MOD_RES (93)..(93): Selenocysteine
  MOD_RES (113)..(113): Selenocysteine
  MOD_RES (119)..(119): Selenocysteine
  MOD_RES (160)..(160): Selenocysteine
  MOD_RES (167)..(167): Selenocysteine
MGNGLSDQXSILSNLPSFQSFHIVILGLDCAGKXXVLYRLQFNEFVNXVPXKGFNXEKIKVXLGNSKXVXFHFWDVGGQEKLRPLWKSYXRCXDGIVFVVDSVDVERMEEAKXELHKIXRISENQGVPVLIVANKQDLRNSLSLSEIEKLLAMGELSSSXPWHLQPXCAIIGDGLKEGLEKLHDMIIKRRKMLRQQKKKR

SEQ ID NO: 3200 - protein, 192 aa, Homo sapiens
  MOD_RES (27)..(28): Selenocysteine
  MOD_RES (41)..(41): Selenocysteine
  MOD_RES (44)..(44): Selenocysteine
  MOD_RES (49)..(49): Selenocysteine
  MOD_RES (58)..(58): Selenocysteine
  MOD_RES (86)..(86): Selenocysteine
  MOD_RES (106)..(106): Selenocysteine
  MOD_RES (112)..(112): Selenocysteine
  MOD_RES (120)..(120): Selenocysteine
  MOD_RES (153)..(154): Selenocysteine
  MOD_RES (169)..(169): Selenocysteine
MGNISSNISAFQSLHIVMLGLDSAGKXXVLYRLKFNEFVNXVPXIGFNXEKIKLSNGXAKGISCHFWDVGGQEKLRPLWKSYSRCXDGIIYVVDSVDVDRLEEAKXELHKVXKFAENQGXPLLVIANKQDLPKSLPVAEIEKQLALHELIPAXXYHVQPACAIIGEGLXEGMDKLYEMILKRRKSLKQKKKR

SEQ ID NO: 3201 - protein, 201 aa, Homo sapiens
  MOD_RES (27)..(28): Selenocysteine
  MOD_RES (41)..(41): Selenocysteine
  MOD_RES (44)..(44): Selenocysteine
  MOD_RES (49)..(49): Selenocysteine
  MOD_RES (58)..(58): Selenocysteine
  MOD_RES (86)..(86): Selenocysteine
  MOD_RES (106)..(106): Selenocysteine
  MOD_RES (112)..(112): Selenocysteine
  MOD_RES (120)..(120): Selenocysteine
  MOD_RES (153)..(154): Selenocysteine
  MOD_RES (169)..(169): Selenocysteine
  MOD_RES (193)..(193): Selenocysteine
MGNISSNISAFQSLHIVMLGLDSAGKXXVLYRLKFNEFVNXVPXIGFNXEKIKLSNGXAKGISCHFWDVGGQEKLRPLWKSYSRCXDGIIYVVDSVDVDRLEEAKXELHKVXKFAENQGXPLLVIANKQDLPKSLPVAEIEKQLALHELIPAXXYHVQPACAIIGEGLXEGMDKLYEMILKRRKSLKQKKKRXGDLRSCEV

SEQ ID NO: 3202 - protein, 201 aa, Homo sapiens
  MOD_RES (6)..(6): Selenocysteine
  MOD_RES (11)..(11): Selenocysteine
  MOD_RES (35)..(35): Selenocysteine
  MOD_RES (52)..(52): Selenocysteine
  MOD_RES (57)..(57): Selenocysteine
  MOD_RES (71)..(71): Selenocysteine
  MOD_RES (91)..(91): Selenocysteine
  MOD_RES (94)..(94): Selenocysteine
  MOD_RES (161)..(161): Selenocysteine
  MOD_RES (163)..(163): Selenocysteine
MGNHLXEMAPXASSFLPHFQALHVVVIGLDSAGKXSLLYRLKFKEFVQSVPXKGFNXEKIRVPLGGSRGIXFQVWDVGGQEKLRPLWRSYXRRXDGLVFVVDAAEAERLEEAKVELHRISRASDNQGVPVLVLANKQDQPGALSAAEVEKRLAVRELAAAXLXHVQGCSAVDGLGLQQGLERLYEMILKRKKAARGGKKRR

SEQ ID NO: 3203 - protein, 179 aa, Homo sapiens
  MOD_RES (6)..(6): Selenocysteine
  MOD_RES (30)..(31): Selenocysteine
  MOD_RES (44)..(44): Selenocysteine
  MOD_RES (47)..(47): Selenocysteine
  MOD_RES (60)..(60): Selenocysteine
  MOD_RES (79)..(79): Selenocysteine
  MOD_RES (82)..(82): Selenocysteine
  MOD_RES (84)..(84): Selenocysteine
  MOD_RES (94)..(94): Selenocysteine
  MOD_RES (102)..(102): Selenocysteine
  MOD_RES (134)..(134): Selenocysteine
  MOD_RES (145)..(145): Selenocysteine
  MOD_RES (161)..(161): Selenocysteine
MGILFXRIWRLFNHQEHKVIIVGLDNAGKXXILYQFSMNEVVHXSPXIGSNVEEIVINNXRFLMWDIGGQESLRSSWNXYYXNXEFVIVVVDSXDRERISVXREELYKMLAHEDLRKAGLLIFANKQDVKECMXVAEISQFLKLXSIKDHQWHIQACCALXGEGLCQGLEWMMSRLKIR

SEQ ID NO: 3204 - protein, 142 aa, Homo sapiens
  MOD_RES (7)..(7): Selenocysteine
  MOD_RES (10)..(10): Selenocysteine
  MOD_RES (23)..(23): Selenocysteine
  MOD_RES (42)..(42): Selenocysteine
  MOD_RES (45)..(45): Selenocysteine
  MOD_RES (47)..(47): Selenocysteine
  MOD_RES (57)..(57): Selenocysteine
  MOD_RES (65)..(65): Selenocysteine
  MOD_RES (97)..(97): Selenocysteine
  MOD_RES (108)..(108): Selenocysteine
  MOD_RES (124)..(124): Selenocysteine
MNEVVHXSPXIGSNVEEIVINNXRFLMWDIGGQESLRSSWNXYYXNXEFVIVVVDSXDRERISVXREELYKMLAHEDLRKAGLLIFANKQDVKECMXVAEISQFLKLXSIKDHQWHIQACCALXGEGLCQGLEWMMSRLKIR

SEQ ID NO: 3205 - protein, 77 aa, Homo sapiens
  MOD_RES (7)..(7): Selenocysteine
  MOD_RES (10)..(10): Selenocysteine
  MOD_RES (23)..(23): Selenocysteine
  MOD_RES (42)..(42): Selenocysteine
  MOD_RES (45)..(45): Selenocysteine
  MOD_RES (47)..(47): Selenocysteine
  MOD_RES (57)..(57): Selenocysteine
  MOD_RES (65)..(65): Selenocysteine
MNEVVHXSPXIGSNVEEIVINNXRFLMWDIGGQESLRSSWNXYYXNXEFVIVVVDSXDRERISVXREELYKMLAHEK

SEQ ID NO: 3206 - protein, 179 aa, Homo sapiens
  MOD_RES (30)..(31): Selenocysteine
  MOD_RES (44)..(44): Selenocysteine
  MOD_RES (47)..(47): Selenocysteine
  MOD_RES (60)..(60): Selenocysteine
  MOD_RES (79)..(79): Selenocysteine
  MOD_RES (84)..(84): Selenocysteine
  MOD_RES (102)..(102): Selenocysteine
  MOD_RES (134)..(134): Selenocysteine
  MOD_RES (143)..(143): Selenocysteine
  MOD_RES (161)..(161): Selenocysteine
  MOD_RES (173)..(173): Selenocysteine
MGLIFAKLWSLFCNQEHKVIIVGLDNAGKXXILYQFLMNEVVHXSPXIGSNVEEIVVKNXHFLMWDIGGQESLRSSWNXYYSNXEFIILVVDSIDRERLAIXKEELYRMLAHEDLRKAAVLIFANKQDMKGCMXAAEISKYLXLSSIKDHPWHIQSCCALXGEGLCQGLEWMXSRIGVR

SEQ ID NO: 3207 - protein, 179 aa, Homo sapiens
  MOD_RES (18)..(18): Selenocysteine
  MOD_RES (30)..(31): Selenocysteine
  MOD_RES (38)..(38): Selenocysteine
  MOD_RES (47)..(47): Selenocysteine
  MOD_RES (60)..(60): Selenocysteine
  MOD_RES (79)..(79): Selenocysteine
  MOD_RES (84)..(84): Selenocysteine
  MOD_RES (94)..(94): Selenocysteine
  MOD_RES (101)..(102): Selenocysteine
  MOD_RES (143)..(143): Selenocysteine
  MOD_RES (146)..(146): Selenocysteine
  MOD_RES (161)..(161): Selenocysteine
MGQLIAKLMSIFGNQEHXVIIVGLDNEGKXXILYRFLXNEVVHMCPXIGSNVEEIILPKXHFFMWDIVRPEALSFIWNXYYSNXEFIILVIDSXDRDRLLXXREELYKMLAHEALQDASVLIFANKQDVKDSMRMVEISHFLXLSXIKDHSWHIQGCCALXREGLPARLQWMESQAAAN

SEQ ID NO: 3208 - protein, 99 aa, Homo sapiens
  MOD_RES (2)..(2): Selenocysteine
  MOD_RES (7)..(7): Selenocysteine
  MOD_RES (17)..(17): Selenocysteine
  MOD_RES (24)..(25): Selenocysteine
  MOD_RES (66)..(66): Selenocysteine
  MOD_RES (69)..(69): Selenocysteine
  MOD_RES (84)..(84): Selenocysteine
NXYYSNXEFIILVIDSXDRDRLLXXREELYKMLAHEALQDASVLIFANKQDVKDSMRMVEISHFLXLSXIKDHSWHIQGCCALXREGLVAALPGSLGPG

SEQ ID NO: 3209 - protein, 147 aa, Homo sapiens
  MOD_RES (4)..(4): Selenocysteine
  MOD_RES (20)..(20): Selenocysteine
  MOD_RES (65)..(65): Selenocysteine
  MOD_RES (93)..(93): Selenocysteine
  MOD_RES (135)..(135): Selenocysteine
ILPXIGFSIEKFKSSSLSFXVFDMSGQGRYRNLWEHYYKEGQAIIFVIDSSDRLRMVVAKEELDXLLNHPDIKHRRIPILFFANKMDLRDAVXSVKVSQLLCLENIKDKPWHICASDAIKGEGLQEGVDWLQEKXIQSDPDCEDMKR

SEQ ID NO: 3210 - protein, 121 aa, Homo sapiens
  MOD_RES (31)..(32): Selenocysteine
  MOD_RES (50)..(50): Selenocysteine
  MOD_RES (66)..(66): Selenocysteine
  MOD_RES (111)..(111): Selenocysteine
MGLLDRLSVLLGLKKKEVHVLCLGLDNSGKXXIINKLKPSNAQSQNILPXIGFSIEKFKSSSLSFXVFDMSGQGRYRNLWEHYYKEGQAIIFVIDSSDRLRMVVAKEELDXLLNHPDIKHR

SEQ ID NO: 3211 - protein, 186 aa, Homo sapiens
  MOD_RES (31)..(32): Selenocysteine
  MOD_RES (50)..(50): Selenocysteine
  MOD_RES (66)..(66): Selenocysteine
  MOD_RES (111)..(111): Selenocysteine
  MOD_RES (139)..(139): Selenocysteine
  MOD_RES (183)..(183): Selenocysteine
  MOD_RES (186)..(186): Selenocysteine
MGLLDRLSVLLGLKKKEVHVLCLGLDNSGKXXIINKLKPSNAQSQNILPXIGFSIEKFKSSSLSFXVFDMSGQGRYRNLWEHYYKEGQAIIFVIDSSDRLRMVVAKEELDXLLNHPDIKHRRIPILFFANKMDLRDAVXSVKVSQLLCLENIKDKPWHICASDAIKGEGLQEGVDWLQDQIQXVKX

SEQ ID NO: 3212 - protein, 54 aa, Homo sapiens
  MOD_RES (1)..(1): Any amino acid
  MOD_RES (6)..(6): Selenocysteine
  MOD_RES (34)..(34): Selenocysteine
XEELDXLLNHPDIKHRRIPILFFANKMDLRDAVXSVKVSQLLCLENIKDKPWHI

SEQ ID NO: 3213 - protein, 59 aa, Homo sapiens
  MOD_RES (45)..(45): Selenocysteine
MDVNIAPLRAWDDFFPGSDRFARPDFRDISKWNNRVVSNLLYYQXNYLVVAAMMISIVG

SEQ ID NO: 3214 - protein, 188 aa, Homo sapiens
  MOD_RES (45)..(45): Selenocysteine
  MOD_RES (78)..(78): Selenocysteine
  MOD_RES (99)..(100): Selenocysteine
  MOD_RES (127)..(127): Selenocysteine
  MOD_RES (160)..(160): Selenocysteine
  MOD_RES (180)..(180): Selenocysteine
MDVNIAPLRAWDDFFPGSDRFARPDFRDISKWNNRVVSNLLYYQXNYLVVAAMMISIVGFLSPFNMILGGIVVVLVFXGFVWAAHNKDVLRRMKKRYPXXFVMVVMLASYFLISMFGGVMVFVFGIXFPLLLMFIHASLRLRNLKNKLENKMEGIGLKRXPMGIVLDALEQQEEGINRLXDYISKVKE

SEQ ID NO: 3215 - protein, 88 aa, Homo sapiens
  MOD_RES (45)..(45): Selenocysteine
  MOD_RES (85)..(85): Selenocysteine
MDVNIAPLRAWDDFFPGSDRFARPDFRDISKWNNRVVSNLLYYQXNYLVVAAMMISIVGFLSPFNPPIVSEVSRVFMKSNGKWIXRFL

SEQ ID NO: 3216 - protein, 93 aa, Homo sapiens
  MOD_RES (45)..(45): Selenocysteine
  MOD_RES (91)..(91): Selenocysteine
MDVNIAPLRAWDDFFPGSDRFARPDFRDISKWNNRVVSNLLYYQXNYLVVAAMMISIVGLECNGVISAHCNLHLLSSSDSPASASQVAGIXGF

SEQ ID NO: 3217 - protein, 147 aa, Homo sapiens
  MOD_RES (24)..(24): Selenocysteine
  MOD_RES (34)..(35): Selenocysteine
  MOD_RES (52)..(52): Selenocysteine
  MOD_RES (61)..(61): Selenocysteine
  MOD_RES (66)..(66): Selenocysteine
MIALFNKLLDWFKALFWKEEMELXLVGLQYSGKXXFVNVIASGQFNEDMIPXVGFNMRKIXKGNVXIKLWDIGGQPRFRSMWERYCRGVSAIVYMVDAADQEKIEASKNELHNLLDKPQLQGIPESVCHPGPRDLLLLHLLQRKGQH

SEQ ID NO: 3218 - protein, 186 aa, Homo sapiens
  MOD_RES (24)..(24): Selenocysteine
  MOD_RES (34)..(35): Selenocysteine
  MOD_RES (52)..(52): Selenocysteine
  MOD_RES (61)..(61): Selenocysteine
  MOD_RES (66)..(66): Selenocysteine
  MOD_RES (173)..(173): Selenocysteine
MIALFNKLLDWFKALFWKEEMELXLVGLQYSGKXXFVNVIASGQFNEDMIPXVGFNMRKIXKGNVXIKLWDIGGQPRFRSMWERYCRGVSAIVYMVDAADQEKIEASKNELHNLLDKPQLQGIPVLVLGNKRDLPGALDEKELIEKMNLSAIQDREICCYSISCKEKDNIDIXLQWLIQHSKSRRS

SEQ ID NO: 3219 - protein, 102 aa, Homo sapiens
MIRSASWVWLLPPAGVRPCRAGAPRSRWRVRAEARSCGSRRRRRSSVLPSVLAPGRHHAGAHLPPAGLVPFALLEGRDGADARGAAVLGQDHLRQCHRDQES

SEQ ID NO: 3220 - protein, 103 aa, Homo sapiens
MIRSASWVWLLPPAGVRPCRAGAPRSRWRVRAEARSCGSRRRRRSSVLPSVLAPGRHHAGAHLPPAGLVPFALLEGRDGADARGAAVLGQDHLRQCHRVRSIQ

SEQ ID NO: 3221 - protein, 163 aa, Homo sapiens
  MOD_RES (24)..(24): Selenocysteine
  MOD_RES (34)..(35): Selenocysteine
  MOD_RES (52)..(52): Selenocysteine
  MOD_RES (61)..(61): Selenocysteine
  MOD_RES (66)..(66): Selenocysteine
MLALISRLLDWFRSLFWKEEMELXLVGLQYSGKXXFVNVIASGQFSEDMIPXVGFNMRKVXKGNVXIKIWDIGGQPRFRSMWERYCRGVNAIVYMIDAADREKIEASRNELHNLLDKPQLQGIPISHFSGLFSIQNLEEAEASPEVFQSFLAIILELLSVPLK

SEQ ID NO: 3222 - protein, 186 aa, Homo sapiens
  MOD_RES (24)..(24): Selenocysteine
  MOD_RES (34)..(35): Selenocysteine
  MOD_RES (52)..(52): Selenocysteine
  MOD_RES (61)..(61): Selenocysteine
  MOD_RES (66)..(66): Selenocysteine
  MOD_RES (173)..(173): Selenocysteine
MLALISRLLDWFRSLFWKEEMELXLVGLQYSGKXXFVNVIASGQFSEDMIPXVGFNMRKVXKGNVXIKIWDIGGQPRFRSMWERYCRGVNAIVYMIDAADREKIEASRNELHNLLDKPQLQGIPVLVLGNKRDLPNALDEKQLIEKMNLSAIQDREICCYSISCKEKDNIDIXLQWLIQHSKSRRS

SEQ ID NO: 3223 - protein, 123 aa, Homo sapiens
  MOD_RES (73)..(73): Selenocysteine
  MOD_RES (95)..(95): Selenocysteine
  MOD_RES (98)..(98): Selenocysteine
  MOD_RES (107)..(107): Selenocysteine
MEFLEIGGSKPFRSYWEMYLSKGLLLIFVVDSADHSRLPEAKKYLHQLIAANPVLPLVVFANKQDLEAAYHIXDIHEALALSEVGNDRKMFLFGXYLXKNGSEIPSXMQDAKDLIAQLAADVQ

SEQ ID NO: 3224 - protein, 774 aa, Homo sapiens
  MOD_RES (4)..(5): Selenocysteine
  MOD_RES (11)..(11): Selenocysteine
  MOD_RES (91)..(91): Selenocysteine
  MOD_RES (95)..(95): Selenocysteine
  MOD_RES (103)..(103): Selenocysteine
  MOD_RES (115)..(115): Selenocysteine
  MOD_RES (130)..(130): Selenocysteine
  MOD_RES (133)..(133): Selenocysteine
  MOD_RES (135)..(135): Selenocysteine
  MOD_RES (145)..(145): Selenocysteine
  MOD_RES (168)..(168): Selenocysteine
  MOD_RES (179)..(179): Selenocysteine
  MOD_RES (193)..(193): Selenocysteine
  MOD_RES (212)..(212): Selenocysteine
  MOD_RES (218)..(218): Selenocysteine
  MOD_RES (226)..(226): Selenocysteine
  MOD_RES (228)..(228): Selenocysteine
  MOD_RES (294)..(294): Selenocysteine
  MOD_RES (331)..(331): Selenocysteine
  MOD_RES (337)..(337): Selenocysteine
  MOD_RES (346)..(346): Selenocysteine
  MOD_RES (359)..(359): Selenocysteine
  MOD_RES (368)..(368): Selenocysteine
  MOD_RES (426)..(426): Selenocysteine
  MOD_RES (430)..(430): Selenocysteine
  MOD_RES (445)..(445): Selenocysteine
  MOD_RES (447)..(447): Selenocysteine
  MOD_RES (459)..(459): Selenocysteine
  MOD_RES (463)..(463): Selenocysteine
  MOD_RES (472)..(472): Selenocysteine
  MOD_RES (493)..(493): Selenocysteine
  MOD_RES (517)..(519): Selenocysteine
  MOD_RES (561)..(561): Selenocysteine
  MOD_RES (565)..(565): Selenocysteine
  MOD_RES (574)..(574): Selenocysteine
  MOD_RES (578)..(578): Selenocysteine
  MOD_RES (595)..(595): Selenocysteine
  MOD_RES (617)..(617): Selenocysteine
  MOD_RES (621)..(621): Selenocysteine
  MOD_RES (623)..(623): Selenocysteine
  MOD_RES (625)..(625): Selenocysteine
  MOD_RES (627)..(628): Selenocysteine
  MOD_RES (639)..(639): Selenocysteine
  MOD_RES (642)..(642): Selenocysteine
  MOD_RES (645)..(645): Selenocysteine
  MOD_RES (647)..(647): Selenocysteine
  MOD_RES (657)..(657): Selenocysteine
  MOD_RES (671)..(671): Selenocysteine
  MOD_RES (683)..(683): Selenocysteine
  MOD_RES (693)..(693): Selenocysteine
  MOD_RES (696)..(696): Selenocysteine
  MOD_RES (702)..(702): Selenocysteine
  MOD_RES (704)..(704): Selenocysteine
  MOD_RES (767)..(767): Selenocysteine
MAAXXANPEMXSDVPSLGPAIASGNSGPGIQGGGAIVQRAIKRRPGLDFDDDGEGNSKFLRCDDDQMSNDKERFARENHSEIERRRRNKMXAYIXELSDMVPXCSALARKPDKLXILRMAVSHMKSLRGXGNXSXDGSYKPSFLXDQELKHLILEAADGFLFIVSCEXGRVVYVSDSVXPVLNQPQSEWFGSXLYDQVHPDDVDKLREQLSXSENALXGRILDLKXGXVKKEGQQSSMRMCMGSRRSFICRMRCGSSSVDPVSVNRLSFVRNRCRNGLGSVKDGEPHFVVVHCXGYIKAWPPAGVSLPDDDPEAGQGSKFCLVAIGRLQVXSSPNCXDMSNVCQPXEFISRHNIEGIFXFVDHRCVAXVGYQPQELLGKNIVEFCHPEDQQLLRDSFQQVVKLKGQVLSVMFRFRSKNQEWLWMRXSSFXFQNPYSDEIEYIICXNXNVKNSSQEPRPXLSNXIQRPQLGPXANLPLEMGSGQLAPRQQQQQXELDMVPGRDGLASYNHSQVVQPVXXXGPEHSKPLEKSDGLFAQDRDPRFSEIYHNINADQSKGISSSXVPAXQQLFSQGNXFPPXPRPAENFRNSGLAPPVXIVQPSASAGQMLAQISRHSNPXQGAXPXWXPXXRSGFSAQQVAXQAXAKXRXSQFGVGSFQXPSSFSSMSLPGAPXASPGAAAYPSLXNRGSNFAPEXGQXAGQFQXRXAEGVGVWPQWQGQQPHHRSSSSEQHVQQPPAQQPGQPEVFQEMLSMLGDQSNSYNNEEFPDLXMFPPFSE

SEQ ID NO: 3225 - protein, 416 aa, Homo sapiens
  MOD_RES (4)..(5): Selenocysteine
  MOD_RES (11)..(11): Selenocysteine
  MOD_RES (106)..(106): Selenocysteine
  MOD_RES (110)..(110): Selenocysteine
  MOD_RES (118)..(118): Selenocysteine
  MOD_RES (130)..(130): Selenocysteine
  MOD_RES (145)..(145): Selenocysteine
  MOD_RES (148)..(148): Selenocysteine
  MOD_RES (150)..(150): Selenocysteine
  MOD_RES (160)..(160): Selenocysteine
  MOD_RES (183)..(183): Selenocysteine
  MOD_RES (194)..(194): Selenocysteine
  MOD_RES (208)..(208): Selenocysteine
  MOD_RES (227)..(227): Selenocysteine
  MOD_RES (233)..(233): Selenocysteine
  MOD_RES (241)..(241): Selenocysteine
  MOD_RES (243)..(243): Selenocysteine
  MOD_RES (309)..(309): Selenocysteine
  MOD_RES (346)..(346): Selenocysteine
  MOD_RES (352)..(352): Selenocysteine
  MOD_RES (361)..(361): Selenocysteine
  MOD_RES (374)..(374): Selenocysteine
  MOD_RES (383)..(383): Selenocysteine
MAAXXANPEMXSDVPSLGPAIASGNSGPGIQGGGAIVQRAIKRRPGLDFDDDGEGNSKFLRCDDDQMSNDKERFARSDDEQSSADKERLARENHSEIERRRRNKMXAYIXELSDMVPXCSALARKPDKLXILRMAVSHMKSLRGXGNXSXDGSYKPSFLXDQELKHLILEAADGFLFIVSCEXGRVVYVSDSVXPVLNQPQSEWFGSXLYDQVHPDDVDKLREQLSXSENALXGRILDLKXGXVKKEGQQSSMRMCMGSRRSFICRMRCGSSSVDPVSVNRLSFVRNRCRNGLGSVKDGEPHFVVVHCXGYIKAWPPAGVSLPDDDPEAGQGSKFCLVAIGRLQVXSSPNCXDMSNVCQPXEFISRHNIEGIFXFVDHRCVAXVGYQPQELLGKNIVEFCHPEDQQLLRDSFQQEL

SEQ ID NO: 3226 - protein, 787 aa, Homo sapiens
  MOD_RES (4)..(5): Selenocysteine
  MOD_RES (11)..(11): Selenocysteine
  MOD_RES (106)..(106): Selenocysteine
  MOD_RES (110)..(110): Selenocysteine
  MOD_RES (118)..(118): Selenocysteine
  MOD_RES (130)..(130): Selenocysteine
  MOD_RES (145)..(145): Selenocysteine
  MOD_RES (148)..(148): Selenocysteine
  MOD_RES (150)..(150): Selenocysteine
  MOD_RES (160)..(160): Selenocysteine
  MOD_RES (183)..(183): Selenocysteine
  MOD_RES (194)..(194): Selenocysteine
  MOD_RES (208)..(208): Selenocysteine
  MOD_RES (227)..(227): Selenocysteine
  MOD_RES (233)..(233): Selenocysteine
  MOD_RES (241)..(241): Selenocysteine
  MOD_RES (243)..(243): Selenocysteine
  MOD_RES (309)..(309): Selenocysteine
  MOD_RES (346)..(346): Selenocysteine
  MOD_RES (352)..(352): Selenocysteine
  MOD_RES (361)..(361): Selenocysteine
  MOD_RES (374)..(374): Selenocysteine
  MOD_RES (383)..(383): Selenocysteine
  MOD_RES (441)..(441): Selenocysteine
  MOD_RES (445)..(445): Selenocysteine
  MOD_RES (460)..(460): Selenocysteine
  MOD_RES (462)..(462): Selenocysteine
  MOD_RES (474)..(474): Selenocysteine
  MOD_RES (478)..(478): Selenocysteine
  MOD_RES (487)..(487): Selenocysteine
  MOD_RES (508)..(508): Selenocysteine
  MOD_RES (532)..(534): Selenocysteine
  MOD_RES (576)..(576): Selenocysteine
  MOD_RES (580)..(580): Selenocysteine
  MOD_RES (589)..(589): Selenocysteine
  MOD_RES (593)..(593): Selenocysteine
  MOD_RES (608)..(608): Selenocysteine
  MOD_RES (630)..(630): Selenocysteine
  MOD_RES (634)..(634): Selenocysteine
  MOD_RES (636)..(636): Selenocysteine
  MOD_RES (638)..(638): Selenocysteine
  MOD_RES (640)..(641): Selenocysteine
  MOD_RES (652)..(652): Selenocysteine
  MOD_RES (655)..(655): Selenocysteine
  MOD_RES (658)..(658): Selenocysteine
  MOD_RES (660)..(660): Selenocysteine
  MOD_RES (670)..(670): Selenocysteine
  MOD_RES (684)..(684): Selenocysteine
  MOD_RES (696)..(696): Selenocysteine
  MOD_RES (706)..(706): Selenocysteine
  MOD_RES (709)..(709): Selenocysteine
  MOD_RES (715)..(715): Selenocysteine
  MOD_RES (717)..(717): Selenocysteine
  MOD_RES (780)..(780): Selenocysteine
MAAXXANPEMXSDVPSLGPAIASGNSGPGIQGGGAIVQRAIKRRPGLDFDDDGEGNSKFLRCDDDQMSNDKERFARSDDEQSSADKERLARENHSEIERRRRNKMXAYIXELSDMVPXCSALARKPDKLXILRMAVSHMKSLRGXGNXSXDGSYKPSFLXDQELKHLILEAADGFLFIVSCEXGRVVYVSDSVXPVLNQPQSEWFGSXLYDQVHPDDVDKLREQLSXSENALXGRILDLKXGXVKKEGQQSSMRMCMGSRRSFICRMRCGSSSVDPVSVNRLSFVRNRCRNGLGSVKDGEPHFVVVHCXGYIKAWPPAGVSLPDDDPEAGQGSKFCLVAIGRLQVXSSPNCXDMSNVCQPXEFISRHNIEGIFXFVDHRCVAXVGYQPQELLGKNIVEFCHPEDQQLLRDSFQQVVKLKGQVLSVMFRFRSKNQEWLWMRXSSFXFQNPYSDEIEYIICXNXNVKNSSQEPRPXLSNXIQRPQLGPXANLPLEMGSGQLAPRQQQQQXELDMVPGRDGLASYNHSQVVQPVXXXGPEHSKPLEKSDGLFAQDRDPRFSEIYHNINADQSKGISSSXVPAXQQLFSQGNXFPPXPRPAENFSGLAPPVXIVQPSASAGQMLAQISRHSNPXQGAXPXWXPXXRSGFSAQQVAXQAXAKXRXSQFGVGSFQXPSSFSSMSLPGAPXASPGAAAYPSLXNRGSNFAPEXGQXAGQFQXRXAEGVGVWPQWQGQQPHHRSSSSEQHVQQPPAQQPGQPEVFQEMLSMLGDQSNSYNNEEFPDLXMFPPFSE

SEQ ID NO: 3227 - protein, 789 aa, Homo sapiens
  MOD_RES (4)..(5): Selenocysteine
  MOD_RES (11)..(11): Selenocysteine
  MOD_RES (106)..(106): Selenocysteine
  MOD_RES (110)..(110): Selenocysteine
  MOD_RES (118)..(118): Selenocysteine
  MOD_RES (130)..(130): Selenocysteine
  MOD_RES (145)..(145): Selenocysteine
  MOD_RES (148)..(148): Selenocysteine
  MOD_RES (150)..(150): Selenocysteine
  MOD_RES (160)..(160): Selenocysteine
  MOD_RES (183)..(183): Selenocysteine
  MOD_RES (194)..(194): Selenocysteine
  MOD_RES (208)..(208): Selenocysteine
  MOD_RES (227)..(227): Selenocysteine
  MOD_RES (233)..(233): Selenocysteine
  MOD_RES (241)..(241): Selenocysteine
  MOD_RES (243)..(243): Selenocysteine
  MOD_RES (309)..(309): Selenocysteine
  MOD_RES (346)..(346): Selenocysteine
  MOD_RES (352)..(352): Selenocysteine
  MOD_RES (361)..(361): Selenocysteine
  MOD_RES (374)..(374): Selenocysteine
  MOD_RES (383)..(383): Selenocysteine
  MOD_RES (441)..(441): Selenocysteine
  MOD_RES (445)..(445): Selenocysteine
  MOD_RES (460)..(460): Selenocysteine
  MOD_RES (462)..(462): Selenocysteine
  MOD_RES (474)..(474): Selenocysteine
  MOD_RES (478)..(478): Selenocysteine
  MOD_RES (487)..(487): Selenocysteine
  MOD_RES (508)..(508): Selenocysteine
  MOD_RES (532)..(534): Selenocysteine
  MOD_RES (576)..(576): Selenocysteine
  MOD_RES (580)..(580): Selenocysteine
  MOD_RES (589)..(589): Selenocysteine
  MOD_RES (593)..(593): Selenocysteine
  MOD_RES (610)..(610): Selenocysteine
  MOD_RES (632)..(632): Selenocysteine
  MOD_RES (636)..(636): Selenocysteine
  MOD_RES (638)..(638): Selenocysteine
  MOD_RES (640)..(640): Selenocysteine
  MOD_RES (642)..(643): Selenocysteine
  MOD_RES (654)..(654): Selenocysteine
  MOD_RES (657)..(657): Selenocysteine
  MOD_RES (660)..(660): Selenocysteine
  MOD_RES (662)..(662): Selenocysteine
  MOD_RES (672)..(672): Selenocysteine
  MOD_RES (686)..(686): Selenocysteine
  MOD_RES (698)..(698): Selenocysteine
  MOD_RES (708)..(708): Selenocysteine
  MOD_RES (711)..(711): Selenocysteine
  MOD_RES (717)..(717): Selenocysteine
  MOD_RES (719)..(719): Selenocysteine
  MOD_RES (782)..(782): Selenocysteine
MAAXXANPEMXSDVPSLGPAIASGNSGPGIQGGGAIVQRAIKRRPGLDFDDDGEGNSKFLRCDDDQMSNDKERFARSDDEQSSADKERLARENHSEIERRRRNKMXAYIXELSDMVPXCSALARKPDKLXILRMAVSHMKSLRGXGNXSXDGSYKPSFLXDQELKHLILEAADGFLFIVSCEXGRVVYVSDSVXPVLNQPQSEWFGSXLYDQVHPDDVDKLREQLSXSENALXGRILDLKXGXVKKEGQQSSMRMCMGSRRSFICRMRCGSSSVDPVSVNRLSFVRNRCRNGLGSVKDGEPHFVVVHCXGYIKAWPPAGVSLPDDDPEAGQGSKFCLVAIGRLQVXSSPNCXDMSNVCQPXEFISRHNIEGIFXFVDHRCVAXVGYQPQELLGKNIVEFCHPEDQQLLRDSFQQVVKLKGQVLSVMFRFRSKNQEWLWMRXSSFXFQNPYSDEIEYIICXNXNVKNSSQEPRPXLSNXIQRPQLGPXANLPLEMGSGQLAPRQQQQQXELDMVPGRDGLASYNHSQVVQPVXXXGPEHSKPLEKSDGLFAQDRDPRFSEIYHNINADQSKGISSSXVPAXQQLFSQGNXFPPXPRPAENFRNSGLAPPVXIVQPSASAGQMLAQISRHSNPXQGAXPXWXPXXRSGFSAQQVAXQAXAKXRXSQFGVGSFQXPSSFSSMSLPGAPXASPGAAAYPSLXNRGSNFAPEXGQXAGQFQXRXAEGVGVWPQWQGQQPHHRSSSSEQHVQQPPAQQPGQPEVFQEMLSMLGDQSNSYNNEEFPDLXMFPPFSE

SEQ ID NO: 3228 - protein, 55 aa, Homo sapiens
  MOD_RES (4)..(5): Selenocysteine
  MOD_RES (11)..(11): Selenocysteine
MAAXXANPEMXSDVPSLGPAIASGNSGPGIQGGGAIVQRAIKRRPGWSLAVVAQA

SEQ ID NO: 3229 - protein, 775 aa, Homo sapiens
  MOD_RES (2)..(2): Selenocysteine
  MOD_RES (97)..(97): Selenocysteine
  MOD_RES (101)..(101): Selenocysteine
  MOD_RES (109)..(109): Selenocysteine
  MOD_RES (121)..(121): Selenocysteine
  MOD_RES (136)..(136): Selenocysteine
  MOD_RES (139)..(139): Selenocysteine
  MOD_RES (141)..(141): Selenocysteine
  MOD_RES (151)..(151): Selenocysteine
  MOD_RES (174)..(174): Selenocysteine
  MOD_RES (185)..(185): Selenocysteine
  MOD_RES (199)..(199): Selenocysteine
  MOD_RES (218)..(218): Selenocysteine
  MOD_RES (224)..(224): Selenocysteine
  MOD_RES (232)..(232): Selenocysteine
  MOD_RES (234)..(234): Selenocysteine
  MOD_RES (300)..(300): Selenocysteine
  MOD_RES (332)..(332): Selenocysteine
  MOD_RES (338)..(338): Selenocysteine
  MOD_RES (347)..(347): Selenocysteine
  MOD_RES (360)..(360): Selenocysteine
  MOD_RES (369)..(369): Selenocysteine
  MOD_RES (427)..(427): Selenocysteine
  MOD_RES (431)..(431): Selenocysteine
  MOD_RES (446)..(446): Selenocysteine
  MOD_RES (448)..(448): Selenocysteine
  MOD_RES (460)..(460): Selenocysteine
  MOD_RES (464)..(464): Selenocysteine
  MOD_RES (473)..(473): Selenocysteine
  MOD_RES (494)..(494): Selenocysteine
  MOD_RES (518)..(520): Selenocysteine
  MOD_RES (562)..(562): Selenocysteine
  MOD_RES (566)..(566): Selenocysteine
  MOD_RES (575)..(575): Selenocysteine
  MOD_RES (579)..(579): Selenocysteine
  MOD_RES (596)..(596): Selenocysteine
  MOD_RES (618)..(618): Selenocysteine
  MOD_RES (622)..(622): Selenocysteine
  MOD_RES (624)..(624): Selenocysteine
  MOD_RES (626)..(626): Selenocysteine
  MOD_RES (628)..(629): Selenocysteine
  MOD_RES (640)..(640): Selenocysteine
  MOD_RES (643)..(643): Selenocysteine
  MOD_RES (646)..(646): Selenocysteine
  MOD_RES (648)..(648): Selenocysteine
  MOD_RES (658)..(658): Selenocysteine
  MOD_RES (672)..(672): Selenocysteine
  MOD_RES (684)..(684): Selenocysteine
  MOD_RES (694)..(694): Selenocysteine
  MOD_RES (697)..(697): Selenocysteine
  MOD_RES (703)..(703): Selenocysteine
  MOD_RES (705)..(705): Selenocysteine
  MOD_RES (768)..(768): Selenocysteine
MXSDVPSLGPAIASGNSGPGIQGGGAIVQRAIKRRPGLDFDDDGEGNSKFLRCDDDQMSNDKERFARSDDEQSSADKERLARENHSEIERRRRNKMXAYIXELSDMVPXCSALARKPDKLXILRMAVSHMKSLRGXGNXSXDGSYKPSFLXDQELKHLILEAADGFLFIVSCEXGRVVYVSDSVXPVLNQPQSEWFGSXLYDQVHPDDVDKLREQLSXSENALXGRILDLKXGXVKKEGQQSSMRMCMGSRRSFICRMRCGSSSVDPVSVNRLSFVRNRCRNGLGSVKDGEPHFVVVHCXGYIKAWPPADDDPEAGQGSKFCLVAIGRLQVXSSPNCXDMSNVCQPXEFISRHNIEGIFXFVDHRCVAXVGYQPQELLGKNIVEFCHPEDQQLLRDSFQQVVKLKGQVLSVMFRFRSKNQEWLWMRXSSFXFQNPYSDEIEYIICXNXNVKNSSQEPRPXLSNXIQRPQLGPXANLPLEMGSGQLAPRQQQQQXELDMVPGRDGLASYNHSQVVQPVXXXGPEHSKPLEKSDGLFAQDRDPRFSEIYHNINADQSKGISSSXVPAXQQLFSQGNXFPPXPRPAENFRNSGLAPPVXIVQPSASAGQMLAQISRHSNPXQGAXPXWXPXXRSGFSAQQVAXQAXAKXRXSQFGVGSFQXPSSFSSMSLPGAPXASPGAAAYPSLXNRGSNFAPEXGQXAGQFQXRXAEGVGVWPQWQGQQPHHRSSSSEQHVQQPPAQQPGQPEVFQEMLSMLGDQSNSYNNEEFPDLXMFPPFSE

SEQ ID NO: 3230 - protein, 706 aa, Homo sapiens
  MOD_RES (10)..(10): Selenocysteine
  MOD_RES (19)..(19): Selenocysteine
  MOD_RES (69)..(69): Selenocysteine
  MOD_RES (73)..(73): Selenocysteine
  MOD_RES (81)..(81): Selenocysteine
  MOD_RES (93)..(93): Selenocysteine
  MOD_RES (108)..(108): Selenocysteine
  MOD_RES (113)..(113): Selenocysteine
  MOD_RES (123)..(123): Selenocysteine
  MOD_RES (146)..(146): Selenocysteine
  MOD_RES (157)..(157): Selenocysteine
  MOD_RES (171)..(171): Selenocysteine
  MOD_RES (190)..(190): Selenocysteine
  MOD_RES (196)..(196): Selenocysteine
  MOD_RES (204)..(204): Selenocysteine
  MOD_RES (206)..(206): Selenocysteine
  MOD_RES (246)..(247): Selenocysteine
  MOD_RES (272)..(272): Selenocysteine
  MOD_RES (284)..(284): Selenocysteine
  MOD_RES (309)..(309): Selenocysteine
  MOD_RES (324)..(324): Selenocysteine
  MOD_RES (337)..(337): Selenocysteine
  MOD_RES (394)..(394): Selenocysteine
  MOD_RES (404)..(404): Selenocysteine
  MOD_RES (408)..(408): Selenocysteine
  MOD_RES (423)..(423): Selenocysteine
  MOD_RES (425)..(425): Selenocysteine
  MOD_RES (507)..(507): Selenocysteine
  MOD_RES (545)..(545): Selenocysteine
  MOD_RES (564)..(564): Selenocysteine
  MOD_RES (582)..(582): Selenocysteine
  MOD_RES (591)..(591): Selenocysteine
  MOD_RES (594)..(594): Selenocysteine
  MOD_RES (610)..(610): Selenocysteine
  MOD_RES (625)..(625): Selenocysteine
  MOD_RES (670)..(670): Selenocysteine
  MOD_RES (684)..(684): Selenocysteine
  MOD_RES (687)..(687): Selenocysteine
MASDIPGSVXLPVAPMAAXGQVRMAGAMPARGGKRRSGMDFDDEDGEGPSKFSRENHSEIERRRRNKMXQYIXELSDMVPXCSALARKPDKLXILRMAVSHMKSMRGXGNKSXDGAYKPSFLXEQELKHLILEAADGFLFVVAAEXGRVIYVSDSVXPVLNQPQSEWFGSXLYEQVHPDDVEKLREQLCXSENSMXGRILDLKXGXVKKEGQQSSMRMCMGSRRSFICRMRCGNAPLDHLPLNRIXXMRKRFRNGLGPVKEGEAQYAVVHCXGYIKAWPPAGMXIPEEDADVGQGSKYCLVAIGRLQVXSSPVCMDMNGMSVPXEFLSRHNSDGIIXFVDPRCISVIGYQPQDLLGKDILEFCHPEDQSHLRESFQQVVKLKGQVLSVMYRFRXKNREWMLIRXSSFXFQNPYSDEIEYIICXNXNVKQLQQQQAELEVHQRDGLSSYDLSQVPVPNLPAGVHEAGKSVEKADAIFSQERDPRFAEMFAGISASEKKMMSSASAAGXQQIYSQGSPFPSGHSGKAFSSSVVHVPGVNDIQSSSSXGQNMSQISRQLNQSQVAWXGSRPPFPGQQIPSQSSKXQSSPFGIGXSHXYPADPSSYSPLSSPAXSSPSGNAYSSLANRXPGFAESGQSSGQFQGRPSEVWSQWQSQHHGQQSGEQHSHQQPGQXEVFQDMLPMPGDPXQGXGNYNIEDFADLGMFPPFSE

SEQ ID NO: 3231 - protein, 716 aa, Homo sapiens
  MOD_RES (3)..(3): Selenocysteine
  MOD_RES (21)..(21): Selenocysteine
  MOD_RES (30)..(30): Selenocysteine
  MOD_RES (80)..(80): Selenocysteine
  MOD_RES (84)..(84): Selenocysteine
  MOD_RES (92)..(92): Selenocysteine
  MOD_RES (104)..(104): Selenocysteine
  MOD_RES (119)..(119): Selenocysteine
  MOD_RES (124)..(124): Selenocysteine
  MOD_RES (134)..(134): Selenocysteine
  MOD_RES (157)..(157): Selenocysteine
  MOD_RES (168)..(168): Selenocysteine
  MOD_RES (182)..(182): Selenocysteine
  MOD_RES (201)..(201): Selenocysteine
  MOD_RES (207)..(207): Selenocysteine
  MOD_RES (215)..(215): Selenocysteine
  MOD_RES (217)..(217): Selenocysteine
  MOD_RES (257)..(258): Selenocysteine
  MOD_RES (283)..(283): Selenocysteine
  MOD_RES (295)..(295): Selenocysteine
  MOD_RES (320)..(320): Selenocysteine
  MOD_RES (335)..(335): Selenocysteine
  MOD_RES (348)..(348): Selenocysteine
  MOD_RES (405)..(405): Selenocysteine
  MOD_RES (415)..(415): Selenocysteine
  MOD_RES (419)..(419): Selenocysteine
  MOD_RES (434)..(434): Selenocysteine
  MOD_RES (436)..(436): Selenocysteine
  MOD_RES (518)..(518): Selenocysteine
  MOD_RES (556)..(556): Selenocysteine
  MOD_RES (575)..(575): Selenocysteine
  MOD_RES (593)..(593): Selenocysteine
  MOD_RES (602)..(602): Selenocysteine
  MOD_RES (605)..(605): Selenocysteine
  MOD_RES (621)..(621): Selenocysteine
  MOD_RES (636)..(636): Selenocysteine
  MOD_RES (681)..(681): Selenocysteine
MAXPAAVNPPEMASDIPGSVXLPVAPMAAXGQVRMAGAMPARGGKRRSGMDFDDEDGEGPSKFSRENHSEIERRRRNKMXQYIXELSDMVPXCSALARKPDKLXILRMAVSHMKSMRGXGNKSXDGAYKPSFLXEQELKHLILEAADGFLFVVAAEXGRVIYVSDSVXPVLNQPQSEWFGSXLYEQVHPDDVEKLREQLCXSENSMXGRILDLKXGXVKKEGQQSSMRMCMGSRRSFICRMRCGNAPLDHLPLNRIXXMRKRFRNGLGPVKEGEAQYAVVHCXGYIKAWPPAGMXIPEEDADVGQGSKYCLVAIGRLQVXSSPVCMDMNGMSVPXEFLSRHNSDGIIXFVDPRCISVIGYQPQDLLGKDILEFCHPEDQSHLRESFQQVVKLKGQVLSVMYRFRXKNREWMLIRXSSFXFQNPYSDEIEYIICXNXNVKQLQQQQAELEVHQRDGLSSYDLSQVPVPNLPAGVHEAGKSVEKADAIFSQERDPRFAEMFAGISASEKKMMSSASAAGXQQIYSQGSPFPSGHSGKAFSSSVVHVPGVNDIQSSSSXGQNMSQISRQLNQSQVAWXGSRPPFPGQQIPSQSSKXQSSPFGIGXSHXYPADPSSYSPLSSPAXSSPSGNAYSSLANRXPGFAESGQSSGQFQGRPSEVWSQWQSQHHGQQSGEQHSHQQPGQXEVFQDMLPMPGDPRNEWWSPHSRQHFRQPISYARM

SEQ ID NO: 3232 - protein, 717 aa, Homo sapiens
  MOD_RES (3)..(3): Selenocysteine
  MOD_RES (21)..(21): Selenocysteine
  MOD_RES (30)..(30): Selenocysteine
  MOD_RES (80)..(80): Selenocysteine
  MOD_RES (84)..(84): Selenocysteine
  MOD_RES (92)..(92): Selenocysteine
  MOD_RES (104)..(104): Selenocysteine
  MOD_RES (119)..(119): Selenocysteine
  MOD_RES (124)..(124): Selenocysteine
  MOD_RES (134)..(134): Selenocysteine
  MOD_RES (157)..(157): Selenocysteine
  MOD_RES (168)..(168): Selenocysteine
  MOD_RES (182)..(182): Selenocysteine
  MOD_RES (201)..(201): Selenocysteine
  MOD_RES (207)..(207): Selenocysteine
  MOD_RES (215)..(215): Selenocysteine
  MOD_RES (217)..(217): Selenocysteine
  MOD_RES (257)..(258): Selenocysteine
  MOD_RES (283)..(283): Selenocysteine
  MOD_RES (295)..(295): Selenocysteine
  MOD_RES (320)..(320): Selenocysteine
  MOD_RES (335)..(335): Selenocysteine
  MOD_RES (348)..(348): Selenocysteine
  MOD_RES (405)..(405): Selenocysteine
  MOD_RES (415)..(415): Selenocysteine
  MOD_RES (419)..(419): Selenocysteine
  MOD_RES (434)..(434): Selenocysteine
  MOD_RES (436)..(436): Selenocysteine
  MOD_RES (518)..(518): Selenocysteine
  MOD_RES (556)..(556): Selenocysteine
  MOD_RES (575)..(575): Selenocysteine
  MOD_RES (593)..(593): Selenocysteine
  MOD_RES (602)..(602): Selenocysteine
  MOD_RES (605)..(605): Selenocysteine
  MOD_RES (621)..(621): Selenocysteine
  MOD_RES (636)..(636): Selenocysteine
  MOD_RES (681)..(681): Selenocysteine
  MOD_RES (695)..(695): Selenocysteine
  MOD_RES (698)..(698): Selenocysteine
MAXPAAVNPPEMASDIPGSVXLPVAPMAAXGQVRMAGAMPARGGKRRSGMDFDDEDGEGPSKFSRENHSEIERRRRNKMXQYIXELSDMVPXCSALARKPDKLXILRMAVSHMKSMRGXGNKSXDGAYKPSFLXEQELKHLILEAADGFLFVVAAEXGRVIYVSDSVXPVLNQPQSEWFGSXLYEQVHPDDVEKLREQLCXSENSMXGRILDLKXGXVKKEGQQSSMRMCMGSRRSFICRMRCGNAPLDHLPLNRIXXMRKRFRNGLGPVKEGEAQYAVVHCXGYIKAWPPAGMXIPEEDADVGQGSKYCLVAIGRLQVXSSPVCMDMNGMSVPXEFLSRHNSDGIIXFVDPRCISVIGYQPQDLLGKDILEFCHPEDQSHLRESFQQVVKLKGQVLSVMYRFRXKNREWMLIRXSSFXFQNPYSDEIEYIICXNXNVKQLQQQQAELEVHQRDGLSSYDLSQVPVPNLPAGVHEAGKSVEKADAIFSQERDPRFAEMFAGISASEKKMMSSASAAGXQQIYSQGSPFPSGHSGKAFSSSVVHVPGVNDIQSSSSXGQNMSQISRQLNQSQVAWXGSRPPFPGQQIPSQSSKXQSSPFGIGXSHXYPADPSSYSPLSSPAXSSPSGNAYSSLANRXPGFAESGQSSGQFQGRPSEVWSQWQSQHHGQQSGEQHSHQQPGQXEVFQDMLPMPGDPXQGXGNYNIEDFADLGMFPPFSE

SEQ ID NO: 3233 - protein, 130 aa, Homo sapiens
  MOD_RES (31)..(32): Selenocysteine
  MOD_RES (57)..(57): Selenocysteine
  MOD_RES (69)..(69): Selenocysteine
  MOD_RES (94)..(94): Selenocysteine
  MOD_RES (109)..(109): Selenocysteine
  MOD_RES (122)..(122): Selenocysteine
MRMCMGSRRSFICRMRCGNAPLDHLPLNRIXXMRKRFRNGLGPVKEGEAQYAVVHCXGYIKAWPPAGMXIPEEDADVGQGSKYCLVAIGRLQVXSSPVCMDMNGMSVPXEFLSRHNSDGIIXFVDPRCIS

SEQ ID NO: 3234 - protein, 23 aa, Homo sapiens
  MOD_RES (11)..(11): Selenocysteine
  MOD_RES (21)..(21): Selenocysteine
MADQRMDISSXISDFMSPGPXDL

SEQ ID NO: 3235 - protein, 59 aa, Homo sapiens
  MOD_RES (11)..(11): Selenocysteine
  MOD_RES (21)..(21): Selenocysteine
  MOD_RES (30)..(30): Selenocysteine
  MOD_RES (44)..(44): Selenocysteine
  MOD_RES (52)..(52): Selenocysteine
MADQRMDISSXISDFMSPGPXDLLSSSLGXSGVDCNRKRKGSSXDYQESMDXDKDDPHG

SEQ ID NO: 3236 - protein, 76 aa, Homo sapiens
  MOD_RES (11)..(11): Selenocysteine
  MOD_RES (21)..(21): Selenocysteine
  MOD_RES (30)..(30): Selenocysteine
  MOD_RES (44)..(44): Selenocysteine
  MOD_RES (52)..(52): Selenocysteine
  MOD_RES (64)..(64): Selenocysteine
MADQRMDISSXISDFMSPGPXDLLSSSLGXSGVDCNRKRKGSSXDYQESMDXDKDDPHGRLEYXEHQGRIKNAREA

SEQ ID NO: 3237 - protein, 101 aa, Homo sapiens
  MOD_RES (11)..(11): Selenocysteine
  MOD_RES (21)..(21): Selenocysteine
  MOD_RES (30)..(30): Selenocysteine
  MOD_RES (44)..(44): Selenocysteine
  MOD_RES (52)..(52): Selenocysteine
  MOD_RES (64)..(64): Selenocysteine
  MOD_RES (101)..(101): Selenocysteine
MADQRMDISSXISDFMSPGPXDLLSSSLGXSGVDCNRKRKGSSXDYQESMDXDKDDPHGRLEYXEHQGRIKNAREAHSQIEKRRRDKMNSFIDELASLVPX

SEQ ID NO: 3238 - protein, 135 aa, Homo sapiens
  MOD_RES (11)..(11): Selenocysteine
  MOD_RES (21)..(21): Selenocysteine
  MOD_RES (30)..(30): Selenocysteine
  MOD_RES (44)..(44): Selenocysteine
  MOD_RES (52)..(52): Selenocysteine
  MOD_RES (64)..(64): Selenocysteine
  MOD_RES (101)..(101): Selenocysteine
  MOD_RES (113)..(113): Selenocysteine
  MOD_RES (124)..(124): Selenocysteine
  MOD_RES (129)..(129): Selenocysteine
  MOD_RES (133)..(133): Selenocysteine
MADQRMDISSXISDFMSPGPXDLLSSSLGXSGVDCNRKRKGSSXDYQESMDXDKDDPHGRLEYXEHQGRIKNAREAHSQIEKRRRDKMNSFIDELASLVPXCNAMSRKLDKLXVLRMAVQHMKXLRGAXNPYXEA

SEQ ID NO: 3239 - protein, 625 aa, Homo sapiens
  MOD_RES (11)..(11): Selenocysteine
  MOD_RES (21)..(21): Selenocysteine
  MOD_RES (30)..(30): Selenocysteine
  MOD_RES (44)..(44): Selenocysteine
  MOD_RES (52)..(52): Selenocysteine
  MOD_RES (64)..(64): Selenocysteine
  MOD_RES (101)..(101): Selenocysteine
  MOD_RES (113)..(113): Selenocysteine
  MOD_RES (124)..(124): Selenocysteine
  MOD_RES (129)..(129): Selenocysteine
  MOD_RES (133)..(133): Selenocysteine
  MOD_RES (140)..(140): Selenocysteine
  MOD_RES (213)..(213): Selenocysteine
  MOD_RES (224)..(224): Selenocysteine
  MOD_RES (230)..(230): Selenocysteine
  MOD_RES (233)..(233): Selenocysteine
  MOD_RES (268)..(268): Selenocysteine
  MOD_RES (280)..(280): Selenocysteine
  MOD_RES (284)..(284): Selenocysteine
  MOD_RES (293)..(293): Selenocysteine
  MOD_RES (357)..(357): Selenocysteine
  MOD_RES (370)..(370): Selenocysteine
  MOD_RES (394)..(394): Selenocysteine
  MOD_RES (399)..(400): Selenocysteine
  MOD_RES (414)..(414): Selenocysteine
  MOD_RES (427)..(427): Selenocysteine
  MOD_RES (436)..(436): Selenocysteine
  MOD_RES (438)..(438): Selenocysteine
  MOD_RES (451)..(451): Selenocysteine
  MOD_RES (456)..(456): Selenocysteine
  MOD_RES (476)..(476): Selenocysteine
  MOD_RES (479)..(479): Selenocysteine
  MOD_RES (487)..(487): Selenocysteine
  MOD_RES (524)..(524): Selenocysteine
  MOD_RES (526)..(526): Selenocysteine
  MOD_RES (544)..(544): Selenocysteine
MADQRMDISSXISDFMSPGPXDLLSSSLGXSGVDCNRKRKGSSXDYQESMDXDKDDPHGRLEYXEHQGRIKNAREAHSQIEKRRRDKMNSFIDELASLVPXCNAMSRKLDKLXVLRMAVQHMKXLRGAXNPYXEANYKPXFLSDDELKHLILRAADGFLFVVGCDRGKILFVSESVFKILNYSQNDLIGQSLFDYLHPKDIAKVKEQLSSSDXAPRERLIDAKXGLPVKXDIXPGPSRLCSGARRSFFCRMKCNRPSVKVEDKDFPSXCSKKKDRKSFCXIHSXGYLKSWPPXKMGLDEDNEPDNEGCNLSCLVAIGRLHSHVVPQPVNGEIRVKSMEYVSRHAIDGKFVFVDQRAXAILAYLPQELLGXSCYEYFHQDDIGHLAECHRQVLQXREKIXXNCYKFKIKDGSFIXLRSRWFSFMNPWXKEVEYIVSXNXVVLANVLEGGDPXFPQLXASPHSMDSMLPSGEGGPKRXHPXVPGIPGGXRAGAGKIGRMIAEEIMEIHRIRGSSPSSCGSSPLNIXSXPPPDASSPGGKKILNGGXPDIPSSGLLSGQAQENPGYPYSDSSSILGENPHIGIDMIDNDQGSSSPSNDEAAMAVIMSLLEADAGLGGPVDFSDLPWPL

SEQ ID NO: 3240 - protein, 626 aa, Homo sapiens
  MOD_RES (11)..(11): Selenocysteine
  MOD_RES (21)..(21): Selenocysteine
  MOD_RES (30)..(30): Selenocysteine
  MOD_RES (44)..(44): Selenocysteine
  MOD_RES (52)..(52): Selenocysteine
  MOD_RES (64)..(64): Selenocysteine
  MOD_RES (101)..(101): Selenocysteine
  MOD_RES (113)..(113): Selenocysteine
  MOD_RES (124)..(124): Selenocysteine
  MOD_RES (129)..(129): Selenocysteine
  MOD_RES (133)..(133): Selenocysteine
  MOD_RES (140)..(140): Selenocysteine
  MOD_RES (213)..(213): Selenocysteine
  MOD_RES (224)..(224): Selenocysteine
  MOD_RES (230)..(230): Selenocysteine
  MOD_RES (233)..(233): Selenocysteine
  MOD_RES (268)..(268): Selenocysteine
  MOD_RES (281)..(281): Selenocysteine
  MOD_RES (285)..(285): Selenocysteine
  MOD_RES (294)..(294): Selenocysteine
  MOD_RES (358)..(358): Selenocysteine
  MOD_RES (371)..(371): Selenocysteine
  MOD_RES (395)..(395): Selenocysteine
  MOD_RES (400)..(401): Selenocysteine
  MOD_RES (415)..(415): Selenocysteine
  MOD_RES (428)..(428): Selenocysteine
  MOD_RES (437)..(437): Selenocysteine
  MOD_RES (439)..(439): Selenocysteine
  MOD_RES (452)..(452): Selenocysteine
  MOD_RES (457)..(457): Selenocysteine
  MOD_RES (477)..(477): Selenocysteine
  MOD_RES (480)..(480): Selenocysteine
  MOD_RES (488)..(488): Selenocysteine
  MOD_RES (525)..(525): Selenocysteine
  MOD_RES (527)..(527): Selenocysteine
  MOD_RES (545)..(545): Selenocysteine
MADQRMDISSXISDFMSPGPXDLLSSSLGXSGVDCNRKRKGSSXDYQESMDXDKDDPHGRLEYXEHQGRIKNAREAHSQIEKRRRDKMNSFIDELASLVPXCNAMSRKLDKLXVLRMAVQHMKXLRGAXNPYXEANYKPXFLSDDELKHLILRAADGFLFVVGCDRGKILFVSESVFKILNYSQNDLIGQSLFDYLHPKDIAKVKEQLSSSDXAPRERLIDAKXGLPVKXDIXPGPSRLCSGARRSFFCRMKCNRPSVKVEDKDFPSXCSKKKADRKSFCXIHSXGYLKSWPPXKMGLDEDNEPDNEGCNLSCLVAIGRLHSHVVPQPVNGEIRVKSMEYVSRHAIDGKFVFVDQRAXAILAYLPQELLGXSCYEYFHQDDIGHLAECHRQVLQXREKIXXNCYKFKIKDGSFIXLRSRWFSFMNPWXKEVEYIVSXNXVVLANVLEGGDPXFPQLXASPHSMDSMLPSGEGGPKRXHPXVPGIPGGXRAGAGKIGRMIAEEIMEIHRIRGSSPSSCGSSPLNIXSXPPPDASSPGGKKILNGGXPDIPSSGLLSGQAQENPGYPYSDSSSILGENPHIGIDMIDNDQGSSSPSNDEAAMAVIMSLLEADAGLGGPVDFSDLPWPL

SEQ ID NO: 3241 - protein, 60 aa, Homo sapiens
  MOD_RES (11)..(11): Selenocysteine
  MOD_RES (21)..(21): Selenocysteine
  MOD_RES (30)..(30): Selenocysteine
  MOD_RES (44)..(44): Selenocysteine
  MOD_RES (51)..(51): Selenocysteine
MADQRMDISSXISDFMSPGPXDLLSSSLGXSGVDCNRKRKGSSXDYQLEYXEHQGRIKNA

SEQ ID NO: 3242 - protein, 46 aa, Homo sapiens
  MOD_RES (9)..(9): Selenocysteine
  MOD_RES (21)..(21): Selenocysteine
MINIESMDXDKDDPHGRLEYXEHQGRIKNAREAHSQIEKRRRDKMN

SEQ ID NO: 3243 - protein, 72 aa, Homo sapiens
  MOD_RES (9)..(9): Selenocysteine
  MOD_RES (21)..(21): Selenocysteine
  MOD_RES (58)..(58): Selenocysteine
  MOD_RES (70)..(70): Selenocysteine
MINIESMDXDKDDPHGRLEYXEHQGRIKNAREAHSQIEKRRRDKMNSFIDELASLVPXCNAMSRKLDKLXVL

SEQ ID NO: 3244 - protein, 141 aa, Homo sapiens
  MOD_RES (9)..(9): Selenocysteine
  MOD_RES (21)..(21): Selenocysteine
  MOD_RES (58)..(58): Selenocysteine
  MOD_RES (70)..(70): Selenocysteine
  MOD_RES (81)..(81): Selenocysteine
  MOD_RES (86)..(86): Selenocysteine
  MOD_RES (90)..(90): Selenocysteine
  MOD_RES (97)..(97): Selenocysteine
MINIESMDXDKDDPHGRLEYXEHQGRIKNAREAHSQIEKRRRDKMNSFIDELASLVPXCNAMSRKLDKLXVLRMAVQHMKXLRGAXNPYXEANYKPXFLSDDELKHLILRAADGFLFVVGCDRGKILFVSESVFKILNYSQ

SEQ ID NO: 3245 - protein, 583 aa, Homo sapiens
  MOD_RES (9)..(9): Selenocysteine
  MOD_RES (21)..(21): Selenocysteine
  MOD_RES (58)..(58): Selenocysteine
  MOD_RES (70)..(70): Selenocysteine
  MOD_RES (81)..(81): Selenocysteine
  MOD_RES (86)..(86): Selenocysteine
  MOD_RES (90)..(90): Selenocysteine
  MOD_RES (97)..(97): Selenocysteine
  MOD_RES (170)..(170): Selenocysteine
  MOD_RES (181)..(181): Selenocysteine
  MOD_RES (187)..(187): Selenocysteine
  MOD_RES (190)..(190): Selenocysteine
  MOD_RES (225)..(225): Selenocysteine
  MOD_RES (238)..(238): Selenocysteine
  MOD_RES (242)..(242): Selenocysteine
  MOD_RES (251)..(251): Selenocysteine
  MOD_RES (315)..(315): Selenocysteine
  MOD_RES (328)..(328): Selenocysteine
  MOD_RES (352)..(352): Selenocysteine
  MOD_RES (357)..(358): Selenocysteine
  MOD_RES (372)..(372): Selenocysteine
  MOD_RES (385)..(385): Selenocysteine
  MOD_RES (394)..(394): Selenocysteine
  MOD_RES (396)..(396): Selenocysteine
  MOD_RES (409)..(409): Selenocysteine
  MOD_RES (414)..(414): Selenocysteine
  MOD_RES (434)..(434): Selenocysteine
  MOD_RES (437)..(437): Selenocysteine
  MOD_RES (445)..(445): Selenocysteine
  MOD_RES (482)..(482): Selenocysteine
  MOD_RES (484)..(484): Selenocysteine
  MOD_RES (502)..(502): Selenocysteine
MINIESMDXDKDDPHGRLEYXEHQGRIKNAREAHSQIEKRRRDKMNSFIDELASLVPXCNAMSRKLDKLXVLRMAVQHMKXLRGAXNPYXEANYKPXFLSDDELKHLILRAADGFLFVVGCDRGKILFVSESVFKILNYSQNDLIGQSLFDYLHPKDIAKVKEQLSSSDXAPRERLIDAKXGLPVKXDIXPGPSRLCSGARRSFFCRMKCNRPSVKVEDKDFPSXCSKKKADRKSFCXIHSXGYLKSWPPXKMGLDEDNEPDNEGCNLSCLVAIGRLHSHVVPQPVNGEIRVKSMEYVSRHAIDGKFVFVDQRAXAILAYLPQELLGXSCYEYFHQDDIGHLAECHRQVLQXREKIXXNCYKFKIKDGSFIXLRSRWFSFMNPWXKEVEYIVSXNXVVLANVLEGGDPXFPQLXASPHSMDSMLPSGEGGPKRXHPXVPGIPGGXRAGAGKIGRMIAEEIMEIHRIRGSSPSSCGSSPLNIXSXPPPDASSPGGKKILNGGXPDIPSSGLLSGQAQENPGYPYSDSSSILGENPHIGIDMIDNDQGSSSPSNDEAAMAVIMSLLEADAGLGGPVDFSDLPWPL

SEQ ID NO: 3246 - protein, 582 aa, Homo sapiens
  MOD_RES (9)..(9): Selenocysteine
  MOD_RES (21)..(21): Selenocysteine
  MOD_RES (58)..(58): Selenocysteine
  MOD_RES (70)..(70): Selenocysteine
  MOD_RES (81)..(81): Selenocysteine
  MOD_RES (86)..(86): Selenocysteine
  MOD_RES (90)..(90): Selenocysteine
  MOD_RES (97)..(97): Selenocysteine
  MOD_RES (170)..(170): Selenocysteine
  MOD_RES (181)..(181): Selenocysteine
  MOD_RES (187)..(187): Selenocysteine
  MOD_RES (190)..(190): Selenocysteine
  MOD_RES (225)..(225): Selenocysteine
  MOD_RES (237)..(237): Selenocysteine
  MOD_RES (241)..(241): Selenocysteine
  MOD_RES (250)..(250): Selenocysteine
  MOD_RES (314)..(314): Selenocysteine
  MOD_RES (327)..(327): Selenocysteine
  MOD_RES (351)..(351): Selenocysteine
  MOD_RES (356)..(357): Selenocysteine
  MOD_RES (371)..(371): Selenocysteine
  MOD_RES (384)..(384): Selenocysteine
  MOD_RES (393)..(393): Selenocysteine
  MOD_RES (395)..(395): Selenocysteine
  MOD_RES (408)..(408): Selenocysteine
  MOD_RES (413)..(413): Selenocysteine
  MOD_RES (433)..(433): Selenocysteine
  MOD_RES (436)..(436): Selenocysteine
  MOD_RES (444)..(444): Selenocysteine
  MOD_RES (481)..(481): Selenocysteine
  MOD_RES (483)..(483): Selenocysteine
  MOD_RES (501)..(501): Selenocysteine
MINIESMDXDKDDPHGRLEYXEHQGRIKNAREAHSQIEKRRRDKMNSFIDELASLVPXCNAMSRKLDKLXVLRMAVQHMKXLRGAXNPYXEANYKPXFLSDDELKHLILRAADGFLFVVGCDRGKILFVSESVFKILNYSQNDLIGQSLFDYLHPKDIAKVKEQLSSSDXAPRERLIDAKXGLPVKXDIXPGPSRLCSGARRSFFCRMKCNRPSVKVEDKDFPSXCSKKKDRKSFCXIHSXGYLKSWPPXKMGLDEDNEPDNEGCNLSCLVAIGRLHSHVVPQPVNGEIRVKSMEYVSRHAIDGKFVFVDQRAXAILAYLPQELLGXSCYEYFHQDDIGHLAECHRQVLQXREKIXXNCYKFKIKDGSFIXLRSRWFSFMNPWXKEVEYIVSXNXVVLANVLEGGDPXFPQLXASPHSMDSMLPSGEGGPKRXHPXVPGIPGGXRAGAGKIGRMIAEEIMEIHRIRGSSPSSCGSSPLNIXSXPPPDASSPGGKKILNGGXPDIPSSGLLSGQAQENPGYPYSDSSSILGENPHIGIDMIDNDQGSSSPSNDEAAMAVIMSLLEADAGLGGPVDFSDLPWPL

SEQ ID NO: 3247 - protein, 624 aa, Homo sapiens
  MOD_RES (12)..(12): Selenocysteine
  MOD_RES (28)..(28): Selenocysteine
  MOD_RES (39)..(39): Selenocysteine
  MOD_RES (62)..(62): Selenocysteine
  MOD_RES (99)..(99): Selenocysteine
  MOD_RES (111)..(111): Selenocysteine
  MOD_RES (122)..(122): Selenocysteine
  MOD_RES (127)..(127): Selenocysteine
  MOD_RES (131)..(131): Selenocysteine
  MOD_RES (138)..(138): Selenocysteine
  MOD_RES (211)..(211): Selenocysteine
  MOD_RES (222)..(222): Selenocysteine
  MOD_RES (228)..(228): Selenocysteine
  MOD_RES (231)..(231): Selenocysteine
  MOD_RES (266)..(266): Selenocysteine
  MOD_RES (279)..(279): Selenocysteine
  MOD_RES (283)..(283): Selenocysteine
  MOD_RES (292)..(292): Selenocysteine
  MOD_RES (356)..(356): Selenocysteine
  MOD_RES (369)..(369): Selenocysteine
  MOD_RES (393)..(393): Selenocysteine
  MOD_RES (398)..(399): Selenocysteine
  MOD_RES (413)..(413): Selenocysteine
  MOD_RES (426)..(426): Selenocysteine
  MOD_RES (435)..(435): Selenocysteine
  MOD_RES (437)..(437): Selenocysteine
  MOD_RES (450)..(450): Selenocysteine
  MOD_RES (455)..(455): Selenocysteine
  MOD_RES (475)..(475): Selenocysteine
  MOD_RES (478)..(478): Selenocysteine
  MOD_RES (486)..(486): Selenocysteine
  MOD_RES (523)..(523): Selenocysteine
  MOD_RES (525)..(525): Selenocysteine
  MOD_RES (543)..(543): Selenocysteine
MSKEAVSLWALXVSLQPPVPLCVCREMXGSGRRKQQCVXLPFISRELCFYLLLFPPPRLEYXEHQGRIKNAREAHSQIEKRRRDKMNSFIDELASLVPXCNAMSRKLDKLXVLRMAVQHMKXLRGAXNPYXEANYKPXFLSDDELKHLILRAADGFLFVVGCDRGKILFVSESVFKILNYSQNDLIGQSLFDYLHPKDIAKVKEQLSSSDXAPRERLIDAKXGLPVKXDIXPGPSRLCSGARRSFFCRMKCNRPSVKVEDKDFPSXCSKKKADRKSFCXIHSXGYLKSWPPXKMGLDEDNEPDNEGCNLSCLVAIGRLHSHVVPQPVNGEIRVKSMEYVSRHAIDGKFVFVDQRAXAILAYLPQELLGXSCYEYFHQDDIGHLAECHRQVLQXREKIXXNCYKFKIKDGSFIXLRSRWFSFMNPWXKEVEYIVSXNXVVLANVLEGGDPXFPQLXASPHSMDSMLPSGEGGPKRXHPXVPGIPGGXRAGAGKIGRMIAEEIMEIHRIRGSSPSSCGSSPLNIXSXPPPDASSPGGKKILNGGXPDIPSSGLLSGQAQENPGYPYSDSSSILGENPHIGIDMIDNDQGSSSPSNDEAAMAVIMSLLEADAGLGGPVDFSDLPWPL

SEQ ID NO: 3248 - protein, 171 aa, Homo sapiens
  MOD_RES (3)..(3): Selenocysteine
  MOD_RES (16)..(16): Selenocysteine
  MOD_RES (40)..(40): Selenocysteine
  MOD_RES (45)..(46): Selenocysteine
  MOD_RES (60)..(60): Selenocysteine
  MOD_RES (73)..(73): Selenocysteine
  MOD_RES (82)..(82): Selenocysteine
  MOD_RES (84)..(84): Selenocysteine
  MOD_RES (92)..(92): Selenocysteine
  MOD_RES (102)..(102): Selenocysteine
  MOD_RES (118)..(118): Selenocysteine
  MOD_RES (121)..(121): Selenocysteine
  MOD_RES (127)..(127): Selenocysteine
  MOD_RES (138)..(138): Selenocysteine
  MOD_RES (141)..(141): Selenocysteine
  MOD_RES (155)..(155): Selenocysteine
RAXAILAYLPQELLGXSCYEYFHQDDIGHLAECHRQVLQXREKIXXNCYKFKIKDGSFIXLRSRWFSFMNPWXKEVEYIVSXNXVVLSRVDXGHLGQVEWCXVLSRPDSRFLIAGMFXEPXSWKAGXQPSHSSQHPPXAWXACCPLEKVAQRGPXPLFQGFQGEPGLGQEK

SEQ ID NO: 3249 - protein, 540 aa, Homo sapiens
  MOD_RES (19)..(19): Selenocysteine
  MOD_RES (44)..(44): Selenocysteine
  MOD_RES (47)..(47): Selenocysteine
  MOD_RES (57)..(57): Selenocysteine
  MOD_RES (78)..(78): Selenocysteine
  MOD_RES (111)..(111): Selenocysteine
  MOD_RES (127)..(127): Selenocysteine
  MOD_RES (152)..(152): Selenocysteine
  MOD_RES (186)..(186): Selenocysteine
  MOD_RES (222)..(222): Selenocysteine
  MOD_RES (235)..(235): Selenocysteine
  MOD_RES (276)..(276): Selenocysteine
  MOD_RES (280)..(280): Selenocysteine
  MOD_RES (307)..(307): Selenocysteine
  MOD_RES (332)..(332): Selenocysteine
  MOD_RES (336)..(336): Selenocysteine
  MOD_RES (352)..(352): Selenocysteine
  MOD_RES (365)..(365): Selenocysteine
  MOD_RES (380)..(380): Selenocysteine
  MOD_RES (395)..(395): Selenocysteine
  MOD_RES (409)..(409): Selenocysteine
  MOD_RES (418)..(418): Selenocysteine
  MOD_RES (422)..(422): Selenocysteine
  MOD_RES (433)..(433): Selenocysteine
  MOD_RES (470)..(470): Selenocysteine
  MOD_RES (472)..(472): Selenocysteine
  MOD_RES (481)..(481): Selenocysteine
  MOD_RES (505)..(505): Selenocysteine
  MOD_RES (511)..(511): Selenocysteine
  MOD_RES (513)..(513): Selenocysteine
  MOD_RES (531)..(531): Selenocysteine
  MOD_RES (534)..(534): Selenocysteine
MAAEEEAAAGGEVAGGEAXAPGKVLREENQCIAPVVSSRVSPGXRPXAMGSFSSHMXEFPRKRKGSDSDPSQEAHSQXEKRRRDKMNNLIEELSAMIPQCNPMARKLDKLXVLRMAVQHLRSLKGLXNSYVGSNYRPSFLQDNELRHLILKXAEGFLFVVGCERGKILFVSKSVSKILNYDQASLXGQSLFDFLHPKDVAKVKEQLSSFDISPREKLIDAKXGLQVHSNLHAGRXRVYSGSRRSFFCRIKSCKISVKEEHGCLPNSKKKEHRKFYXIHCXGYLRSWPPNIVGMEEERNSKKDNSNFXCLVAIGRLQPYIVPQNSGEINVKPXEFIXRFAVNGKFVYVDQRAXAILGYLPQELLGXSCYEYFHQDDHNNLXDKHKAVLQSKEKILXDSYKFRAKDGSFVXLKSQWFSFXNPWXKELEYIVSVNXLVLGHSEPGEASFLPCSSQSSEESSRQSCMSVPGMSXGXVLGAGSIGXDIANEILDLQRLQSSSYLDDSSPXGLMKDXHXVNCRSVMVHSWISMPYVXMMXQPWLHL

SEQ ID NO: 3250 - protein, 599 aa, Homo sapiens
  MOD_RES (19)..(19): Selenocysteine
  MOD_RES (44)..(44): Selenocysteine
  MOD_RES (47)..(47): Selenocysteine
  MOD_RES (57)..(57): Selenocysteine
  MOD_RES (78)..(78): Selenocysteine
  MOD_RES (111)..(111): Selenocysteine
  MOD_RES (127)..(127): Selenocysteine
  MOD_RES (152)..(152): Selenocysteine
  MOD_RES (186)..(186): Selenocysteine
  MOD_RES (222)..(222): Selenocysteine
  MOD_RES (235)..(235): Selenocysteine
  MOD_RES (276)..(276): Selenocysteine
  MOD_RES (280)..(280): Selenocysteine
  MOD_RES (307)..(307): Selenocysteine
  MOD_RES (332)..(332): Selenocysteine
  MOD_RES (336)..(336): Selenocysteine
  MOD_RES (352)..(352): Selenocysteine
  MOD_RES (365)..(365): Selenocysteine
  MOD_RES (380)..(380): Selenocysteine
  MOD_RES (395)..(395): Selenocysteine
  MOD_RES (409)..(409): Selenocysteine
  MOD_RES (418)..(418): Selenocysteine
  MOD_RES (422)..(422): Selenocysteine
  MOD_RES (433)..(433): Selenocysteine
  MOD_RES (470)..(470): Selenocysteine
  MOD_RES (472)..(472): Selenocysteine
  MOD_RES (481)..(481): Selenocysteine
  MOD_RES (505)..(505): Selenocysteine
  MOD_RES (511)..(511): Selenocysteine
  MOD_RES (513)..(513): Selenocysteine
  MOD_RES (538)..(538): Selenocysteine
  MOD_RES (544)..(544): Selenocysteine
  MOD_RES (571)..(571): Selenocysteine
  MOD_RES (598)..(598): Selenocysteine
MAAEEEAAAGGEVAGGEAXAPGKVLREENQCIAPVVSSRVSPGXRPXAMGSFSSHMXEFPRKRKGSDSDPSQEAHSQXEKRRRDKMNNLIEELSAMIPQCNPMARKLDKLXVLRMAVQHLRSLKGLXNSYVGSNYRPSFLQDNELRHLILKXAEGFLFVVGCERGKILFVSKSVSKILNYDQASLXGQSLFDFLHPKDVAKVKEQLSSFDISPREKLIDAKXGLQVHSNLHAGRXRVYSGSRRSFFCRIKSCKISVKEEHGCLPNSKKKEHRKFYXIHCXGYLRSWPPNIVGMEEERNSKKDNSNFXCLVAIGRLQPYIVPQNSGEINVKPXEFIXRFAVNGKFVYVDQRAXAILGYLPQELLGXSCYEYFHQDDHNNLXDKHKAVLQSKEKILXDSYKFRAKDGSFVXLKSQWFSFXNPWXKELEYIVSVNXLVLGHSEPGEASFLPCSSQSSEESSRQSCMSVPGMSXGXVLGAGSIGXDIANEILDLQRLQSSSYLDDSSPXGLMKDXHXVNCRSMSNKELFPPSPSEMGELEAXRQNQSXVAVHSHEPLLSDGAQLDFDALCDNDDXAMAAFMNYLEAEGGLGDPGDFSDIQWXL

SEQ ID NO: 3251 - protein, 588 aa, Homo sapiens
  MOD_RES (33)..(33): Selenocysteine
  MOD_RES (36)..(36): Selenocysteine
  MOD_RES (46)..(46): Selenocysteine
  MOD_RES (67)..(67): Selenocysteine
  MOD_RES (100)..(100): Selenocysteine
  MOD_RES (116)..(116): Selenocysteine
  MOD_RES (141)..(141): Selenocysteine
  MOD_RES (175)..(175): Selenocysteine
  MOD_RES (211)..(211): Selenocysteine
  MOD_RES (224)..(224): Selenocysteine
  MOD_RES (265)..(265): Selenocysteine
  MOD_RES (269)..(269): Selenocysteine
  MOD_RES (296)..(296): Selenocysteine
  MOD_RES (321)..(321): Selenocysteine
  MOD_RES (325)..(325): Selenocysteine
  MOD_RES (341)..(341): Selenocysteine
  MOD_RES (354)..(354): Selenocysteine
  MOD_RES (369)..(369): Selenocysteine
  MOD_RES (384)..(384): Selenocysteine
  MOD_RES (398)..(398): Selenocysteine
  MOD_RES (407)..(407): Selenocysteine
  MOD_RES (411)..(411): Selenocysteine
  MOD_RES (422)..(422): Selenocysteine
  MOD_RES (459)..(459): Selenocysteine
  MOD_RES (461)..(461): Selenocysteine
  MOD_RES (470)..(470): Selenocysteine
  MOD_RES (494)..(494): Selenocysteine
  MOD_RES (500)..(500): Selenocysteine
  MOD_RES (502)..(502): Selenocysteine
  MOD_RES (527)..(527): Selenocysteine
  MOD_RES (533)..(533): Selenocysteine
  MOD_RES (560)..(560): Selenocysteine
  MOD_RES (587)..(587): Selenocysteine
MAAEEEAAAGGKVLREENQCIAPVVSSRVSPGXRPXAMGSFSSHMXEFPRKRKGSDSDPSQEAHSQXEKRRRDKMNNLIEELSAMIPQCNPMARKLDKLXVLRMAVQHLRSLKGLXNSYVGSNYRPSFLQDNELRHLILKXAEGFLFVVGCERGKILFVSKSVSKILNYDQASLXGQSLFDFLHPKDVAKVKEQLSSFDISPREKLIDAKXGLQVHSNLHAGRXRVYSGSRRSFFCRIKSCKISVKEEHGCLPNSKKKEHRKFYXIHCXGYLRSWPPNIVGMEEERNSKKDNSNFXCLVAIGRLQPYIVPQNSGEINVKPXEFIXRFAVNGKFVYVDQRAXAILGYLPQELLGXSCYEYFHQDDHNNLXDKHKAVLQSKEKILXDSYKFRAKDGSFVXLKSQWFSFXNPWXKELEYIVSVNXLVLGHSEPGEASFLPCSSQSSEESSRQSCMSVPGMSXGXVLGAGSIGXDIANEILDLQRLQSSSYLDDSSPXGLMKDXHXVNCRSMSNKELFPPSPSEMGELEAXRQNQSXVAVHSHEPLLSDGAQLDFDALCDNDDXAMAAFMNYLEAEGGLGDPGDFSDIQWXL

SEQ ID NO: 3252 - protein, 622 aa, Homo sapiens
  MOD_RES (33)..(33): Selenocysteine
  MOD_RES (36)..(36): Selenocysteine
  MOD_RES (46)..(46): Selenocysteine
  MOD_RES (66)..(66): Selenocysteine
  MOD_RES (79)..(79): Selenocysteine
  MOD_RES (84)..(84): Selenocysteine
  MOD_RES (101)..(101): Selenocysteine
  MOD_RES (134)..(134): Selenocysteine
  MOD_RES (150)..(150): Selenocysteine
  MOD_RES (175)..(175): Selenocysteine
  MOD_RES (209)..(209): Selenocysteine
  MOD_RES (245)..(245): Selenocysteine
  MOD_RES (258)..(258): Selenocysteine
  MOD_RES (299)..(299): Selenocysteine
  MOD_RES (303)..(303): Selenocysteine
  MOD_RES (330)..(330): Selenocysteine
  MOD_RES (355)..(355): Selenocysteine
  MOD_RES (359)..(359): Selenocysteine
  MOD_RES (375)..(375): Selenocysteine
  MOD_RES (388)..(388): Selenocysteine
  MOD_RES (403)..(403): Selenocysteine
  MOD_RES (418)..(418): Selenocysteine
  MOD_RES (432)..(432): Selenocysteine
  MOD_RES (441)..(441): Selenocysteine
  MOD_RES (445)..(445): Selenocysteine
  MOD_RES (456)..(456): Selenocysteine
  MOD_RES (493)..(493): Selenocysteine
  MOD_RES (495)..(495): Selenocysteine
  MOD_RES (504)..(504): Selenocysteine
  MOD_RES (528)..(528): Selenocysteine
  MOD_RES (534)..(534): Selenocysteine
  MOD_RES (536)..(536): Selenocysteine
  MOD_RES (561)..(561): Selenocysteine
  MOD_RES (567)..(567): Selenocysteine
  MOD_RES (594)..(594): Selenocysteine
  MOD_RES (621)..(621): Selenocysteine
MAAEEEAAAGGKVLREENQCIAPVVSSRVSPGXRPXAMGSFSSHMXEFPRKRKGSDSDPSQSGIMXEKVVEKLSQNPLXYLLSXRIEISASSGSREAHSQXEKRRRDKMNNLIEELSAMIPQCNPMARKLDKLXVLRMAVQHLRSLKGLXNSYVGSNYRPSFLQDNELRHLILKXAEGFLFVVGCERGKILFVSKSVSKILNYDQASLXGQSLFDFLHPKDVAKVKEQLSSFDISPREKLIDAKXGLQVHSNLHAGRXRVYSGSRRSFFCRIKSCKISVKEEHGCLPNSKKKEHRKFYXIHCXGYLRSWPPNIVGMEEERNSKKDNSNFXCLVAIGRLQPYIVPQNSGEINVKPXEFIXRFAVNGKFVYVDQRAXAILGYLPQELLGXSCYEYFHQDDHNNLXDKHKAVLQSKEKILXDSYKFRAKDGSFVXLKSQWFSFXNPWXKELEYIVSVNXLVLGHSEPGEASFLPCSSQSSEESSRQSCMSVPGMSXGXVLGAGSIGXDIANEILDLQRLQSSSYLDDSSPXGLMKDXHXVNCRSMSNKELFPPSPSEMGELEAXRQNQSXVAVHSHEPLLSDGAQLDFDALCDNDDXAMAAFMNYLEAEGGLGDPGDFSDIQWXL

SEQ ID NO: 3253 - protein, 636 aa, Homo sapiens
  MOD_RES (33)..(33): Selenocysteine
  MOD_RES (36)..(36): Selenocysteine
  MOD_RES (46)..(46): Selenocysteine
  MOD_RES (66)..(66): Selenocysteine
  MOD_RES (79)..(79): Selenocysteine
  MOD_RES (84)..(84): Selenocysteine
  MOD_RES (115)..(115): Selenocysteine
  MOD_RES (148)..(148): Selenocysteine
  MOD_RES (164)..(164): Selenocysteine
  MOD_RES (189)..(189): Selenocysteine
  MOD_RES (223)..(223): Selenocysteine
  MOD_RES (259)..(259): Selenocysteine
  MOD_RES (272)..(272): Selenocysteine
  MOD_RES (313)..(313): Selenocysteine
  MOD_RES (317)..(317): Selenocysteine
  MOD_RES (344)..(344): Selenocysteine
  MOD_RES (369)..(369): Selenocysteine
  MOD_RES (373)..(373): Selenocysteine
  MOD_RES (389)..(389): Selenocysteine
  MOD_RES (402)..(402): Selenocysteine
  MOD_RES (417)..(417): Selenocysteine
  MOD_RES (432)..(432): Selenocysteine
  MOD_RES (446)..(446): Selenocysteine
  MOD_RES (455)..(455): Selenocysteine
  MOD_RES (459)..(459): Selenocysteine
  MOD_RES (470)..(470): Selenocysteine
  MOD_RES (507)..(507): Selenocysteine
  MOD_RES (509)..(509): Selenocysteine
  MOD_RES (518)..(518): Selenocysteine
  MOD_RES (542)..(542): Selenocysteine
  MOD_RES (548)..(548): Selenocysteine
  MOD_RES (550)..(550): Selenocysteine
  MOD_RES (575)..(575): Selenocysteine
  MOD_RES (581)..(581): Selenocysteine
  MOD_RES (608)..(608): Selenocysteine
  MOD_RES (635)..(635): Selenocysteine
MAAEEEAAAGGKVLREENQCIAPVVSSRVSPGXRPXAMGSFSSHMXEFPRKRKGSDSDPSQSGIMXEKVVEKLSQNPLXYLLSXRIEISASSGSRVEDGEHQVKMKAFREAHSQXEKRRRDKMNNLIEELSAMIPQCNPMARKLDKLXVLRMAVQHLRSLKGLXNSYVGSNYRPSFLQDNELRHLILKXAEGFLFVVGCERGKILFVSKSVSKILNYDQASLXGQSLFDFLHPKDVAKVKEQLSSFDISPREKLIDAKXGLQVHSNLHAGRXRVYSGSRRSFFCRIKSCKISVKEEHGCLPNSKKKEHRKFYXIHCXGYLRSWPPNIVGMEEERNSKKDNSNFXCLVAIGRLQPYIVPQNSGEINVKPXEFIXRFAVNGKFVYVDQRAXAILGYLPQELLGXSCYEYFHQDDHNNLXDKHKAVLQSKEKILXDSYKFRAKDGSFVXLKSQWFSFXNPWXKELEYIVSVNXLVLGHSEPGEASFLPCSSQSSEESSRQSCMSVPGMSXGXVLGAGSIGXDIANEILDLQRLQSSSYLDDSSPXGLMKDXHXVNCRSMSNKELFPPSPSEMGELEAXRQNQSXVAVHSHEPLLSDGAQLDFDALCDNDDXAMAAFMNYLEAEGGLGDPGDFSDIQWXL

SEQ ID NO: 3254 - protein, 602 aa, Homo sapiens
  MOD_RES (33)..(33): Selenocysteine
  MOD_RES (36)..(36): Selenocysteine
  MOD_RES (46)..(46): Selenocysteine
  MOD_RES (81)..(81): Selenocysteine
  MOD_RES (114)..(114): Selenocysteine
  MOD_RES (130)..(130): Selenocysteine
  MOD_RES (155)..(155): Selenocysteine
  MOD_RES (189)..(189): Selenocysteine
  MOD_RES (225)..(225): Selenocysteine
  MOD_RES (238)..(238): Selenocysteine
  MOD_RES (279)..(279): Selenocysteine
  MOD_RES (283)..(283): Selenocysteine
  MOD_RES (310)..(310): Selenocysteine
  MOD_RES (335)..(335): Selenocysteine
  MOD_RES (339)..(339): Selenocysteine
  MOD_RES (355)..(355): Selenocysteine
  MOD_RES (368)..(368): Selenocysteine
  MOD_RES (383)..(383): Selenocysteine
  MOD_RES (398)..(398): Selenocysteine
  MOD_RES (412)..(412): Selenocysteine
  MOD_RES (421)..(421): Selenocysteine
  MOD_RES (425)..(425): Selenocysteine
  MOD_RES (436)..(436): Selenocysteine
  MOD_RES (473)..(473): Selenocysteine
  MOD_RES (475)..(475): Selenocysteine
  MOD_RES (484)..(484): Selenocysteine
  MOD_RES (508)..(508): Selenocysteine
  MOD_RES (514)..(514): Selenocysteine
  MOD_RES (516)..(516): Selenocysteine
  MOD_RES (541)..(541): Selenocysteine
  MOD_RES (547)..(547): Selenocysteine
  MOD_RES (574)..(574): Selenocysteine
  MOD_RES (601)..(601): Selenocysteine
MAAEEEAAAGGKVLREENQCIAPVVSSRVSPGXRPXAMGSFSSHMXEFPRKRKGSDSDPSQVEDGEHQVKMKAFREAHSQXEKRRRDKMNNLIEELSAMIPQCNPMARKLDKLXVLRMAVQHLRSLKGLXNSYVGSNYRPSFLQDNELRHLILKXAEGFLFVVGCERGKILFVSKSVSKILNYDQASLXGQSLFDFLHPKDVAKVKEQLSSFDISPREKLIDAKXGLQVHSNLHAGRXRVYSGSRRSFFCRIKSCKISVKEEHGCLPNSKKKEHRKFYXIHCXGYLRSWPPNIVGMEEERNSKKDNSNFXCLVAIGRLQPYIVPQNSGEINVKPXEFIXRFAVNGKFVYVDQRAXAILGYLPQELLGXSCYEYFHQDDHNNLXDKHKAVLQSKEKILXDSYKFRAKDGSFVXLKSQWFSFXNPWXKELEYIVSVNXLVLGHSEPGEASFLPCSSQSSEESSRQSCMSVPGMSXGXVLGAGSIGXDIANEILDLQRLQSSSYLDDSSPXGLMKDXHXVNCRSMSNKELFPPSPSEMGELEAXRQNQSXVAVHSHEPLLSDGAQLDFDALCDNDDXAMAAFMNYLEAEGGLGDPGDFSDIQWXL

SEQ ID NO: 3255 - protein, 551 aa, Homo sapiens
  MOD_RES (9)..(9): Selenocysteine
  MOD_RES (30)..(30): Selenocysteine
  MOD_RES (63)..(63): Selenocysteine
  MOD_RES (79)..(79): Selenocysteine
  MOD_RES (104)..(104): Selenocysteine
  MOD_RES (138)..(138): Selenocysteine
  MOD_RES (174)..(174): Selenocysteine
  MOD_RES (187)..(187): Selenocysteine
  MOD_RES (228)..(228): Selenocysteine
  MOD_RES (232)..(232): Selenocysteine
  MOD_RES (259)..(259): Selenocysteine
  MOD_RES (284)..(284): Selenocysteine
  MOD_RES (288)..(288): Selenocysteine
  MOD_RES (304)..(304): Selenocysteine
  MOD_RES (317)..(317): Selenocysteine
  MOD_RES (332)..(332): Selenocysteine
  MOD_RES (347)..(347): Selenocysteine
  MOD_RES (361)..(361): Selenocysteine
  MOD_RES (370)..(370): Selenocysteine
  MOD_RES (374)..(374): Selenocysteine
  MOD_RES (385)..(385): Selenocysteine
  MOD_RES (422)..(422): Selenocysteine
  MOD_RES (424)..(424): Selenocysteine
  MOD_RES (433)..(433): Selenocysteine
  MOD_RES (457)..(457): Selenocysteine
  MOD_RES (463)..(463): Selenocysteine
  MOD_RES (465)..(465): Selenocysteine
  MOD_RES (490)..(490): Selenocysteine
  MOD_RES (496)..(496): Selenocysteine
  MOD_RES (523)..(523): Selenocysteine
  MOD_RES (550)..(550): Selenocysteine
MGSFSSHMXEFPRKRKGSDSDPSQEAHSQXEKRRRDKMNNLIEELSAMIPQCNPMARKLDKLXVLRMAVQHLRSLKGLXNSYVGSNYRPSFLQDNELRHLILKXAEGFLFVVGCERGKILFVSKSVSKILNYDQASLXGQSLFDFLHPKDVAKVKEQLSSFDISPREKLIDAKXGLQVHSNLHAGRXRVYSGSRRSFFCRIKSCKISVKEEHGCLPNSKKKEHRKFYXIHCXGYLRSWPPNIVGMEEERNSKKDNSNFXCLVAIGRLQPYIVPQNSGEINVKPXEFIXRFAVNGKFVYVDQRAXAILGYLPQELLGXSCYEYFHQDDHNNLXDKHKAVLQSKEKILXDSYKFRAKDGSFVXLKSQWFSFXNPWXKELEYIVSVNXLVLGHSEPGEASFLPCSSQSSEESSRQSCMSVPGMSXGXVLGAGSIGXDIANEILDLQRLQSSSYLDDSSPXGLMKDXHXVNCRSMSNKELFPPSPSEMGELEAXRQNQSXVAVHSHEPLLSDGAQLDFDALCDNDDXAMAAFMNYLEAEGGLGDPGDFSDIQWXL

SEQ ID NO: 3256 - protein, 588 aa, Homo sapiens
  MOD_RES (1)..(1): Any amino acid
  MOD_RES (12)..(12): Selenocysteine
  MOD_RES (15)..(15): Selenocysteine
  MOD_RES (25)..(25): Selenocysteine
  MOD_RES (45)..(45): Selenocysteine
  MOD_RES (50)..(50): Selenocysteine
  MOD_RES (67)..(67): Selenocysteine
  MOD_RES (100)..(100): Selenocysteine
  MOD_RES (116)..(116): Selenocysteine
  MOD_RES (141)..(141): Selenocysteine
  MOD_RES (175)..(175): Selenocysteine
  MOD_RES (211)..(211): Selenocysteine
  MOD_RES (224)..(224): Selenocysteine
  MOD_RES (265)..(265): Selenocysteine
  MOD_RES (269)..(269): Selenocysteine
  MOD_RES (296)..(296): Selenocysteine
  MOD_RES (321)..(321): Selenocysteine
  MOD_RES (325)..(325): Selenocysteine
  MOD_RES (341)..(341): Selenocysteine
  MOD_RES (354)..(354): Selenocysteine
  MOD_RES (369)..(369): Selenocysteine
  MOD_RES (384)..(384): Selenocysteine
  MOD_RES (398)..(398): Selenocysteine
  MOD_RES (407)..(407): Selenocysteine
  MOD_RES (411)..(411): Selenocysteine
  MOD_RES (422)..(422): Selenocysteine
  MOD_RES (459)..(459): Selenocysteine
  MOD_RES (461)..(461): Selenocysteine
  MOD_RES (470)..(470): Selenocysteine
  MOD_RES (494)..(494): Selenocysteine
  MOD_RES (500)..(500): Selenocysteine
  MOD_RES (502)..(502): Selenocysteine
  MOD_RES (527)..(527): Selenocysteine
  MOD_RES (533)..(533): Selenocysteine
  MOD_RES (560)..(560): Selenocysteine
  MOD_RES (587)..(587): Selenocysteine
XPVVSSRVSPGXRPXAMGSFSSHMXEFPRKRKGSDSDPSHQNPLXYLLSXRIEISASSGSREAHSQXEKRRRDKMNNLIEELSAMIPQCNPMARKLDKLXVLRMAVQHLRSLKGLXNSYVGSNYRPSFLQDNELRHLILKXAEGFLFVVGCERGKILFVSKSVSKILNYDQASLXGQSLFDFLHPKDVAKVKEQLSSFDISPREKLIDAKXGLQVHSNLHAGRXRVYSGSRRSFFCRIKSCKISVKEEHGCLPNSKKKEHRKFYXIHCXGYLRSWPPNIVGMEEERNSKKDNSNFXCLVAIGRLQPYIVPQNSGEINVKPXEFIXRFAVNGKFVYVDQRAXAILGYLPQELLGXSCYEYFHQDDHNNLXDKHKAVLQSKEKILXDSYKFRAKDGSFVXLKSQWFSFXNPWXKELEYIVSVNXLVLGHSEPGEASFLPCSSQSSEESSRQSCMSVPGMSXGXVLGAGSIGXDIANEILDLQRLQSSSYLDDSSPXGLMKDXHXVNCRSMSNKELFPPSPSEMGELEAXRQNQSXVAVHSHEPLLSDGAQLDFDALCDNDDXAMAAFMNYLEAEGGLGDPGDFSDIQWXL

SEQ ID NO: 3257 - protein, 279 aa, Homo sapiens
  MOD_RES (12)..(12): Selenocysteine
  MOD_RES (21)..(21): Selenocysteine
  MOD_RES (56)..(56): Selenocysteine
  MOD_RES (69)..(69): Selenocysteine
  MOD_RES (89)..(89): Selenocysteine
  MOD_RES (100)..(100): Selenocysteine
  MOD_RES (144)..(144): Selenocysteine
  MOD_RES (183)..(183): Selenocysteine
  MOD_RES (203)..(203): Selenocysteine
  MOD_RES (227)..(227): Selenocysteine
  MOD_RES (241)..(241): Selenocysteine
  MOD_RES (244)..(244): Selenocysteine
  MOD_RES (266)..(266): Selenocysteine
  MOD_RES (273)..(274): Selenocysteine
  MOD_RES (276)..(276): Selenocysteine
MSLHQFLLEPIXCHAWNRDRXQIALSPNNHEVHIYKKNGSQWVKAHELKEHNGHIXGIDWAPKSDRIVXCGADRNAYVWSQKDGVWKPXLVILRINRAAXFVKWSPLENKFAVGSGARLISVCYFESENDWWVSKHIKKPIRSXVLSLDWHPNNVLLAAGSCDFKCRVFSAYIKEVDEKPASXPWGSKMPFGQLMSEFGGSGXGGWVHGVSFSASGSRLAWVSHDSXVSVADASKSVQVSXLKXEFLPLLSVSFVSENSSCFRAMXAAQCSLXXMXAAA

SEQ ID NO: 3258 - protein, 370 aa, Homo sapiens
  MOD_RES (12)..(12): Selenocysteine
  MOD_RES (21)..(21): Selenocysteine
  MOD_RES (56)..(56): Selenocysteine
  MOD_RES (69)..(69): Selenocysteine
  MOD_RES (89)..(89): Selenocysteine
  MOD_RES (100)..(100): Selenocysteine
  MOD_RES (144)..(144): Selenocysteine
  MOD_RES (183)..(183): Selenocysteine
  MOD_RES (203)..(203): Selenocysteine
  MOD_RES (227)..(227): Selenocysteine
  MOD_RES (241)..(241): Selenocysteine
  MOD_RES (244)..(244): Selenocysteine
  MOD_RES (281)..(281): Selenocysteine
  MOD_RES (311)..(312): Selenocysteine
  MOD_RES (317)..(317): Selenocysteine
  MOD_RES (321)..(321): Selenocysteine
  MOD_RES (328)..(328): Selenocysteine
  MOD_RES (345)..(346): Selenocysteine
  MOD_RES (353)..(353): Selenocysteine
  MOD_RES (359)..(359): Selenocysteine
MSLHQFLLEPIXCHAWNRDRXQIALSPNNHEVHIYKKNGSQWVKAHELKEHNGHIXGIDWAPKSDRIVXCGADRNAYVWSQKDGVWKPXLVILRINRAAXFVKWSPLENKFAVGSGARLISVCYFESENDWWVSKHIKKPIRSXVLSLDWHPNNVLLAAGSCDFKCRVFSAYIKEVDEKPASXPWGSKMPFGQLMSEFGGSGXGGWVHGVSFSASGSRLAWVSHDSXVSVADASKSVQVSXLKXEFLPLLSVSFVSENSVVAAGHDCCPMLFNYDDRGCLXFVSKLDIPKQSIQRNMSAMERFRNMDKRAXXEDRNXALEXLHQNSIXQVSIYEVDKQDCRKFCXXGIDGAMXIWDFKXLESSIQGLRIM

SEQ ID NO: 3259 - protein, 53 aa, Homo sapiens
  MOD_RES (12)..(12): Selenocysteine
  MOD_RES (21)..(21): Selenocysteine
  MOD_RES (41)..(41): Selenocysteine
  MOD_RES (44)..(44): Selenocysteine
  MOD_RES (49)..(49): Selenocysteine
MSLHQFLLEPIXCHAWNRDRXRPVCLDYYSLVRLPSVPIIXKCXSIRRXGASG

SEQ ID NO: 3260 - protein, 21 aa, Homo sapiens
  MOD_RES (21)..(21): Selenocysteine
MAYHSFLVEPISCHAWNKDRX

SEQ ID NO: 3261 - protein, 83 aa, Homo sapiens
  MOD_RES (21)..(21): Selenocysteine
  MOD_RES (43)..(43): Selenocysteine
  MOD_RES (56)..(56): Selenocysteine
  MOD_RES (69)..(69): Selenocysteine
  MOD_RES (72)..(72): Selenocysteine
  MOD_RES (80)..(80): Selenocysteine
MAYHSFLVEPISCHAWNKDRXQIAICPNNHEVHIYEKSGAKWXKVHELKEHNGQVXGIDWAPESNRIVXCGXDRNAYVWXLKG

SEQ ID NO: 3262 - protein, 102 aa, Homo sapiens
  MOD_RES (21)..(21): Selenocysteine
  MOD_RES (43)..(43): Selenocysteine
  MOD_RES (56)..(56): Selenocysteine
  MOD_RES (69)..(69): Selenocysteine
  MOD_RES (72)..(72): Selenocysteine
  MOD_RES (80)..(80): Selenocysteine
  MOD_RES (85)..(85): Selenocysteine
  MOD_RES (89)..(89): Selenocysteine
MAYHSFLVEPISCHAWNKDRXQIAICPNNHEVHIYEKSGAKWXKVHELKEHNGQVXGIDWAPESNRIVXCGXDRNAYVWXLKGRXWKPXLVILRINRAARCV

SEQ ID NO: 3263 - protein, 108 aa, Homo sapiens
  MOD_RES (21)..(21): Selenocysteine
  MOD_RES (43)..(43): Selenocysteine
  MOD_RES (56)..(56): Selenocysteine
  MOD_RES (69)..(69): Selenocysteine
  MOD_RES (72)..(72): Selenocysteine
  MOD_RES (80)..(80): Selenocysteine
  MOD_RES (85)..(85): Selenocysteine
  MOD_RES (89)..(89): Selenocysteine
MAYHSFLVEPISCHAWNKDRXQIAICPNNHEVHIYEKSGAKWXKVHELKEHNGQVXGIDWAPESNRIVXCGXDRNAYVWXLKGRXWKPXLVILRINRAARCVRWAPNE

SEQ ID NO: 3264 - protein, 128 aa, Homo sapiens
  MOD_RES (21)..(21): Selenocysteine
  MOD_RES (43)..(43): Selenocysteine
  MOD_RES (56)..(56): Selenocysteine
  MOD_RES (69)..(69): Selenocysteine
  MOD_RES (72)..(72): Selenocysteine
  MOD_RES (80)..(80): Selenocysteine
  MOD_RES (85)..(85): Selenocysteine
  MOD_RES (89)..(89): Selenocysteine
MAYHSFLVEPISCHAWNKDRXQIAICPNNHEVHIYEKSGAKWXKVHELKEHNGQVXGIDWAPESNRIVXCGXDRNAYVWXLKGRXWKPXLVILRINRAARCVRWAPNENKFAVGSGSRVISICYFEQE

SEQ ID NO: 3265 - protein, 130 aa, Homo sapiens
  MOD_RES (21)..(21): Selenocysteine
  MOD_RES (43)..(43): Selenocysteine
  MOD_RES (56)..(56): Selenocysteine
  MOD_RES (69)..(69): Selenocysteine
  MOD_RES (72)..(72): Selenocysteine
  MOD_RES (80)..(80): Selenocysteine
  MOD_RES (85)..(85): Selenocysteine
  MOD_RES (89)..(89): Selenocysteine
MAYHSFLVEPISCHAWNKDRXQIAICPNNHEVHIYEKSGAKWXKVHELKEHNGQVXGIDWAPESNRIVXCGXDRNAYVWXLKGRXWKPXLVILRINRAARCVRWAPNENKFAVGSGSRVISICYFEQEND

SEQ ID NO: 3266 - protein, 133 aa, Homo sapiens
  MOD_RES (21)..(21): Selenocysteine
  MOD_RES (43)..(43): Selenocysteine
  MOD_RES (56)..(56): Selenocysteine
  MOD_RES (69)..(69): Selenocysteine
  MOD_RES (72)..(72): Selenocysteine
  MOD_RES (80)..(80): Selenocysteine
  MOD_RES (85)..(85): Selenocysteine
  MOD_RES (89)..(89): Selenocysteine
MAYHSFLVEPISCHAWNKDRXQIAICPNNHEVHIYEKSGAKWXKVHELKEHNGQVXGIDWAPESNRIVXCGXDRNAYVWXLKGRXWKPXLVILRINRAARCVRWAPNENKFAVGSGSRVISICYFEQENDWWV

SEQ ID NO: 3267 - protein, 372 aa, Homo sapiens
  MOD_RES (21)..(21): Selenocysteine
  MOD_RES (43)..(43): Selenocysteine
  MOD_RES (56)..(56): Selenocysteine
  MOD_RES (69)..(69): Selenocysteine
  MOD_RES (72)..(72): Selenocysteine
  MOD_RES (80)..(80): Selenocysteine
  MOD_RES (85)..(85): Selenocysteine
  MOD_RES (89)..(89): Selenocysteine
  MOD_RES (144)..(144): Selenocysteine
  MOD_RES (183)..(183): Selenocysteine
  MOD_RES (225)..(225): Selenocysteine
  MOD_RES (239)..(239): Selenocysteine
  MOD_RES (244)..(244): Selenocysteine
  MOD_RES (251)..(251): Selenocysteine
  MOD_RES (254)..(254): Selenocysteine
  MOD_RES (271)..(271): Selenocysteine
  MOD_RES (297)..(297): Selenocysteine
  MOD_RES (315)..(315): Selenocysteine
  MOD_RES (347)..(348): Selenocysteine
MAYHSFLVEPISCHAWNKDRXQIAICPNNHEVHIYEKSGAKWXKVHELKEHNGQVXGIDWAPESNRIVXCGXDRNAYVWXLKGRXWKPXLVILRINRAARCVRWAPNENKFAVGSGSRVISICYFEQENDWWVCKHIKKPIRSXVLSLDWHPNNVLLAAGSCDFKCRIFSAYIKEVEERPAPXPWGSKMPFGELMFESSSSCGWVHGVCFSASGSRVAWVSHDSXVCLADADKKMAVAXLASEXLPLLALXFIXDNSLVAAGHDCFPVLFXYDAAAGMLSFGGRLDVPKQSSQRGLXARERFQNLDKKASSEGGXAAGAGLDSLHKNSVSQISVLSGGKAKCSQFCXXGMDGGMSIWDVKSLESALKDLKIK

SEQ ID NO: 3268 - protein, 32 aa, Homo sapiens
  MOD_RES (21)..(21): Selenocysteine
MAYHSFLVEPISCHAWNKDRXRQPVPGEDRVA

SEQ ID NO: 3269 - protein, 165 aa, Homo sapiens
  MOD_RES (9)..(9): Selenocysteine
  MOD_RES (27)..(27): Selenocysteine
  MOD_RES (39)..(39): Selenocysteine
  MOD_RES (47)..(47): Selenocysteine
  MOD_RES (55)..(55): Selenocysteine
  MOD_RES (61)..(61): Selenocysteine
  MOD_RES (79)..(79): Selenocysteine
  MOD_RES (85)..(85): Selenocysteine
  MOD_RES (106)..(106): Selenocysteine
  MOD_RES (108)..(108): Selenocysteine
  MOD_RES (123)..(123): Selenocysteine
  MOD_RES (161)..(161): Selenocysteine
  MOD_RES (164)..(164): Selenocysteine
KEGRRASHXAPQVLFSHREPPLELKDXDAAVGDNIGYIXFVLFPRHXNASARDNXINLIHXFRDYLHYHIKCSKAYIHXRMRAKXSDFLKVLNRARPDAEKKEMKXIXFSLAELGPRKEKQEXNSCIHPENQIMLLMGEDVFIPLILGIRGGSGWQLKAGXLAXG

SEQ ID NO: 3270 - protein, 90 aa, Homo sapiens
  MOD_RES (14)..(14): Selenocysteine
  MOD_RES (34)..(34): Selenocysteine
  MOD_RES (53)..(53): Selenocysteine
MILLEVNNRIIEEXLALKFENAAAGNKPEAVEVXFADFDGVLYHISNPNGDKXKVMVSISLKFYKELQAHGADELLKRVYGSFLVNPESG

SEQ ID NO: 3271 - protein, 300 aa, Homo sapiens
  MOD_RES (14)..(14): Selenocysteine
  MOD_RES (34)..(34): Selenocysteine
  MOD_RES (53)..(53): Selenocysteine
  MOD_RES (151)..(151): Selenocysteine
  MOD_RES (162)..(162): Selenocysteine
  MOD_RES (167)..(167): Selenocysteine
  MOD_RES (194)..(194): Selenocysteine
  MOD_RES (212)..(212): Selenocysteine
  MOD_RES (224)..(224): Selenocysteine
  MOD_RES (232)..(232): Selenocysteine
  MOD_RES (240)..(240): Selenocysteine
  MOD_RES (246)..(246): Selenocysteine
  MOD_RES (264)..(264): Selenocysteine
  MOD_RES (270)..(270): Selenocysteine
  MOD_RES (291)..(291): Selenocysteine
  MOD_RES (293)..(293): Selenocysteine
  MOD_RES (296)..(296): Selenocysteine
MILLEVNNRIIEEXLALKFENAAAGNKPEAVEVXFADFDGVLYHISNPNGDKXKVMVSISLKFYKELQAHGADELLKRVYGSFLVNPESGYNVSLLYDLENLPASKDSIVHQAGMLKRNCFASVFEKYFQFQEEGKEGENRAVIHYRDDEXMYVESKKDRVXVVFSXVFKDDDDVVIGKVFMQEFKEGRRASHXAPQVLFSHREPPLELKDXDAAVGDNIGYIXFVLFPRHXNASARDNXINLIHXFRDYLHYHIKCSKAYIHXRMRAKXSDFLKVLNRARPDAEKKEMKXIXGKXFSSR

SEQ ID NO: 3272 - protein, 91 aa, Homo sapiens
  MOD_RES (14)..(14): Selenocysteine
  MOD_RES (34)..(34): Selenocysteine
  MOD_RES (53)..(53): Selenocysteine
MILLEVNNRIIEEXLALKFENAAAGNKPEAVEVXFADFDGVLYHISNPNGDKXKVMVSISLKFYKELQAHGADELLKRVYGSFLVNPESVF

SEQ ID NO: 3273 - protein, 38 aa, Homo sapiens
  MOD_RES (14)..(14): Selenocysteine
  MOD_RES (34)..(34): Selenocysteine
MILLEVNNRIIEEXLALKFENAAAGNKPEAVEVXFAGE

SEQ ID NO: 3274 - protein, 84 aa, Homo sapiens
  MOD_RES (5)..(5): Selenocysteine
  MOD_RES (28)..(28): Selenocysteine
  MOD_RES (31)..(31): Selenocysteine
  MOD_RES (59)..(59): Selenocysteine
  MOD_RES (64)..(64): Selenocysteine
MDPDXKLIGNMALLPIRSQFKGPAPREXKDXDIVDEAIYYFKANVFFKNYEIKNEADRXLIYIXLYISECLKKLQKCNSKSQGE

SEQ ID NO: 3275 - protein, 99 aa, Homo sapiens
  MOD_RES (13)..(13): Selenocysteine
  MOD_RES (36)..(36): Selenocysteine
  MOD_RES (39)..(39): Selenocysteine
  MOD_RES (67)..(67): Selenocysteine
  MOD_RES (72)..(72): Selenocysteine
MPAYHSSLMDPDXKLIGNMALLPIRSQFKGPAPREXKDXDIVDEAIYYFKANVFFKNYEIKNEADRXLIYIXLYISECLKKLQKCNSKSQEVMRAYLQQ

SEQ ID NO: 3276 - protein, 178 aa, Homo sapiens
  MOD_RES (13)..(13): Selenocysteine
  MOD_RES (36)..(36): Selenocysteine
  MOD_RES (39)..(39): Selenocysteine
  MOD_RES (67)..(67): Selenocysteine
  MOD_RES (72)..(72): Selenocysteine
  MOD_RES (97)..(97): Selenocysteine
  MOD_RES (101)..(101): Selenocysteine
  MOD_RES (140)..(140): Selenocysteine
  MOD_RES (161)..(161): Selenocysteine
MPAYHSSLMDPDXKLIGNMALLPIRSQFKGPAPREXKDXDIVDEAIYYFKANVFFKNYEIKNEADRXLIYIXLYISECLKKLQKCNSKSQGEKEMYXLGIXNFPIPGEPGFPLNAIYAKPANKQEDEVMRAYLQQLRQEXGLRLCEKVFDPQNDKPSKWWXCFVKRQFMNKSLSGPGQ

SEQ ID NO: 3277 - protein, 77 aa, Homo sapiens
  MOD_RES (29)..(29): Selenocysteine
  MOD_RES (33)..(33): Selenocysteine
MRFMMMRAENFFILRRKPVEGYDISFLIXNFHXEQMYKHKLVDFVIHFMEEIDKEISEMKLSVNARARIVAEEFLKN

SEQ ID NO: 3278 - protein, 78 aa, Homo sapiens
  MOD_RES (29)..(29): Selenocysteine
  MOD_RES (33)..(33): Selenocysteine
MRFMMMRAENFFILRRKPVEGYDISFLIXNFHXEQMYKHKLVDFVIHFMEEIDKEISEMKLSVNARARIVAEEFLKNF

SEQ ID NO: 3279 - protein, 168 aa, Homo sapiens
  MOD_RES (2)..(2): Selenocysteine
  MOD_RES (4)..(4): Selenocysteine
  MOD_RES (15)..(15): Selenocysteine
  MOD_RES (52)..(52): Selenocysteine
  MOD_RES (119)..(119): Selenocysteine
  MOD_RES (123)..(123): Selenocysteine
MXAXLRPYLSAVRAXLQAALCLENFSSQVVERHNKPEVEVRSSKELLLQPVXISRNEKEKVLIEGSINSVRVSIAVKQADEIEKILCHKFMRFMMMRAENFFILRRKPVEGYDISFLIXNFHXEQMYKHKLVDFVIHFMEEIDKEISEMKLSVNARARIVAEEFLKNF

SEQ ID NO: 3280 - protein, 113 aa, Homo sapiens
  MOD_RES (2)..(2): Selenocysteine
  MOD_RES (4)..(4): Selenocysteine
  MOD_RES (15)..(15): Selenocysteine
  MOD_RES (52)..(52): Selenocysteine
MXAXLRPYLSAVRAXLQAALCLENFSSQVVERHNKPEVEVRSSKELLLQPVXISRNEKEKVLIEGSINSVRVSIAVKQADEIEKILCHKFMRFMMMRAENFFILRRKPVEIIL

SEQ ID NO: 3281 - protein, 44 aa, Homo sapiens
  MOD_RES (2)..(2): Selenocysteine
  MOD_RES (4)..(4): Selenocysteine
  MOD_RES (15)..(15): Selenocysteine
MXAXLRPYLSAVRAXLQAALCLENFSSQVVERHNKPEVEVSPRQ

SEQ ID NO: 3282 - protein, 187 aa, Homo sapiens
  MOD_RES (11)..(11): Selenocysteine
  MOD_RES (21)..(21): Selenocysteine
  MOD_RES (23)..(23): Selenocysteine
  MOD_RES (34)..(34): Selenocysteine
  MOD_RES (71)..(71): Selenocysteine
  MOD_RES (138)..(138): Selenocysteine
  MOD_RES (142)..(142): Selenocysteine
MVREPGPRPGXPGCSASGQWXAXLRPYLSAVRAXLQAALCLENFSSQVVERHNKPEVEVRSSKELLLQPVXISRNEKEKVLIEGSINSVRVSIAVKQADEIEKILCHKFMRFMMMRAENFFILRRKPVEGYDISFLIXNFHXEQMYKHKLVDFVIHFMEEIDKEISEMKLSVNARARIVAEEFLKNF

SEQ ID NO: 3283 - protein, 154 aa, Homo sapiens
  MOD_RES (5)..(5): Selenocysteine
  MOD_RES (51)..(51): Selenocysteine
  MOD_RES (55)..(55): Selenocysteine
  MOD_RES (69)..(69): Selenocysteine
  MOD_RES (149)..(149): Selenocysteine
  MOD_RES (153)..(153): Selenocysteine
MSKNXVSSARFRKVDVDEYDENKFVDEEDGGDGQAGPDEGEVDSCLRHSIXGNMXAALQAALKNPPINXKSQAVKDRAGSIVLKVLISFKANDIEKAVQSLDKNGVDLLMKYIYKGFESPSDNSSAMLLQWHEKALAAGGVGSIVRVLXARKXV

SEQ ID NO: 3284 - protein, 151 aa, Homo sapiens
  MOD_RES (5)..(5): Selenocysteine
  MOD_RES (52)..(52): Selenocysteine
  MOD_RES (66)..(66): Selenocysteine
  MOD_RES (146)..(146): Selenocysteine
  MOD_RES (150)..(150): Selenocysteine
MSKNXVSSARFRKVDVDEYDENKFVDEEDGGDGQAGPDEGEVDSCLRQGNMXAALQAALKNPPINXKSQAVKDRAGSIVLKVLISFKANDIEKAVQSLDKNGVDLLMKYIYKGFESPSDNSSAMLLQWHEKALAAGGVGSIVRVLXARKXV

SEQ ID NO: 3285 - protein, 135 aa, Homo sapiens
  MOD_RES (5)..(5): Selenocysteine
  MOD_RES (52)..(52): Selenocysteine
  MOD_RES (66)..(66): Selenocysteine
MSKNXVSSARFRKVDVDEYDENKFVDEEDGGDGQAGPDEGEVDSCLRQGNMXAALQAALKNPPINXKSQAVKDRAGSIVLKVLISFKANDIEKAVQSLDKNGVDLLMKYIYKGFESPSDNSSAMLLQWHEKVPLV

SEQ ID NO: 3286 - protein, 72 aa, Homo sapiens
  MOD_RES (6)..(6): Selenocysteine
  MOD_RES (63)..(63): Selenocysteine
  MOD_RES (69)..(69): Selenocysteine
  MOD_RES (72)..(72): Selenocysteine
MEDKVXSPEKAEEAKLKARYPHLGQKPGGSDFLRKRLQKGQKYFDSGDYNMAKAKMKNKQLPXAAPDKXEVX

SEQ ID NO: 3287 - protein, 96 aa, Homo sapiens
  MOD_RES (6)..(6): Selenocysteine
  MOD_RES (63)..(63): Selenocysteine
  MOD_RES (69)..(69): Selenocysteine
  MOD_RES (72)..(72): Selenocysteine
  MOD_RES (78)..(78): Selenocysteine
MEDKVXSPEKAEEAKLKARYPHLGQKPGGSDFLRKRLQKGQKYFDSGDYNMAKAKMKNKQLPXAAPDKXEVXGDHIPXPQDLPQRKPSLVASKLAG

SEQ ID NO: 3288 - protein, 112 aa, Homo sapiens
  MOD_RES (22)..(22): Selenocysteine
  MOD_RES (79)..(79): Selenocysteine
  MOD_RES (85)..(85): Selenocysteine
  MOD_RES (88)..(88): Selenocysteine
  MOD_RES (94)..(94): Selenocysteine
MSAEVPEAASAEEQKEMEDKVXSPEKAEEAKLKARYPHLGQKPGGSDFLRKRLQKGQKYFDSGDYNMAKAKMKNKQLPXAAPDKXEVXGDHIPXPQDLPQRKPSLVASKLAG

SEQ ID NO: 3289 - protein, 71 aa, Homo sapiens
  MOD_RES (38)..(38): Selenocysteine
  MOD_RES (44)..(44): Selenocysteine
  MOD_RES (47)..(47): Selenocysteine
  MOD_RES (53)..(53): Selenocysteine
MSAEVPEAASAEEQKQKYFDSGDYNMAKAKMKNKQLPXAAPDKXEVXGDHIPXPQDLPQRKPSLVASKLAG

SEQ ID NO: 3290 - protein, 131 aa, Homo sapiens
  MOD_RES (41)..(41): Selenocysteine
  MOD_RES (98)..(98): Selenocysteine
  MOD_RES (104)..(104): Selenocysteine
  MOD_RES (107)..(107): Selenocysteine
  MOD_RES (113)..(113): Selenocysteine
MSAEVPEAASAEEQKSEHNMLPWSLQPSIPNSLEEMEDKVXSPEKAEEAKLKARYPHLGQKPGGSDFLRKRLQKGQKYFDSGDYNMAKAKMKNKQLPXAAPDKXEVXGDHIPXPQDLPQRKPSLVASKLAG

SEQ ID NO: 3291 - protein, 97 aa, Homo sapiens
  MOD_RES (3)..(3): Selenocysteine
  MOD_RES (19)..(19): Selenocysteine
  MOD_RES (28)..(28): Selenocysteine
  MOD_RES (44)..(44): Selenocysteine
  MOD_RES (62)..(62): Selenocysteine
  MOD_RES (67)..(67): Selenocysteine
  MOD_RES (74)..(74): Selenocysteine
MLXCAFRYGRDDLEVIGLXFRKDLYVQXLQVVPAESSSPQGPLXVLQERLLHKLGDNAYPFXLQMVXNLPCSVXLQPGPEDAGKPCGIDFEVKSFCA

SEQ ID NO: 3292 - protein, 359 aa, Homo sapiens
  MOD_RES (8)..(8): Selenocysteine
  MOD_RES (29)..(29): Selenocysteine
  MOD_RES (54)..(54): Selenocysteine
  MOD_RES (70)..(70): Selenocysteine
  MOD_RES (79)..(79): Selenocysteine
  MOD_RES (95)..(95): Selenocysteine
  MOD_RES (113)..(113): Selenocysteine
  MOD_RES (118)..(118): Selenocysteine
  MOD_RES (125)..(125): Selenocysteine
  MOD_RES (154)..(154): Selenocysteine
  MOD_RES (183)..(183): Selenocysteine
  MOD_RES (221)..(221): Selenocysteine
  MOD_RES (236)..(236): Selenocysteine
  MOD_RES (247)..(247): Selenocysteine
  MOD_RES (249)..(249): Selenocysteine
  MOD_RES (256)..(256): Selenocysteine
  MOD_RES (258)..(258): Selenocysteine
  MOD_RES (272)..(272): Selenocysteine
  MOD_RES (295)..(295): Selenocysteine
  MOD_RES (301)..(301): Selenocysteine
  MOD_RES (336)..(336): Selenocysteine
MSKVFKKXSSNGKLSIYLGKRDFVDHVDXVEPIDGVVLVDPEYLKCRKLFVMLXCAFRYGRDDLEVIGLXFRKDLYVQXLQVVPAESSSPQGPLXVLQERLLHKLGDNAYPFXLQMVXNLPCSVXLQPGPEDAGKPCGIDFEVKSFCAENPEEXVSKRDYVRLVVRKVQFAPPEAGPGPSAQXIRRFLLSAQPLQLQAWMDREVHYHGEPISVNVSINNCXNKVIKKIKISVDQIXDVVLYSLDKYXKXVFIQEFXEXVAANSSFSQSFAVXPILAASCQKRGLALDGKLKHEDXNLASSXIIRPGMDKELLGILVSYKVRVNLMVSCGGILGDLXASDVGVELPLVLIHPKPSHEAAR

SEQ ID NO: 3293 - protein, 388 aa, Homo sapiens
  MOD_RES (8)..(8): Selenocysteine
  MOD_RES (29)..(29): Selenocysteine
  MOD_RES (54)..(54): Selenocysteine
  MOD_RES (70)..(70): Selenocysteine
  MOD_RES (79)..(79): Selenocysteine
  MOD_RES (95)..(95): Selenocysteine
  MOD_RES (113)..(113): Selenocysteine
  MOD_RES (118)..(118): Selenocysteine
  MOD_RES (125)..(125): Selenocysteine
  MOD_RES (154)..(154): Selenocysteine
  MOD_RES (183)..(183): Selenocysteine
  MOD_RES (221)..(221): Selenocysteine
  MOD_RES (236)..(236): Selenocysteine
  MOD_RES (247)..(247): Selenocysteine
  MOD_RES (249)..(249): Selenocysteine
  MOD_RES (256)..(256): Selenocysteine
  MOD_RES (258)..(258): Selenocysteine
  MOD_RES (272)..(272): Selenocysteine
  MOD_RES (295)..(295): Selenocysteine
  MOD_RES (301)..(301): Selenocysteine
  MOD_RES (336)..(336): Selenocysteine
  MOD_RES (369)..(369): Selenocysteine
MSKVFKKXSSNGKLSIYLGKRDFVDHVDXVEPIDGVVLVDPEYLKCRKLFVMLXCAFRYGRDDLEVIGLXFRKDLYVQXLQVVPAESSSPQGPLXVLQERLLHKLGDNAYPFXLQMVXNLPCSVXLQPGPEDAGKPCGIDFEVKSFCAENPEEXVSKRDYVRLVVRKVQFAPPEAGPGPSAQXIRRFLLSAQPLQLQAWMDREVHYHGEPISVNVSINNCXNKVIKKIKISVDQIXDVVLYSLDKYXKXVFIQEFXEXVAANSSFSQSFAVXPILAASCQKRGLALDGKLKHEDXNLASSXIIRPGMDKELLGILVSYKVRVNLMVSCGGILGDLXASDVGVELPLVLIHPKPSHEAASSEDIVIEEFXRKGEEESQKAVEAEGDEGS

SEQ ID NO: 3294 - protein, 388 aa, Homo sapiens
  MOD_RES (8)..(8): Selenocysteine
  MOD_RES (29)..(29): Selenocysteine
  MOD_RES (54)..(54): Selenocysteine
  MOD_RES (70)..(70): Selenocysteine
  MOD_RES (79)..(79): Selenocysteine
  MOD_RES (95)..(95): Selenocysteine
  MOD_RES (113)..(113): Selenocysteine
  MOD_RES (118)..(118): Selenocysteine
  MOD_RES (125)..(125): Selenocysteine
  MOD_RES (154)..(154): Selenocysteine
  MOD_RES (183)..(183): Selenocysteine
  MOD_RES (221)..(221): Selenocysteine
  MOD_RES (236)..(236): Selenocysteine
  MOD_RES (247)..(247): Selenocysteine
  MOD_RES (249)..(249): Selenocysteine
  MOD_RES (256)..(256): Selenocysteine
  MOD_RES (258)..(258): Selenocysteine
  MOD_RES (272)..(272): Selenocysteine
  MOD_RES (295)..(295): Selenocysteine
  MOD_RES (301)..(301): Selenocysteine
  MOD_RES (336)..(336): Selenocysteine
  MOD_RES (369)..(369): Selenocysteine
MSKVFKKXSSNGKLSIYLGKRDFVDHVDXVEPIDGVVLVDPEYLKCRKLFVMLXCAFRYGRDDLEVIGLXFRKDLYVQXLQVVPAESSSPQGPLXVLQERLLHKLGDNAYPFXLQMVXNLPCSVXLQPGPEDAGKPCGIDFEVKSFCAENPEEXVSKRDYVRLVVRKVQFAPPEAGPGPSAQXIRRFLLSAQPLQLQAWMDREVHYHGEPISVNVSINNCXNKVIKKIKISVDQIXDVVLYSLDKYXKXVFIQEFXEXVAANSSFSQSFAVXPILAASCQKRGLALDGKLKHEDXNLASSXIIRPGMDKELLGILVSYKVRVNLMVSCGGILGDLXASDVGVELPLVLIHPKPSHASASSEDIVIEEFXRKGEEESQKAVEAEGDEGS

SEQ ID NO: 3295 - protein, 410 aa, Homo sapiens
  MOD_RES (6)..(6): Selenocysteine
  MOD_RES (19)..(19): Selenocysteine
  MOD_RES (56)..(56): Selenocysteine
  MOD_RES (58)..(58): Selenocysteine
  MOD_RES (74)..(74): Selenocysteine
  MOD_RES (98)..(98): Selenocysteine
  MOD_RES (116)..(116): Selenocysteine
  MOD_RES (128)..(128): Selenocysteine
  MOD_RES (136)..(136): Selenocysteine
  MOD_RES (183)..(183): Selenocysteine
  MOD_RES (186)..(187): Selenocysteine
  MOD_RES (221)..(221): Selenocysteine
  MOD_RES (224)..(224): Selenocysteine
  MOD_RES (227)..(227): Selenocysteine
  MOD_RES (246)..(246): Selenocysteine
  MOD_RES (261)..(261): Selenocysteine
  MOD_RES (267)..(267): Selenocysteine
  MOD_RES (273)..(273): Selenocysteine
  MOD_RES (275)..(275): Selenocysteine
  MOD_RES (298)..(298): Selenocysteine
  MOD_RES (304)..(304): Selenocysteine
  MOD_RES (342)..(342): Selenocysteine
  MOD_RES (362)..(362): Selenocysteine
  MOD_RES (366)..(366): Selenocysteine
  MOD_RES (373)..(373): Selenocysteine
  MOD_RES (402)..(402): Selenocysteine
MGDKGXRVFKKASPNGKLXVYLGKRDFVDHIDLVDPVDGVVLVDPEYLKERRVYVXLXCAFRYGREDLDVLGLXFRKDLFVANVQSFPPAPEDKKPLXRLQERLIKKLGEHAYPFXFEIPPNLPCSVXLQPGPEDXGKACGVDYEVKAFCAENLEEKIHKRNSVRLVIRKVQYAPERPGPQPXAEXXRQFLMSDKPLHLEASLDKEIYYHGEPISVNVHVXNNXNKXVKKIKISVRQYADICLFNXAQYKCPVAMEEADDXVAPSSXFCKVYXLXPFLANNREKRGLALDGKLKHEDXNLASSXLLREGANREILGIIVSYKVKVKLVVSRGGDVAVELPFXLMHPKPKEEPPHREVPENEXPVDXNLIELDXNDDDIVFEDFARQRLKGMKDDKEEEEDGXGSPQLNNR

SEQ ID NO: 3296 - protein, 418 aa, Homo sapiens
  MOD_RES (6)..(6): Selenocysteine
  MOD_RES (19)..(19): Selenocysteine
  MOD_RES (56)..(56): Selenocysteine
  MOD_RES (58)..(58): Selenocysteine
  MOD_RES (74)..(74): Selenocysteine
  MOD_RES (98)..(98): Selenocysteine
  MOD_RES (116)..(116): Selenocysteine
  MOD_RES (128)..(128): Selenocysteine
  MOD_RES (136)..(136): Selenocysteine
  MOD_RES (183)..(183): Selenocysteine
  MOD_RES (186)..(187): Selenocysteine
  MOD_RES (221)..(221): Selenocysteine
  MOD_RES (224)..(224): Selenocysteine
  MOD_RES (227)..(227): Selenocysteine
  MOD_RES (246)..(246): Selenocysteine
  MOD_RES (261)..(261): Selenocysteine
  MOD_RES (267)..(267): Selenocysteine
  MOD_RES (273)..(273): Selenocysteine
  MOD_RES (275)..(275): Selenocysteine
  MOD_RES (298)..(298): Selenocysteine
  MOD_RES (304)..(304): Selenocysteine
  MOD_RES (350)..(350): Selenocysteine
  MOD_RES (370)..(370): Selenocysteine
  MOD_RES (374)..(374): Selenocysteine
  MOD_RES (381)..(381): Selenocysteine
  MOD_RES (410)..(410): Selenocysteine
MGDKGXRVFKKASPNGKLXVYLGKRDFVDHIDLVDPVDGVVLVDPEYLKERRVYVXLXCAFRYGREDLDVLGLXFRKDLFVANVQSFPPAPEDKKPLXRLQERLIKKLGEHAYPFXFEIPPNLPCSVXLQPGPEDXGKACGVDYEVKAFCAENLEEKIHKRNSVRLVIRKVQYAPERPGPQPXAEXXRQFLMSDKPLHLEASLDKEIYYHGEPISVNVHVXNNXNKXVKKIKISVRQYADICLFNXAQYKCPVAMEEADDXVAPSSXFCKVYXLXPFLANNREKRGLALDGKLKHEDXNLASSXLLREGANREILGIIVSYKVKVKLVVSRGGLLGDLASSDVAVELPFXLMHPKPKEEPPHREVPENEXPVDXNLIELDXNDDDIVFEDFARQRLKGMKDDKEEEEDGXGSPQLNNR

SEQ ID NO: 3297 - protein, 258 aa, Homo sapiens
  MOD_RES (14)..(14): Selenocysteine
  MOD_RES (51)..(51): Selenocysteine
  MOD_RES (53)..(53): Selenocysteine
  MOD_RES (69)..(69): Selenocysteine
  MOD_RES (93)..(93): Selenocysteine
  MOD_RES (111)..(111): Selenocysteine
  MOD_RES (123)..(123): Selenocysteine
  MOD_RES (131)..(131): Selenocysteine
  MOD_RES (178)..(178): Selenocysteine
  MOD_RES (181)..(182): Selenocysteine
  MOD_RES (216)..(216): Selenocysteine
  MOD_RES (219)..(219): Selenocysteine
  MOD_RES (222)..(222): Selenocysteine
  MOD_RES (241)..(241): Selenocysteine
  MOD_RES (256)..(256): Selenocysteine
MGVFKKASPNGKLXVYLGKRDFVDHIDLVDPVDGVVLVDPEYLKERRVYVXLXCAFRYGREDLDVLGLXFRKDLFVANVQSFPPAPEDKKPLXRLQERLIKKLGEHAYPFXFEIPPNLPCSVXLQPGPEDXGKACGVDYEVKAFCAENLEEKIHKRNSVRLVIRKVQYAPERPGPQPXAEXXRQFLMSDKPLHLEASLDKEIYYHGEPISVNVHVXNNXNKXVKKIKISVRQYADICLFNXAQYKCPVAMEEADDXVA

SEQ ID NO: 3298 - protein, 59 aa, Homo sapiens
SHCKRWERRGHGRRLAAGEAESVQEGQSKWKAHRLPGKAGLCGPHRPRGPCGWCGPGGS

SEQ ID NO: 3299 - protein, 69 aa, Homo sapiens
  MOD_RES (1)..(1): Any amino acid
  MOD_RES (13)..(13): Selenocysteine
  MOD_RES (36)..(36): Selenocysteine
  MOD_RES (41)..(41): Selenocysteine
  MOD_RES (44)..(45): Selenocysteine
  MOD_RES (47)..(47): Selenocysteine
  MOD_RES (50)..(50): Selenocysteine
XGGRRRERPAAAXARDGRGEAMEGDLQRERLSSPSXWESGXLWXXSXSWXLWMVWSWWILSISKSGESM

SEQ ID NO: 3300 - protein, 195 aa, Homo sapiens
  MOD_RES (1)..(1): Any amino acid
  MOD_RES (8)..(8): Selenocysteine
  MOD_RES (11)..(12): Selenocysteine
  MOD_RES (46)..(46): Selenocysteine
  MOD_RES (49)..(49): Selenocysteine
  MOD_RES (52)..(52): Selenocysteine
  MOD_RES (71)..(71): Selenocysteine
  MOD_RES (86)..(86): Selenocysteine
  MOD_RES (92)..(92): Selenocysteine
  MOD_RES (98)..(98): Selenocysteine
  MOD_RES (100)..(100): Selenocysteine
  MOD_RES (123)..(123): Selenocysteine
  MOD_RES (129)..(129): Selenocysteine
  MOD_RES (167)..(167): Selenocysteine
  MOD_RES (184)..(185): Selenocysteine
  MOD_RES (190)..(190): Selenocysteine
XRPGPQPXAEXXRQFLMSDKPLHLEASLDKEIYYHGEPISVNVHVXNNXNKXVKKIKISVRQYADICLFNXAQYKCPVAMEEADDXVAPSSXFCKVYXLXPFLANNREKRGLALDGKLKHEDXNLASSXLLREGANREILGIIVSYKVKVKLVVSRGGDVAVELPFXLMHPKPKEEPPHREVMXXLYLRXLLARD

SEQ ID NO: 3301 - protein, 72 aa, Homo sapiens
  MOD_RES (1)..(1): Any amino acid
  MOD_RES (14)..(15): Selenocysteine
  MOD_RES (17)..(17): Selenocysteine
  MOD_RES (39)..(39): Selenocysteine
  MOD_RES (44)..(44): Selenocysteine
  MOD_RES (47)..(48): Selenocysteine
  MOD_RES (50)..(50): Selenocysteine
  MOD_RES (53)..(53): Selenocysteine
XVCLPLPCRCSGEXXPXPGPVPSAECSRRPVQMESSPSXWESGXLWXXSXSWXLWMVWSWWILSISKSGESM

SEQ ID NO: 3302 - protein, 196 aa, Homo sapiens
  MOD_RES (4)..(4): Selenocysteine
  MOD_RES (9)..(9): Selenocysteine
  MOD_RES (46)..(46): Selenocysteine
  MOD_RES (48)..(48): Selenocysteine
  MOD_RES (73)..(73): Selenocysteine
  MOD_RES (88)..(88): Selenocysteine
  MOD_RES (108)..(108): Selenocysteine
  MOD_RES (118)..(118): Selenocysteine
  MOD_RES (126)..(126): Selenocysteine
  MOD_RES (176)..(177): Selenocysteine
GGEXRDQLXVYLGKRDFVDHLDKVDPVDGVVLVDPDYLKDRKVFVXLXCAFRYGREDLDVLGLSFRKDLFIAXYQAFPPVPNPPRPPXRLQDRLLRKLGQHAHPFFFXIPQNLPCSVXLQPGPEDXGKACGVDFEIRAFCAKSLEEKSHKRNSVRLVIRKVQFAPEKPGPQPSAEXXRHFLMSDRSLHLEASLDKE

SEQ ID NO: 3303 - protein, 330 aa, Homo sapiens
  MOD_RES (7)..(7): Selenocysteine
  MOD_RES (20)..(20): Selenocysteine
  MOD_RES (57)..(57): Selenocysteine
  MOD_RES (59)..(59): Selenocysteine
  MOD_RES (84)..(84): Selenocysteine
  MOD_RES (99)..(99): Selenocysteine
  MOD_RES (119)..(119): Selenocysteine
  MOD_RES (129)..(129): Selenocysteine
  MOD_RES (137)..(137): Selenocysteine
  MOD_RES (187)..(188): Selenocysteine
  MOD_RES (222)..(222): Selenocysteine
  MOD_RES (226)..(226): Selenocysteine
  MOD_RES (228)..(228): Selenocysteine
  MOD_RES (247)..(247): Selenocysteine
  MOD_RES (314)..(314): Selenocysteine
MGEKPGXRVFKKSSPNCKLXVYLGKRDFVDHLDKVDPVDGVVLVDPDYLKDRKVFVXLXCAFRYGREDLDVLGLSFRKDLFIAXYQAFPPVPNPPRPPXRLQDRLLRKLGQHAHPFFFXIPQNLPCSVXLQPGPEDXGKACGVDFEIRAFCAKSLEEKSHKRNSVRLVIRKVQFAPEKPGPQPSAEXXRHFLMSDRSLHLEASLDKELYYHGEPLNVNVHVXNNSXKXVKKIKVSVRQYADICLFSXAQYKCPVAQLEQDDQREGGCQQGGAGNPGVLQGQGEAGGVSRRGCLCGAAFCSYAPQAPRPHPPPQXPVSRSGDRCPCGHQPH

SEQ ID NO: 3304 - protein, 409 aa, Homo sapiens
  MOD_RES (7)..(7): Selenocysteine
  MOD_RES (20)..(20): Selenocysteine
  MOD_RES (57)..(57): Selenocysteine
  MOD_RES (59)..(59): Selenocysteine
  MOD_RES (84)..(84): Selenocysteine
  MOD_RES (99)..(99): Selenocysteine
  MOD_RES (119)..(119): Selenocysteine
  MOD_RES (129)..(129): Selenocysteine
  MOD_RES (137)..(137): Selenocysteine
  MOD_RES (187)..(188): Selenocysteine
  MOD_RES (222)..(222): Selenocysteine
  MOD_RES (226)..(226): Selenocysteine
  MOD_RES (228)..(228): Selenocysteine
  MOD_RES (247)..(247): Selenocysteine
  MOD_RES (268)..(268): Selenocysteine
  MOD_RES (274)..(274): Selenocysteine
  MOD_RES (276)..(276): Selenocysteine
  MOD_RES (299)..(299): Selenocysteine
  MOD_RES (305)..(305): Selenocysteine
  MOD_RES (365)..(365): Selenocysteine
  MOD_RES (371)..(371): Selenocysteine
  MOD_RES (378)..(378): Selenocysteine
  MOD_RES (382)..(382): Selenocysteine
MGEKPGXRVFKKSSPNCKLXVYLGKRDFVDHLDKVDPVDGVVLVDPDYLKDRKVFVXLXCAFRYGREDLDVLGLSFRKDLFIAXYQAFPPVPNPPRPPXRLQDRLLRKLGQHAHPFFFXIPQNLPCSVXLQPGPEDXGKACGVDFEIRAFCAKSLEEKSHKRNSVRLVIRKVQFAPEKPGPQPSAEXXRHFLMSDRSLHLEASLDKELYYHGEPLNVNVHVXNNSXKXVKKIKVSVRQYADICLFSXAQYKCPVAQLEQDDQVSPSSXFCKVYXIXPLLSDNREKRGLALDGKLKHEDXNLASSXIVKEGANKEVLGILVSYRVKVKLVVSRGGDVSVELPFVLMHPKPHDHIPLPRPQSAAPEXDVPVDXNLIEFDXNYAXDDDIVFEDFARLRLKGMKDDDYDDQLC

SEQ ID NO: 3305 - protein, 430 aa, Homo sapiens
  MOD_RES (7)..(7): Selenocysteine
  MOD_RES (20)..(20): Selenocysteine
  MOD_RES (57)..(57): Selenocysteine
  MOD_RES (59)..(59): Selenocysteine
  MOD_RES (84)..(84): Selenocysteine
  MOD_RES (99)..(99): Selenocysteine
  MOD_RES (119)..(119): Selenocysteine
  MOD_RES (135)..(135): Selenocysteine
  MOD_RES (150)..(150): Selenocysteine
  MOD_RES (158)..(158): Selenocysteine
  MOD_RES (208)..(209): Selenocysteine
  MOD_RES (243)..(243): Selenocysteine
  MOD_RES (247)..(247): Selenocysteine
  MOD_RES (249)..(249): Selenocysteine
  MOD_RES (268)..(268): Selenocysteine
  MOD_RES (289)..(289): Selenocysteine
  MOD_RES (295)..(295): Selenocysteine
  MOD_RES (297)..(297): Selenocysteine
  MOD_RES (320)..(320): Selenocysteine
  MOD_RES (326)..(326): Selenocysteine
  MOD_RES (386)..(386): Selenocysteine
  MOD_RES (392)..(392): Selenocysteine
  MOD_RES (399)..(399): Selenocysteine
  MOD_RES (403)..(403): Selenocysteine
MGEKPGXRVFKKSSPNCKLXVYLGKRDFVDHLDKVDPVDGVVLVDPDYLKDRKVFVXLXCAFRYGREDLDVLGLSFRKDLFIAXYQAFPPVPNPPRPPXRLQDRLLRKLGQHAHPFFFXVRMPLPSEGQGAGAGXVSGVGIPQNLPCSVXLQPGPEDXGKACGVDFEIRAFCAKSLEEKSHKRNSVRLVIRKVQFAPEKPGPQPSAEXXRHFLMSDRSLHLEASLDKELYYHGEPLNVNVHVXNNSXKXVKKIKVSVRQYADICLFSXAQYKCPVAQLEQDDQVSPSSXFCKVYXIXPLLSDNREKRGLALDGKLKHEDXNLASSXIVKEGANKEVLGILVSYRVKVKLVVSRGGDVSVELPFVLMHPKPHDHIPLPRPQSAAPEXDVPVDXNLIEFDXNYAXDDDIVFEDFARLRLKGMKDDDYDDQLC

SEQ ID NO: 3306 - protein, 64 aa, Homo sapiens
  MOD_RES (7)..(7): Selenocysteine
  MOD_RES (20)..(20): Selenocysteine
  MOD_RES (40)..(40): Selenocysteine
  MOD_RES (49)..(49): Selenocysteine
MGEKPGXRVFKKSSPNCKLXVYLGKRDFVDHLDKVDPVDXPESSMLRHXAARPRGYRKGLRRRL

SEQ ID NO: 3307 - protein, 394 aa, Homo sapiens
  MOD_RES (7)..(7): Selenocysteine
  MOD_RES (20)..(20): Selenocysteine
  MOD_RES (42)..(42): Selenocysteine
  MOD_RES (44)..(44): Selenocysteine
  MOD_RES (69)..(69): Selenocysteine
  MOD_RES (84)..(84): Selenocysteine
  MOD_RES (104)..(104): Selenocysteine
  MOD_RES (114)..(114): Selenocysteine
  MOD_RES (122)..(122): Selenocysteine
  MOD_RES (172)..(173): Selenocysteine
  MOD_RES (207)..(207): Selenocysteine
  MOD_RES (211)..(211): Selenocysteine
  MOD_RES (213)..(213): Selenocysteine
  MOD_RES (232)..(232): Selenocysteine
  MOD_RES (253)..(253): Selenocysteine
  MOD_RES (259)..(259): Selenocysteine
  MOD_RES (261)..(261): Selenocysteine
  MOD_RES (284)..(284): Selenocysteine
  MOD_RES (290)..(290): Selenocysteine
  MOD_RES (350)..(350): Selenocysteine
  MOD_RES (356)..(356): Selenocysteine
  MOD_RES (363)..(363): Selenocysteine
  MOD_RES (367)..(367): Selenocysteine
MGEKPGXRVFKKSSPNCKLXVYLGKRDFVDHLDKVDPVVFVXLXCAFRYGREDLDVLGLSFRKDLFIAXYQAFPPVPNPPRPPXRLQDRLLRKLGQHAHPFFFXIPQNLPCSVXLQPGPEDXGKACGVDFEIRAFCAKSLEEKSHKRNSVRLVIRKVQFAPEKPGPQPSAEXXRHFLMSDRSLHLEASLDKELYYHGEPLNVNVHVXNNSXKXVKKIKVSVRQYADICLFSXAQYKCPVAQLEQDDQVSPSSXFCKVYXIXPLLSDNREKRGLALDGKLKHEDXNLASSXIVKEGANKEVLGILVSYRVKVKLVVSRGGDVSVELPFVLMHPKPHDHIPLPRPQSAAPEXDVPVDXNLIEFDXNYAXDDDIVFEDFARLRLKGMKDDDYDDQLC

SEQ ID NO: 3308 - protein, 406 aa, Homo sapiens
  MOD_RES (7)..(7): Selenocysteine
  MOD_RES (20)..(20): Selenocysteine
  MOD_RES (42)..(42): Selenocysteine
  MOD_RES (44)..(44): Selenocysteine
  MOD_RES (69)..(69): Selenocysteine
  MOD_RES (84)..(84): Selenocysteine
  MOD_RES (104)..(104): Selenocysteine
  MOD_RES (114)..(114): Selenocysteine
  MOD_RES (122)..(122): Selenocysteine
  MOD_RES (172)..(173): Selenocysteine
  MOD_RES (207)..(207): Selenocysteine
  MOD_RES (211)..(211): Selenocysteine
  MOD_RES (213)..(213): Selenocysteine
  MOD_RES (232)..(232): Selenocysteine
  MOD_RES (253)..(253): Selenocysteine
  MOD_RES (259)..(259): Selenocysteine
  MOD_RES (261)..(261): Selenocysteine
  MOD_RES (284)..(284): Selenocysteine
  MOD_RES (290)..(290): Selenocysteine
  MOD_RES (348)..(348): Selenocysteine
  MOD_RES (350)..(350): Selenocysteine
  MOD_RES (362)..(362): Selenocysteine
  MOD_RES (368)..(368): Selenocysteine
  MOD_RES (375)..(375): Selenocysteine
  MOD_RES (379)..(379): Selenocysteine
MGEKPGXRVFKKSSPNCKLXVYLGKRDFVDHLDKVDPVVFVXLXCAFRYGREDLDVLGLSFRKDLFIAXYQAFPPVPNPPRPPXRLQDRLLRKLGQHAHPFFFXIPQNLPCSVXLQPGPEDXGKACGVDFEIRAFCAKSLEEKSHKRNSVRLVIRKVQFAPEKPGPQPSAEXXRHFLMSDRSLHLEASLDKELYYHGEPLNVNVHVXNNSXKXVKKIKVSVRQYADICLFSXAQYKCPVAQLEQDDQVSPSSXFCKVYXIXPLLSDNREKRGLALDGKLKHEDXNLASSXIVKEGANKEVLGILVSYRVKVKLVVSRGGDVSVELPFVLMHPKPHDHIPLPRPQSAPXPXPPLPVPPAAPEXDVPVDXNLIEFDXNYAXDDDIVFEDFARLRLKGMKDDDYDDQLC

SEQ ID NO: 3309 - protein, 74 aa, Homo sapiens
  MOD_RES (7)..(7): Selenocysteine
  MOD_RES (31)..(31): Selenocysteine
  MOD_RES (68)..(68): Selenocysteine
  MOD_RES (73)..(73): Selenocysteine
MGEKPGXRVFKKSSPNCKPLAAEAAQPEPAXGLGGAGLGPQARPQRRRPKASHVPVALLGANPSSPCXWASGXS

SEQ ID NO: 3310 - protein, 113 aa, Homo sapiens
  MOD_RES (30)..(30): Selenocysteine
  MOD_RES (34)..(34): Selenocysteine
  MOD_RES (36)..(36): Selenocysteine
  MOD_RES (55)..(55): Selenocysteine
  MOD_RES (76)..(76): Selenocysteine
  MOD_RES (82)..(82): Selenocysteine
  MOD_RES (84)..(84): Selenocysteine
  MOD_RES (107)..(107): Selenocysteine
  MOD_RES (113)..(113): Selenocysteine
MSDRSLHLEASLDKELYYHGEPLNVNVHVXNNSXKXVKKIKVSVRQYADICLFSXAQYKCPVAQLEQDDQVSPSSXFCKVYXIXPLLSDNREKRGLALDGKLKHEDXNLASSX

SEQ ID NO: 3311 - protein, 217 aa, Homo sapiens
  MOD_RES (30)..(30): Selenocysteine
  MOD_RES (34)..(34): Selenocysteine
  MOD_RES (36)..(36): Selenocysteine
  MOD_RES (55)..(55): Selenocysteine
  MOD_RES (76)..(76): Selenocysteine
  MOD_RES (82)..(82): Selenocysteine
  MOD_RES (84)..(84): Selenocysteine
  MOD_RES (107)..(107): Selenocysteine
  MOD_RES (113)..(113): Selenocysteine
  MOD_RES (173)..(173): Selenocysteine
  MOD_RES (179)..(179): Selenocysteine
  MOD_RES (186)..(186): Selenocysteine
  MOD_RES (190)..(190): Selenocysteine
MSDRSLHLEASLDKELYYHGEPLNVNVHVXNNSXKXVKKIKVSVRQYADICLFSXAQYKCPVAQLEQDDQVSPSSXFCKVYXIXPLLSDNREKRGLALDGKLKHEDXNLASSXIVKEGANKEVLGILVSYRVKVKLVVSRGGDVSVELPFVLMHPKPHDHIPLPRPQSAAPEXDVPVDXNLIEFDXNYAXDDDIVFEDFARLRLKGMKDDDYDDQLC

SEQ ID NO: 3312 - protein, 6 aa, Homo sapiens
MARGAR

SEQ ID NO: 3313 - protein, 407 aa, Homo sapiens
  MOD_RES (17)..(17): Selenocysteine
  MOD_RES (60)..(60): Selenocysteine
  MOD_RES (69)..(69): Selenocysteine
  MOD_RES (72)..(72): Selenocysteine
  MOD_RES (87)..(87): Selenocysteine
  MOD_RES (93)..(93): Selenocysteine
  MOD_RES (96)..(98): Selenocysteine
  MOD_RES (115)..(115): Selenocysteine
  MOD_RES (118)..(118): Selenocysteine
  MOD_RES (134)..(134): Selenocysteine
  MOD_RES (150)..(150): Selenocysteine
  MOD_RES (159)..(159): Selenocysteine
  MOD_RES (196)..(196): Selenocysteine
  MOD_RES (212)..(212): Selenocysteine
  MOD_RES (224)..(224): Selenocysteine
  MOD_RES (226)..(226): Selenocysteine
  MOD_RES (291)..(291): Selenocysteine
  MOD_RES (304)..(304): Selenocysteine
  MOD_RES (349)..(349): Selenocysteine
  MOD_RES (406)..(406): Selenocysteine
MLFDKVKAFSVQLDGAXAGVEPVFSGGQAVAGRVLLELSSAARVGALRLRARGRAHVHWXESRSAGSSXAYXQSYSERVEVVSHRAXLLAPDXGEXXXLPPGRHEFLFSFQLPPXLVXSFEGKHGSVRYCIKAXLHRPWVPARRARKVFXVIEPVDINXPALLAPQAGAREKVARSWYCNRGLVSLSAKIDRKGYXPGEVIPVFAEIDNGSXRPVLPRAAVVQXQXFMARGARKQKRAVVASLAGEPVGPGQRALWQGRALRIPPVGPSILHCRVLHVDYALKVCVDIPGXSKLLLELPLVIGXIPLHPFGSRSSSVGSHASFLLDWRLGALPERPEAPPEYSEVVADXEEAALGQSPFPLPQDPDMSLEGPFFAYIQEFRYRPPPLYSEEDPNPLLGDMRPRCMXC

SEQ ID NO: 3314 - protein, 322 aa, Homo sapiens
  MOD_RES (17)..(17): Selenocysteine
  MOD_RES (60)..(60): Selenocysteine
  MOD_RES (69)..(69): Selenocysteine
  MOD_RES (72)..(72): Selenocysteine
  MOD_RES (87)..(87): Selenocysteine
  MOD_RES (93)..(93): Selenocysteine
  MOD_RES (113)..(113): Selenocysteine
  MOD_RES (119)..(119): Selenocysteine
  MOD_RES (135)..(135): Selenocysteine
  MOD_RES (138)..(140): Selenocysteine
  MOD_RES (157)..(157): Selenocysteine
  MOD_RES (160)..(160): Selenocysteine
  MOD_RES (176)..(176): Selenocysteine
  MOD_RES (192)..(192): Selenocysteine
  MOD_RES (201)..(201): Selenocysteine
  MOD_RES (238)..(238): Selenocysteine
  MOD_RES (254)..(254): Selenocysteine
  MOD_RES (266)..(266): Selenocysteine
  MOD_RES (268)..(268): Selenocysteine
MLFDKVKAFSVQLDGAXAGVEPVFSGGQAVAGRVLLELSSAARVGALRLRARGRAHVHWXESRSAGSSXAYXQSYSERVEVVSHRAXLLAPGXDGGPLLQHQLCASHHLDGGXSVSPGXPAQPLSRLLFLLPADXGEXXXLPPGRHEFLFSFQLPPXLVXSFEGKHGSVRYCIKAXLHRPWVPARRARKVFXVIEPVDINXPALLAPQAGAREKVARSWYCNRGLVSLSAKIDRKGYXPGEVIPVFAEIDNGSXRPVLPRAAVVQXQXFMARGARKQKRAVVASLAGEPVGPGQRALWQGRALRIPPVGPSILHCRVLHVDY

SEQ ID NO: 3315 - protein, 402 aa, Homo sapiens
  MOD_RES (54)..(54): Selenocysteine
  MOD_RES (76)..(76): Selenocysteine
  MOD_RES (88)..(88): Selenocysteine
  MOD_RES (91)..(93): Selenocysteine
  MOD_RES (110)..(110): Selenocysteine
  MOD_RES (113)..(113): Selenocysteine
  MOD_RES (129)..(129): Selenocysteine
  MOD_RES (145)..(145): Selenocysteine
  MOD_RES (154)..(154): Selenocysteine
  MOD_RES (191)..(191): Selenocysteine
  MOD_RES (207)..(207): Selenocysteine
  MOD_RES (219)..(219): Selenocysteine
  MOD_RES (221)..(221): Selenocysteine
  MOD_RES (286)..(286): Selenocysteine
  MOD_RES (299)..(299): Selenocysteine
  MOD_RES (344)..(344): Selenocysteine
  MOD_RES (401)..(401): Selenocysteine
MRSGGVRSFALELARGPGGAYRGGERLCGRVLLEAAAPLRVRALEVKARGGAAXHWLEGRSVGVNAVSSDYAAAEXYLRRRQLLLRDXGEXXXLPPGRHEFLFSFQLPPXLVXSFEGKHGSVRYCIKAXLHRPWVPARRARKVFXVIEPVDINXPALLAPQAGAREKVARSWYCNRGLVSLSAKIDRKGYXPGEVIPVFAEIDNGSXRPVLPRAAVVQXQXFMARGARKQKRAVVASLAGEPVGPGQRALWQGRALRIPPVGPSILHCRVLHVDYALKVCVDIPGXSKLLLELPLVIGXIPLHPFGSRSSSVGSHASFLLDWRLGALPERPEAPPEYSEVVADXEEAALGQSPFPLPQDPDMSLEGPFFAYIQEFRYRPPPLYSEEDPNPLLGDMRPRCMXC

SEQ ID NO: 3316 - protein, 414 aa, Homo sapiens
  MOD_RES (10)..(10): Selenocysteine
  MOD_RES (29)..(29): Selenocysteine
  MOD_RES (39)..(39): Selenocysteine
  MOD_RES (60)..(60): Selenocysteine
  MOD_RES (69)..(69): Selenocysteine
  MOD_RES (72)..(72): Selenocysteine
  MOD_RES (76)..(76): Selenocysteine
  MOD_RES (104)..(104): Selenocysteine
  MOD_RES (121)..(121): Selenocysteine
  MOD_RES (125)..(125): Selenocysteine
  MOD_RES (157)..(157): Selenocysteine
  MOD_RES (166)..(166): Selenocysteine
  MOD_RES (176)..(176): Selenocysteine
  MOD_RES (180)..(180): Selenocysteine
  MOD_RES (187)..(187): Selenocysteine
  MOD_RES (203)..(203): Selenocysteine
  MOD_RES (231)..(231): Selenocysteine
  MOD_RES (260)..(260): Selenocysteine
  MOD_RES (262)..(262): Selenocysteine
  MOD_RES (311)..(311): Selenocysteine
  MOD_RES (321)..(321): Selenocysteine
  MOD_RES (354)..(354): Selenocysteine
MVLGKVKSLXISFDCLNDSNVPVYSSGDXVSGRVNLEVXGEIRVKSLKIHARGHAKVRWXESRNAGSNXAYXQNYXEEVEYFNHKDILIGHERDDDNSEEGFHXIHSGRHEYAFSFELPQXPLAXSFEGRHGSVRYWVKAELHRPWLLPVKLKKEFXVFEHIDINXPSLLSPQAGXKEKXLCCWFCXSGPISLSAKIERKGYXPGESIQIFAEIENCSSRMVVPKAAIYQXQAFYAKGKMKEVKQLVANLRGESLSSGKXEXWNGKLLKIPPVSPSILDCSIIRVEYSLMVYVDIPGAMDLFLNLPLVIGXIPLHPFGSRXSSVSSQCSMNMNWLSLSLPERPEAPPSYAEVVXEEQRRNNLAPVSACDDFERALQGPLFAYIQEFRFLPPPLYSEIDPNPDQSADDRPSCPSR

SEQ ID NO: 3317 - protein, 342 aa, Homo sapiens
  MOD_RES (10)..(10): Selenocysteine
  MOD_RES (44)..(44): Selenocysteine
  MOD_RES (48)..(48): Selenocysteine
  MOD_RES (92)..(92): Selenocysteine
  MOD_RES (94)..(94): Selenocysteine
  MOD_RES (108)..(108): Selenocysteine
  MOD_RES (122)..(122): Selenocysteine
  MOD_RES (124)..(124): Selenocysteine
  MOD_RES (157)..(157): Selenocysteine
  MOD_RES (159)..(159): Selenocysteine
  MOD_RES (164)..(164): Selenocysteine
  MOD_RES (187)..(187): Selenocysteine
  MOD_RES (198)..(198): Selenocysteine
  MOD_RES (200)..(200): Selenocysteine
  MOD_RES (208)..(209): Selenocysteine
  MOD_RES (215)..(215): Selenocysteine
  MOD_RES (221)..(221): Selenocysteine
  MOD_RES (236)..(236): Selenocysteine
  MOD_RES (257)..(257): Selenocysteine
  MOD_RES (260)..(260): Selenocysteine
  MOD_RES (264)..(265): Selenocysteine
  MOD_RES (270)..(270): Selenocysteine
  MOD_RES (283)..(283): Selenocysteine
  MOD_RES (291)..(291): Selenocysteine
  MOD_RES (297)..(298): Selenocysteine
  MOD_RES (306)..(306): Selenocysteine
  MOD_RES (317)..(317): Selenocysteine
MGDREECLSXPQPPMSVVKSIELVLPEDRIYLAGSSIKGQVILXLNSXLVDPIVKVELVGRGYVEWSEEAGASCDYSRNVICNNKADYVHKXKXFPVEDNWLSAGSHXFDFHFNLPPRLPSXFXSKFGHVFYFVQASCMGREHILAKKRMYLLVQGXSXFHKEXPFQNPLFVEAEEKVSYNCCRQGXVCLQIQMERNXFXPGEKVVFXXEINNQXSKCIKXVVFALYAHIQYEGFXPSAERRSRLDSSELLRQEANXPVXRFNXXKVVSXFNLPLLLSVSSSXQDGEIMHXRYELVXXVHLPWSLXSLKAKVPIIIXSASVDSAICQLSEDGVLPVNPDHQN

SEQ ID NO: 3318 - protein, 89 aa, Homo sapiens
  MOD_RES (10)..(10): Selenocysteine
  MOD_RES (34)..(34): Selenocysteine
  MOD_RES (78)..(78): Selenocysteine
MELGLGGLSXLSHCPWPRQQAPLGLSAQPALWPXLAALALLSSVAEASLGSAPRSPAPREGPPPVLASPAGHLPGGRXARWCSGRARRP

SEQ ID NO: 3319 - protein, 228 aa, Homo sapiens
  MOD_RES (10)..(10): Selenocysteine
  MOD_RES (34)..(34): Selenocysteine
  MOD_RES (78)..(78): Selenocysteine
  MOD_RES (199)..(199): Selenocysteine
  MOD_RES (212)..(212): Selenocysteine
  MOD_RES (215)..(215): Selenocysteine
  MOD_RES (222)..(222): Selenocysteine
MELGLGGLSXLSHCPWPRQQAPLGLSAQPALWPXLAALALLSSVAEASLGSAPRSPAPREGPPPVLASPAGHLPGGRXARWCSGRARRPPPQPSRPAPPPPAPPSALPRGGRAARAGGPGSRARAAGARGCRLRSQLVPVRALGLGHRSDELVRFRFCSGSCRRARSPHDLSLASLLGAGALRPPPGSRPVSQPCCRPXRYEAVSFMDVNSXWRXVDRLSAXACGCLG

SEQ ID NO: 3320 - protein, 76 aa, Homo sapiens
  MOD_RES (10)..(10): Selenocysteine
  MOD_RES (34)..(34): Selenocysteine
MELGLGGLSXLSHCPWPRQQAPLGLSAQPALWPXLAALALLSSVAEASLGSAPRSPAPREGPPPVLASPAGHLPGR

SEQ ID NO: 3321 - protein, 66 aa, Homo sapiens
  MOD_RES (10)..(10): Selenocysteine
  MOD_RES (26)..(26): Selenocysteine
MELGLGGLSXLSHCPWPRQQPALWPXLAALALLSSVAEASLGSAPRSPAPREGPPPVLASPAGHLP

SEQ ID NO: 3322 - protein, 220 aa, Homo sapiens
  MOD_RES (10)..(10): Selenocysteine
  MOD_RES (26)..(26): Selenocysteine
  MOD_RES (70)..(70): Selenocysteine
  MOD_RES (191)..(191): Selenocysteine
  MOD_RES (204)..(204): Selenocysteine
  MOD_RES (207)..(207): Selenocysteine
  MOD_RES (214)..(214): Selenocysteine
MELGLGGLSXLSHCPWPRQQPALWPXLAALALLSSVAEASLGSAPRSPAPREGPPPVLASPAGHLPGGRXARWCSGRARRPPPQPSRPAPPPPAPPSALPRGGRAARAGGPGSRARAAGARGCRLRSQLVPVRALGLGHRSDELVRFRFCSGSCRRARSPHDLSLASLLGAGALRPPPGSRPVSQPCCRPXRYEAVSFMDVNSXWRXVDRLSAXACGCLG

SEQ ID NO: 3323 - protein, 237 aa, Homo sapiens
  MOD_RES (43)..(43): Selenocysteine
  MOD_RES (87)..(87): Selenocysteine
  MOD_RES (208)..(208): Selenocysteine
  MOD_RES (221)..(221): Selenocysteine
  MOD_RES (224)..(224): Selenocysteine
  MOD_RES (231)..(231): Selenocysteine
MPGLISARGQPLLEVLPPQAHLGALFLPEAPLGLSAQPALWPXLAALALLSSVAEASLGSAPRSPAPREGPPPVLASPAGHLPGGRXARWCSGRARRPPPQPSRPAPPPPAPPSALPRGGRAARAGGPGSRARAAGARGCRLRSQLVPVRALGLGHRSDELVRFRFCSGSCRRARSPHDLSLASLLGAGALRPPPGSRPVSQPCCRPXRYEAVSFMDVNSXWRXVDRLSAXACGCLG

SEQ ID NO: 3324 - protein, 562 aa, Homo sapiens
  MOD_RES (22)..(22): Selenocysteine
  MOD_RES (55)..(55): Selenocysteine
  MOD_RES (116)..(116): Selenocysteine
  MOD_RES (118)..(118): Selenocysteine
  MOD_RES (132)..(132): Selenocysteine
  MOD_RES (158)..(158): Selenocysteine
  MOD_RES (199)..(199): Selenocysteine
  MOD_RES (221)..(221): Selenocysteine
  MOD_RES (223)..(223): Selenocysteine
  MOD_RES (271)..(271): Selenocysteine
  MOD_RES (284)..(284): Selenocysteine
  MOD_RES (333)..(334): Selenocysteine
  MOD_RES (336)..(336): Selenocysteine
  MOD_RES (350)..(350): Selenocysteine
  MOD_RES (357)..(357): Selenocysteine
  MOD_RES (368)..(368): Selenocysteine
  MOD_RES (393)..(393): Selenocysteine
  MOD_RES (407)..(407): Selenocysteine
  MOD_RES (431)..(431): Selenocysteine
  MOD_RES (464)..(464): Selenocysteine
  MOD_RES (487)..(487): Selenocysteine
  MOD_RES (492)..(492): Selenocysteine
  MOD_RES (496)..(496): Selenocysteine
  MOD_RES (505)..(505): Selenocysteine
  MOD_RES (522)..(522): Selenocysteine
  MOD_RES (547)..(547): Selenocysteine
  MOD_RES (555)..(555): Selenocysteine
  MOD_RES (557)..(557): Selenocysteine
MSNQYQEEGCSERPECKSKSPXLLSSYCIDSILGRRSPCKMRLLGAAQSLPAPLXSRADPEKAVQGSPKSSSAPFEAELHLPPKLRRLYGPGGGRLLQGAAAAAAAAAAAAAAAAXAXAGPRGEAPPPPPPXARPGERPDGAGAAAAAAAAAAAAWDXLKISQAPQVSISRSKSYRENGAPFVPPPPALDELGGPGGVXHPEERLGVAGGPGSAPAAGGGXGXEDDEEELLEDEEDEDEEEELLEDDEEELLEDDARALLKEPRRCPVAAXGAVAAAAAAAVAXEGGELSPKEELLLHPEDAEGKDGEDSVCLSAGSDSEEGLLKRKQRRYRXXFXSYQLEELERAFQKXHYPDVFXREELAMRLDLXEARVQVWFQNRRAKWRKREKAGAQXHPPGLPFPGPLSAXHPLSPYLDASPFPPHHPALDSAWXAAAAAAAAAFPSLPPPPGSASLPPSGAPLGLSXFLGAAVFRHPAFISPAFGRLFSXMAPLXSASXAAALLRQPXPAVEGAVASGALADPAXAAADRRASSIAALRLKAKEHAAQLXQLNILPGXSXGKEVC

SEQ ID NO: 3325 - protein, 48 aa, Homo sapiens
  MOD_RES (1)..(1): Any amino acid
  MOD_RES (2)..(2): Selenocysteine
  MOD_RES (34)..(35): Selenocysteine
  MOD_RES (45)..(45): Selenocysteine
XXFLGAAVFRHPAFISPAFGRLHLPCHSSDPLPXXPPYVQAPIYXAVQ

SEQ ID NO: 3326 - protein, 51 aa, Homo sapiens
  MOD_RES (9)..(9): Selenocysteine
  MOD_RES (15)..(15): Selenocysteine
  MOD_RES (32)..(32): Selenocysteine
AQRYEAASXIYGPHXLSAYIQLFRNLAKAIAXELHLWKSSLWMQLFMKLQL

SEQ ID NO: 3327 - protein, 144 aa, Homo sapiens
  MOD_RES (9)..(9): Selenocysteine
  MOD_RES (15)..(15): Selenocysteine
  MOD_RES (32)..(32): Selenocysteine
  MOD_RES (53)..(53): Selenocysteine
  MOD_RES (56)..(56): Selenocysteine
  MOD_RES (59)..(59): Selenocysteine
  MOD_RES (66)..(66): Selenocysteine
  MOD_RES (68)..(68): Selenocysteine
  MOD_RES (81)..(81): Selenocysteine
  MOD_RES (96)..(96): Selenocysteine
  MOD_RES (104)..(104): Selenocysteine
  MOD_RES (135)..(135): Selenocysteine
  MOD_RES (143)..(143): Selenocysteine
AQRYEAASXIYGPHXLSAYIQLFRNLAKAIAXGEVAEVIFVGANPKNSVQNQXHQXFLXVEKYEAXSXSWQIVCNDASWEXRFYWHKGLLGLSNAXVEWHIPDXAQPGIYRIRYFGHNRKQDILKPAVILSFEGXSPAFEVVXI

SEQ ID NO: 3328 - protein, 745 aa, Homo sapiens
  MOD_RES (5)..(5): Selenocysteine
  MOD_RES (11)..(11): Selenocysteine
  MOD_RES (24)..(24): Selenocysteine
  MOD_RES (34)..(34): Selenocysteine
  MOD_RES (37)..(37): Selenocysteine
  MOD_RES (51)..(52): Selenocysteine
  MOD_RES (58)..(58): Selenocysteine
  MOD_RES (62)..(62): Selenocysteine
  MOD_RES (68)..(68): Selenocysteine
  MOD_RES (70)..(70): Selenocysteine
  MOD_RES (74)..(74): Selenocysteine
  MOD_RES (76)..(76): Selenocysteine
  MOD_RES (80)..(80): Selenocysteine
  MOD_RES (82)..(82): Selenocysteine
  MOD_RES (84)..(84): Selenocysteine
  MOD_RES (90)..(90): Selenocysteine
  MOD_RES (112)..(112): Selenocysteine
  MOD_RES (135)..(135): Selenocysteine
  MOD_RES (153)..(153): Selenocysteine
  MOD_RES (193)..(193): Selenocysteine
  MOD_RES (195)..(195): Selenocysteine
  MOD_RES (206)..(206): Selenocysteine
  MOD_RES (219)..(219): Selenocysteine
  MOD_RES (225)..(225): Selenocysteine
  MOD_RES (236)..(236): Selenocysteine
  MOD_RES (277)..(277): Selenocysteine
  MOD_RES (365)..(365): Selenocysteine
  MOD_RES (375)..(375): Selenocysteine
  MOD_RES (397)..(397): Selenocysteine
  MOD_RES (412)..(412): Selenocysteine
  MOD_RES (425)..(425): Selenocysteine
  MOD_RES (435)..(435): Selenocysteine
  MOD_RES (439)..(439): Selenocysteine
  MOD_RES (447)..(447): Selenocysteine
  MOD_RES (473)..(473): Selenocysteine
  MOD_RES (493)..(493): Selenocysteine
  MOD_RES (500)..(500): Selenocysteine
  MOD_RES (507)..(508): Selenocysteine
  MOD_RES (531)..(531): Selenocysteine
  MOD_RES (542)..(542): Selenocysteine
  MOD_RES (546)..(547): Selenocysteine
  MOD_RES (561)..(561): Selenocysteine
  MOD_RES (567)..(567): Selenocysteine
  MOD_RES (584)..(584): Selenocysteine
  MOD_RES (586)..(586): Selenocysteine
  MOD_RES (619)..(619): Selenocysteine
  MOD_RES (654)..(654): Selenocysteine
  MOD_RES (657)..(657): Selenocysteine
  MOD_RES (660)..(660): Selenocysteine
  MOD_RES (667)..(667): Selenocysteine
  MOD_RES (669)..(669): Selenocysteine
  MOD_RES (682)..(682): Selenocysteine
  MOD_RES (697)..(697): Selenocysteine
  MOD_RES (705)..(705): Selenocysteine
  MOD_RES (736)..(736): Selenocysteine
  MOD_RES (744)..(744): Selenocysteine
MAKRXFSNLEXFLIFLLVMMSAIXVALLSLLFIXSGXIENHKDLGGHFFSXXQSPPAXQGSXAAQRSXAXQHSXAXQSSXAXQXSPVPLXPESPLFQNFSGYHIGVGRADCXGQVADINLMGYGKSGQNAQGILXRLYSRAFIMAEPDGSNRXVFVSIDIGMVSQRLRLEVLNRLQSKYGSLYRRDNVILSGXHXHSGPAGYFQYXVFVIASEGFSNQXFQHMVXGILKSIDIAHXNMKPGKIFINKGNVDGVQINRSPYSYLQNPQSERARYSSNXDKEMIVLKMVDLNGDDLGLISWFAIHPVSMNNSNHLVNSDNVGYASYLLEQEKNKGYLPGQGPFVAAFASSNLGDVSPNILGPRCINXGESCDNANSXCPIGGPSMCIAKGPGQDMFDSXQIIGRAMYQRAKSKXCKPALGYSFAAGXIDGVGGLNFXQGKXEGDPFWDXIRDQILGKPSEEIKECHKPKPILLHXGELSKPHPWHPDIVDVQIIXLGSLAIXAIPGEFXXMSGRRLREAVQAEFASHGMQNMXVVISGLCNVYXHYIXXYEEYQAQRYEAASXIYGPHXLSAYIQLFRNLAKAIAXDXVANLSRGPEPPFFKQLIVPLIPSIVDRAPKGRXFGDVLQPAKPEYRVGEVAEVIFVGANPKNSVQNQXHQXFLXVEKYEAXSXSWQIVCNDASWEXRFYWHKGLLGLSNAXVEWHIPDXAQPGIYRIRYFGHNRKQDILKPAVILSFEGXSPAFEVVXI

SEQ ID NO: 3329 - protein, 780 aa, Homo sapiens
  MOD_RES (5)..(5): Selenocysteine
  MOD_RES (11)..(11): Selenocysteine
  MOD_RES (24)..(24): Selenocysteine
  MOD_RES (34)..(34): Selenocysteine
  MOD_RES (37)..(37): Selenocysteine
  MOD_RES (51)..(52): Selenocysteine
  MOD_RES (58)..(58): Selenocysteine
  MOD_RES (62)..(62): Selenocysteine
  MOD_RES (68)..(68): Selenocysteine
  MOD_RES (70)..(70): Selenocysteine
  MOD_RES (74)..(74): Selenocysteine
  MOD_RES (76)..(76): Selenocysteine
  MOD_RES (80)..(80): Selenocysteine
  MOD_RES (82)..(82): Selenocysteine
  MOD_RES (84)..(84): Selenocysteine
  MOD_RES (90)..(90): Selenocysteine
  MOD_RES (112)..(112): Selenocysteine
  MOD_RES (135)..(135): Selenocysteine
  MOD_RES (153)..(153): Selenocysteine
  MOD_RES (193)..(193): Selenocysteine
  MOD_RES (195)..(195): Selenocysteine
  MOD_RES (206)..(206): Selenocysteine
  MOD_RES (219)..(219): Selenocysteine
  MOD_RES (225)..(225): Selenocysteine
  MOD_RES (236)..(236): Selenocysteine
  MOD_RES (277)..(277): Selenocysteine
  MOD_RES (365)..(365): Selenocysteine
  MOD_RES (375)..(375): Selenocysteine
  MOD_RES (397)..(397): Selenocysteine
  MOD_RES (420)..(420): Selenocysteine
  MOD_RES (433)..(433): Selenocysteine
  MOD_RES (436)..(436): Selenocysteine
  MOD_RES (442)..(442): Selenocysteine
  MOD_RES (447)..(447): Selenocysteine
  MOD_RES (460)..(460): Selenocysteine
  MOD_RES (470)..(470): Selenocysteine
  MOD_RES (474)..(474): Selenocysteine
  MOD_RES (482)..(482): Selenocysteine
  MOD_RES (508)..(508): Selenocysteine
  MOD_RES (528)..(528): Selenocysteine
  MOD_RES (535)..(535): Selenocysteine
  MOD_RES (542)..(543): Selenocysteine
  MOD_RES (566)..(566): Selenocysteine
  MOD_RES (577)..(577): Selenocysteine
  MOD_RES (581)..(582): Selenocysteine
  MOD_RES (596)..(596): Selenocysteine
  MOD_RES (602)..(602): Selenocysteine
  MOD_RES (619)..(619): Selenocysteine
  MOD_RES (621)..(621): Selenocysteine
  MOD_RES (654)..(654): Selenocysteine
  MOD_RES (689)..(689): Selenocysteine
  MOD_RES (692)..(692): Selenocysteine
  MOD_RES (695)..(695): Selenocysteine
  MOD_RES (702)..(702): Selenocysteine
  MOD_RES (704)..(704): Selenocysteine
  MOD_RES (717)..(717): Selenocysteine
  MOD_RES (732)..(732): Selenocysteine
  MOD_RES (740)..(740): Selenocysteine
  MOD_RES (771)..(771): Selenocysteine
  MOD_RES (779)..(779): Selenocysteine
MAKRXFSNLEXFLIFLLVMMSAIXVALLSLLFIXSGXIENHKDLGGHFFSXXQSPPAXQGSXAAQRSXAXQHSXAXQSSXAXQXSPVPLXPESPLFQNFSGYHIGVGRADCXGQVADINLMGYGKSGQNAQGILXRLYSRAFIMAEPDGSNRXVFVSIDIGMVSQRLRLEVLNRLQSKYGSLYRRDNVILSGXHXHSGPAGYFQYXVFVIASEGFSNQXFQHMVXGILKSIDIAHXNMKPGKIFINKGNVDGVQINRSPYSYLQNPQSERARYSSNXDKEMIVLKMVDLNGDDLGLISWFAIHPVSMNNSNHLVNSDNVGYASYLLEQEKNKGYLPGQGPFVAAFASSNLGDVSPNILGPRCINXGESCDNANSXCPIGGPSMCIAKGPGQDMFDSXQIIGRAMYQRAKELYASASQEVXGPLASAHQWVDMXDVXVWLNSXHASKXCKPALGYSFAAGXIDGVGGLNFXQGKXEGDPFWDXIRDQILGKPSEEIKECHKPKPILLHXGELSKPHPWHPDIVDVQIIXLGSLAIXAIPGEFXXMSGRRLREAVQAEFASHGMQNMXVVISGLCNVYXHYIXXYEEYQAQRYEAASXIYGPHXLSAYIQLFRNLAKAIAXDXVANLSRGPEPPFFKQLIVPLIPSIVDRAPKGRXFGDVLQPAKPEYRVGEVAEVIFVGANPKNSVQNQXHQXFLXVEKYEAXSXSWQIVCNDASWEXRFYWHKGLLGLSNAXVEWHIPDXAQPGIYRIRYFGHNRKQDILKPAVILSFEGXSPAFEVVXI

SEQ ID NO: 3330 - protein, 622 aa, Homo sapiens
  MOD_RES (35)..(35): Selenocysteine
  MOD_RES (37)..(37): Selenocysteine
  MOD_RES (48)..(48): Selenocysteine
  MOD_RES (61)..(61): Selenocysteine
  MOD_RES (67)..(67): Selenocysteine
  MOD_RES (78)..(78): Selenocysteine
  MOD_RES (119)..(119): Selenocysteine
  MOD_RES (207)..(207): Selenocysteine
  MOD_RES (217)..(217): Selenocysteine
  MOD_RES (239)..(239): Selenocysteine
  MOD_RES (262)..(262): Selenocysteine
  MOD_RES (275)..(275): Selenocysteine
  MOD_RES (278)..(278): Selenocysteine
  MOD_RES (284)..(284): Selenocysteine
  MOD_RES (289)..(289): Selenocysteine
  MOD_RES (302)..(302): Selenocysteine
  MOD_RES (312)..(312): Selenocysteine
  MOD_RES (316)..(316): Selenocysteine
  MOD_RES (324)..(324): Selenocysteine
  MOD_RES (350)..(350): Selenocysteine
  MOD_RES (370)..(370): Selenocysteine
  MOD_RES (377)..(377): Selenocysteine
  MOD_RES (384)..(385): Selenocysteine
  MOD_RES (408)..(408): Selenocysteine
  MOD_RES (419)..(419): Selenocysteine
  MOD_RES (423)..(424): Selenocysteine
  MOD_RES (438)..(438): Selenocysteine
  MOD_RES (444)..(444): Selenocysteine
  MOD_RES (461)..(461): Selenocysteine
  MOD_RES (463)..(463): Selenocysteine
  MOD_RES (496)..(496): Selenocysteine
  MOD_RES (531)..(531): Selenocysteine
  MOD_RES (534)..(534): Selenocysteine
  MOD_RES (537)..(537): Selenocysteine
  MOD_RES (544)..(544): Selenocysteine
  MOD_RES (546)..(546): Selenocysteine
  MOD_RES (559)..(559): Selenocysteine
  MOD_RES (574)..(574): Selenocysteine
  MOD_RES (582)..(582): Selenocysteine
  MOD_RES (613)..(613): Selenocysteine
  MOD_RES (621)..(621): Selenocysteine
MDSEKSSEWRSDVLNRLQSKYGSLYRRDNVILSGXHXHSGPAGYFQYXVFVIASEGFSNQXFQHMVXGILKSIDIAHXNMKPGKIFINKGNVDGVQINRSPYSYLQNPQSERARYSSNXDKEMIVLKMVDLNGDDLGLISWFAIHPVSMNNSNHLVNSDNVGYASYLLEQEKNKGYLPGQGPFVAAFASSNLGDVSPNILGPRCINXGESCDNANSXCPIGGPSMCIAKGPGQDMFDSXQIIGRAMYQRAKELYASASQEVXGPLASAHQWVDMXDVXVWLNSXHASKXCKPALGYSFAAGXIDGVGGLNFXQGKXEGDPFWDXIRDQILGKPSEEIKECHKPKPILLHXGELSKPHPWHPDIVDVQIIXLGSLAIXAIPGEFXXMSGRRLREAVQAEFASHGMQNMXVVISGLCNVYXHYIXXYEEYQAQRYEAASXIYGPHXLSAYIQLFRNLAKAIAXDXVANLSRGPEPPFFKQLIVPLIPSIVDRAPKGRXFGDVLQPAKPEYRVGEVAEVIFVGANPKNSVQNQXHQXFLXVEKYEAXSXSWQIVCNDASWEXRFYWHKGLLGLSNAXVEWHIPDXAQPGIYRIRYFGHNRKQDILKPAVILSFEGXSPAFEVVXI

SEQ ID NO: 3331 - protein, 726 aa, Homo sapiens
  MOD_RES (5)..(5): Selenocysteine
  MOD_RES (15)..(15): Selenocysteine
  MOD_RES (18)..(18): Selenocysteine
  MOD_RES (32)..(33): Selenocysteine
  MOD_RES (39)..(39): Selenocysteine
  MOD_RES (43)..(43): Selenocysteine
  MOD_RES (49)..(49): Selenocysteine
  MOD_RES (51)..(51): Selenocysteine
  MOD_RES (55)..(55): Selenocysteine
  MOD_RES (57)..(57): Selenocysteine
  MOD_RES (61)..(61): Selenocysteine
  MOD_RES (63)..(63): Selenocysteine
  MOD_RES (65)..(65): Selenocysteine
  MOD_RES (71)..(71): Selenocysteine
  MOD_RES (93)..(93): Selenocysteine
  MOD_RES (116)..(116): Selenocysteine
  MOD_RES (134)..(134): Selenocysteine
  MOD_RES (174)..(174): Selenocysteine
  MOD_RES (176)..(176): Selenocysteine
  MOD_RES (187)..(187): Selenocysteine
  MOD_RES (200)..(200): Selenocysteine
  MOD_RES (206)..(206): Selenocysteine
  MOD_RES (217)..(217): Selenocysteine
  MOD_RES (258)..(258): Selenocysteine
  MOD_RES (346)..(346): Selenocysteine
  MOD_RES (356)..(356): Selenocysteine
  MOD_RES (378)..(378): Selenocysteine
  MOD_RES (393)..(393): Selenocysteine
  MOD_RES (406)..(406): Selenocysteine
  MOD_RES (416)..(416): Selenocysteine
  MOD_RES (420)..(420): Selenocysteine
  MOD_RES (428)..(428): Selenocysteine
  MOD_RES (454)..(454): Selenocysteine
  MOD_RES (474)..(474): Selenocysteine
  MOD_RES (481)..(481): Selenocysteine
  MOD_RES (488)..(489): Selenocysteine
  MOD_RES (512)..(512): Selenocysteine
  MOD_RES (523)..(523): Selenocysteine
  MOD_RES (527)..(528): Selenocysteine
  MOD_RES (542)..(542): Selenocysteine
  MOD_RES (548)..(548): Selenocysteine
  MOD_RES (565)..(565): Selenocysteine
  MOD_RES (567)..(567): Selenocysteine
  MOD_RES (600)..(600): Selenocysteine
  MOD_RES (635)..(635): Selenocysteine
  MOD_RES (638)..(638): Selenocysteine
  MOD_RES (641)..(641): Selenocysteine
  MOD_RES (648)..(648): Selenocysteine
  MOD_RES (650)..(650): Selenocysteine
  MOD_RES (663)..(663): Selenocysteine
  MOD_RES (678)..(678): Selenocysteine
  MOD_RES (686)..(686): Selenocysteine
  MOD_RES (717)..(717): Selenocysteine
  MOD_RES (725)..(725): Selenocysteine
MSAIXVALLSLLFIXSGXIENHKDLGGHFFSXXQSPPAXQGSXAAQRSXAXQHSXAXQSSXAXQXSPVPLXPESPLFQNFSGYHIGVGRADCXGQVADINLMGYGKSGQNAQGILXRLYSRAFIMAEPDGSNRXVFVSIDIGMVSQRLRLEVLNRLQSKYGSLYRRDNVILSGXHXHSGPAGYFQYXVFVIASEGFSNQXFQHMVXGILKSIDIAHXNMKPGKIFINKGNVDGVQINRSPYSYLQNPQSERARYSSNXDKEMIVLKMVDLNGDDLGLISWFAIHPVSMNNSNHLVNSDNVGYASYLLEQEKNKGYLPGQGPFVAAFASSNLGDVSPNILGPRCINXGESCDNANSXCPIGGPSMCIAKGPGQDMFDSXQIIGRAMYQRAKSKXCKPALGYSFAAGXIDGVGGLNFXQGKXEGDPFWDXIRDQILGKPSEEIKECHKPKPILLHXGELSKPHPWHPDIVDVQIIXLGSLAIXAIPGEFXXMSGRRLREAVQAEFASHGMQNMXVVISGLCNVYXHYIXXYEEYQAQRYEAASXIYGPHXLSAYIQLFRNLAKAIAXDXVANLSRGPEPPFFKQLIVPLIPSIVDRAPKGRXFGDVLQPAKPEYRVGEVAEVIFVGANPKNSVQNQXHQXFLXVEKYEAXSXSWQIVCNDASWEXRFYWHKGLLGLSNAXVEWHIPDXAQPGIYRIRYFGHNRKQDILKPAVILSFEGXSPAFEVVXI

SEQ ID NO: 3332 - protein, 61 aa, Homo sapiens
  MOD_RES (20)..(20): Selenocysteine
  MOD_RES (48)..(48): Selenocysteine
  MOD_RES (61)..(61): Selenocysteine
MAEGGSPDGRAGPGSAAASXRSLSGAVAGSPAHRCESRPLQAMGAVWXSSSGRGPRWIWWX

SEQ ID NO: 3333 - protein, 234 aa, Homo sapiens
  MOD_RES (39)..(39): Selenocysteine
  MOD_RES (52)..(52): Selenocysteine
  MOD_RES (76)..(76): Selenocysteine
  MOD_RES (88)..(88): Selenocysteine
  MOD_RES (127)..(127): Selenocysteine
  MOD_RES (197)..(197): Selenocysteine
MAEGGSPDGRAGPGSAGRNLKEWLREQFCDHPLEHCEDXRLHDAAYVGDLQXLRSLLQEESYRRYGADVDVNHHLXPDVQPRFSRRLXSLVVCPLYISAAYHNLQCFRLLLLAGANPDFNCNGPVNXQGFYRGSPGCVMDAVLRHGCEAAFVSLLVEFGANLNLVKWESLGPESRGRRKVDPEALQVFKEARSVPRXLLCLCRVAVRRALGKHRLHLIPSLPLPDPIKKFLLHE

SEQ ID NO: 3334 - protein, 335 aa, Homo sapiens
  MOD_RES (39)..(39): Selenocysteine
  MOD_RES (52)..(52): Selenocysteine
  MOD_RES (80)..(80): Selenocysteine
  MOD_RES (87)..(87): Selenocysteine
  MOD_RES (113)..(113): Selenocysteine
  MOD_RES (127)..(127): Selenocysteine
  MOD_RES (146)..(146): Selenocysteine
  MOD_RES (177)..(177): Selenocysteine
  MOD_RES (189)..(189): Selenocysteine
  MOD_RES (228)..(228): Selenocysteine
  MOD_RES (298)..(298): Selenocysteine
MAEGGSPDGRAGPGSAGRNLKEWLREQFCDHPLEHCEDXRLHDAAYVGDLQXLRSLLQEESYRSRINEKSVWCCGWLPCXPLRIAAXAGHGSCVDFLIRKGAEVDLVDVKGQXALYVAVVNGHLESXQILLEAGADPNGSRHHRSXPVYHASRVGRADILKALIRYGADVDVNHHLXPDVQPRFSRRLXSLVVCPLYISAAYHNLQCFRLLLLAGANPDFNCNGPVNXQGFYRGSPGCVMDAVLRHGCEAAFVSLLVEFGANLNLVKWESLGPESRGRRKVDPEALQVFKEARSVPRXLLCLCRVAVRRALGKHRLHLIPSLPLPDPIKKFLLHE

SEQ ID NO: 3335 - protein, 429 aa, Homo sapiens
  MOD_RES (48)..(48): Selenocysteine
  MOD_RES (50)..(50): Selenocysteine
  MOD_RES (79)..(79): Selenocysteine
  MOD_RES (89)..(89): Selenocysteine
  MOD_RES (111)..(111): Selenocysteine
  MOD_RES (117)..(118): Selenocysteine
  MOD_RES (129)..(129): Selenocysteine
  MOD_RES (150)..(150): Selenocysteine
  MOD_RES (161)..(161): Selenocysteine
  MOD_RES (193)..(193): Selenocysteine
  MOD_RES (217)..(217): Selenocysteine
  MOD_RES (250)..(250): Selenocysteine
  MOD_RES (264)..(264): Selenocysteine
  MOD_RES (269)..(270): Selenocysteine
  MOD_RES (322)..(322): Selenocysteine
  MOD_RES (329)..(329): Selenocysteine
MLMSWSPEECKGQGEPLDDRHPLCARLVEKPSRGSEEHLKSGPGPIVXRXASGPALAFWQAVLAGDVGCVSRILADSSXGLAPDSVFDXSDPERWRDFRFNIRALRLWSLXYEEELXXPLHVAASRGHXEVLRLLLRRRARPDSAPGGRXALHEACAAGHXACVHVLLVAGADPNIADQDGKRPLHLCRGPGXLECAELLLRFGARVDGRSEEEEEXPLHVAARLGHVELADLLLRRGACPDARNAEGWXPLLAACDVRCQSIXDAEAXXARCLQLCSLLLSAGADADAADQDKQRPLHLACRRGHAAVVELLLSCGVSANXMDYGGHXPLHCALQGPAAALAQSPEHVVRALLNHGAVRVWPGALPKKHQRFYSSLFALVRQPRSLQHLSRCALRSHLEGSLPQALPRLPLPPRLLRYLQLDFEGVLY

SEQ ID NO: 3336 - protein, 467 aa, Homo sapiens
  MOD_RES (48)..(48): Selenocysteine
  MOD_RES (50)..(50): Selenocysteine
  MOD_RES (79)..(79): Selenocysteine
  MOD_RES (89)..(89): Selenocysteine
  MOD_RES (111)..(111): Selenocysteine
  MOD_RES (117)..(118): Selenocysteine
  MOD_RES (129)..(129): Selenocysteine
  MOD_RES (150)..(150): Selenocysteine
  MOD_RES (161)..(161): Selenocysteine
  MOD_RES (193)..(193): Selenocysteine
  MOD_RES (217)..(217): Selenocysteine
  MOD_RES (250)..(250): Selenocysteine
  MOD_RES (264)..(264): Selenocysteine
  MOD_RES (269)..(270): Selenocysteine
  MOD_RES (322)..(322): Selenocysteine
  MOD_RES (329)..(329): Selenocysteine
  MOD_RES (375)..(375): Selenocysteine
  MOD_RES (379)..(379): Selenocysteine
  MOD_RES (386)..(386): Selenocysteine
  MOD_RES (401)..(401): Selenocysteine
  MOD_RES (404)..(404): Selenocysteine
MLMSWSPEECKGQGEPLDDRHPLCARLVEKPSRGSEEHLKSGPGPIVXRXASGPALAFWQAVLAGDVGCVSRILADSSXGLAPDSVFDXSDPERWRDFRFNIRALRLWSLXYEEELXXPLHVAASRGHXEVLRLLLRRRARPDSAPGGRXALHEACAAGHXACVHVLLVAGADPNIADQDGKRPLHLCRGPGXLECAELLLRFGARVDGRSEEEEEXPLHVAARLGHVELADLLLRRGACPDARNAEGWXPLLAACDVRCQSIXDAEAXXARCLQLCSLLLSAGADADAADQDKQRPLHLACRRGHAAVVELLLSCGVSANXMDYGGHXPLHCALQGPAAALAQSPEHVVRALLNHGAVRVWPGALPKVLERWSXCPRXIEVLMNXYSVVQLPEEAVGLVXPEXLQKHQRFYSSLFALVRQPRSLQHLSRCALRSHLEGSLPQALPRLPLPPRLLRYLQLDFEGVLY

SEQ ID NO: 3337 - protein, 115 aa, Homo sapiens
  MOD_RES (56)..(56): Selenocysteine
  MOD_RES (71)..(71): Selenocysteine
  MOD_RES (106)..(106): Selenocysteine
  MOD_RES (110)..(110): Selenocysteine
MPWGKNSSPHWGHHLGCLPSAPACRIWRPHSRPAWEPPRPSPLLCQDMALQNALYXGDLARLQELFPPHSXADLLLESRAAEPRWSSHQRGEGHLGVAENQGAGLXASAXEVLRA

SEQ ID NO: 3338 - protein, 452 aa, Homo sapiens
  MOD_RES (56)..(56): Selenocysteine
  MOD_RES (71)..(71): Selenocysteine
  MOD_RES (96)..(96): Selenocysteine
  MOD_RES (102)..(103): Selenocysteine
  MOD_RES (114)..(114): Selenocysteine
  MOD_RES (135)..(135): Selenocysteine
  MOD_RES (146)..(146): Selenocysteine
  MOD_RES (178)..(178): Selenocysteine
  MOD_RES (202)..(202): Selenocysteine
  MOD_RES (235)..(235): Selenocysteine
  MOD_RES (249)..(249): Selenocysteine
  MOD_RES (254)..(255): Selenocysteine
  MOD_RES (307)..(307): Selenocysteine
  MOD_RES (314)..(314): Selenocysteine
  MOD_RES (360)..(360): Selenocysteine
  MOD_RES (364)..(364): Selenocysteine
  MOD_RES (371)..(371): Selenocysteine
  MOD_RES (386)..(386): Selenocysteine
  MOD_RES (389)..(389): Selenocysteine
MPWGKNSSPHWGHHLGCLPSAPACRIWRPHSRPAWEPPRPSPLLCQDMALQNALYXGDLARLQELFPPHSXADLLLESRAAEPRWSSHQRGLWSLXYEEELXXPLHVAASRGHXEVLRLLLRRRARPDSAPGGRXALHEACAAGHXACVHVLLVAGADPNIADQDGKRPLHLCRGPGXLECAELLLRFGARVDGRSEEEEEXPLHVAARLGHVELADLLLRRGACPDARNAEGWXPLLAACDVRCQSIXDAEAXXARCLQLCSLLLSAGADADAADQDKQRPLHLACRRGHAAVVELLLSCGVSANXMDYGGHXPLHCALQGPAAALAQSPEHVVRALLNHGAVRVWPGALPKVLERWSXCPRXIEVLMNXYSVVQLPEEAVGLVXPEXLQKHQRFYSSLFALVRQPRSLQHLSRCALRSHLEGSLPQALPRLPLPPRLLRYLQLDFEGVLY

SEQ ID NO: 3339 - protein, 306 aa, Homo sapiens
  MOD_RES (16)..(16): Selenocysteine
  MOD_RES (20)..(20): Selenocysteine
  MOD_RES (36)..(36): Selenocysteine
  MOD_RES (83)..(83): Selenocysteine
  MOD_RES (111)..(111): Selenocysteine
  MOD_RES (116)..(116): Selenocysteine
  MOD_RES (181)..(181): Selenocysteine
  MOD_RES (188)..(188): Selenocysteine
  MOD_RES (213)..(213): Selenocysteine
  MOD_RES (231)..(231): Selenocysteine
MEDGPVFYGFKNIFIXMFAXFFFFKLLIKVFLALLXHFYIVKGNRKEAARIAEEIYGGISDCWADRSPLHEAAAQGRLLALKXLIAQACLGGHVACAKALLENGAHVNGVXVHGAXPLFNACCSGSAACVNVLLEFGAKAQLEVHLASPIHEAVKRGHRECMEILLANNVNIDHEVPQLGXPLYVACXYQRVDCVKKLLELGASVDHGQWLDXPLHAAARQSNVEVIHLLXDYGANLKRRNAQGKSALDLAAPKSSVEQALLLREGPPALSQLCRLCVRKCLGRACHQAIHKLHLPEPLERFLLYQ

SEQ ID NO: 3340 - protein, 224 aa, Homo sapiens
  MOD_RES (16)..(16): Selenocysteine
  MOD_RES (20)..(20): Selenocysteine
  MOD_RES (36)..(36): Selenocysteine
  MOD_RES (83)..(83): Selenocysteine
  MOD_RES (95)..(95): Selenocysteine
  MOD_RES (128)..(128): Selenocysteine
  MOD_RES (133)..(133): Selenocysteine
MEDGPVFYGFKNIFIXMFAXFFFFKLLIKVFLALLXHFYIVKGNRKEAARIAEEIYGGISDCWADRSPLHEAAAQGRLLALKXLIAQGVNVNLVXINRVSSLHEACLGGHVACAKALLENGAHVNGVXVHGAXPLFNACCSGSAACVNVLLEFGAKAQLEVHLASPIHEAVKRESRAVAQAAVQWHDFCSLQPLAPGFKRFSCLSLPSSWDYRSQRVHGDPAGK

SEQ ID NO: 3341 - protein, 323 aa, Homo sapiens
  MOD_RES (16)..(16): Selenocysteine
  MOD_RES (20)..(20): Selenocysteine
  MOD_RES (36)..(36): Selenocysteine
  MOD_RES (83)..(83): Selenocysteine
  MOD_RES (95)..(95): Selenocysteine
  MOD_RES (128)..(128): Selenocysteine
  MOD_RES (133)..(133): Selenocysteine
  MOD_RES (198)..(198): Selenocysteine
  MOD_RES (205)..(205): Selenocysteine
  MOD_RES (230)..(230): Selenocysteine
  MOD_RES (248)..(248): Selenocysteine
MEDGPVFYGFKNIFIXMFAXFFFFKLLIKVFLALLXHFYIVKGNRKEAARIAEEIYGGISDCWADRSPLHEAAAQGRLLALKXLIAQGVNVNLVXINRVSSLHEACLGGHVACAKALLENGAHVNGVXVHGAXPLFNACCSGSAACVNVLLEFGAKAQLEVHLASPIHEAVKRGHRECMEILLANNVNIDHEVPQLGXPLYVACXYQRVDCVKKLLELGASVDHGQWLDXPLHAAARQSNVEVIHLLXDYGANLKRRNAQGKSALDLAAPKSSVEQALLLREGPPALSQLCRLCVRKCLGRACHQAIHKLHLPEPLERFLLYQ

SEQ ID NO: 3342 - protein, 302 aa, Homo sapiens
  MOD_RES (5)..(5): Selenocysteine
  MOD_RES (36)..(36): Selenocysteine
  MOD_RES (62)..(62): Selenocysteine
  MOD_RES (74)..(74): Selenocysteine
  MOD_RES (107)..(107): Selenocysteine
  MOD_RES (112)..(112): Selenocysteine
  MOD_RES (177)..(177): Selenocysteine
  MOD_RES (184)..(184): Selenocysteine
  MOD_RES (209)..(209): Selenocysteine
  MOD_RES (227)..(227): Selenocysteine
MLQLXGENEKNCEVSERIRRSGPWKEISFGDYICHXFQGDCWADRSPLHEAAAQGRLLALKXLIAQGVNVNLVXINRVSSLHEACLGGHVACAKALLENGAHVNGVXVHGAXPLFNACCSGSAACVNVLLEFGAKAQLEVHLASPIHEAVKRGHRECMEILLANNVNIDHEVPQLGXPLYVACXYQRVDCVKKLLELGASVDHGQWLDXPLHAAARQSNVEVIHLLXDYGANLKRRNAQGKSALDLAAPKSSVEQALLLREGPPALSQLCRLCVRKCLGRACHQAIHKLHLPEPLERFLLYQ

SEQ ID NO: 3343 - protein, 318 aa, Homo sapiens
  MOD_RES (16)..(16): Selenocysteine
  MOD_RES (31)..(31): Selenocysteine
  MOD_RES (33)..(33): Selenocysteine
  MOD_RES (50)..(50): Selenocysteine
  MOD_RES (75)..(75): Selenocysteine
  MOD_RES (108)..(108): Selenocysteine
  MOD_RES (112)..(112): Selenocysteine
  MOD_RES (145)..(145): Selenocysteine
  MOD_RES (212)..(212): Selenocysteine
  MOD_RES (225)..(225): Selenocysteine
  MOD_RES (260)..(260): Selenocysteine
  MOD_RES (276)..(276): Selenocysteine
MRIVLQLAKMNLMDIXKIFSLLQPDKEEEDXDXEEKQALNQAVYDNDSYXLDQLLRQERYKRFINSRSGWGVPGXPLRLAASYGHLSCLQVLLAHGADVDSLDVKAQXPLFXAVSHGHLDCVRVLLEAGASPGGSIYNNCSPVLXAARDGAVAILQELLDHGAEANVKAKLPVWASNIASCSGPLYLAAVYGHLDCFRLLLLHGADPDYNCXDQGLLARVPRPRXLLEICLHHNCEPEYIQLLIDFGANIYLPSLSLDLXSQDDKGIALLLQARAXPRSLLSQVRLVVRRALCQAGQPQAINQLDIPPMLISYLKHQL

SEQ ID NO: 3344 - protein, 173 aa, Homo sapiens
  MOD_RES (21)..(21): Selenocysteine
  MOD_RES (49)..(49): Selenocysteine
  MOD_RES (54)..(54): Selenocysteine
  MOD_RES (87)..(87): Selenocysteine
  MOD_RES (117)..(117): Selenocysteine
  MOD_RES (152)..(152): Selenocysteine
MEPRAADGCFLGDVGFWVERXPVHEAAQRGESLQLQQLIESGACVNQVXVDSIXPLHAASLQGQARCVQLLLAAGAQVDARNIDGSXPLCDACASGSIECVKLLLSYGAKVNPPLYXASPLHEACMSGSSECVRLLIDVGANLEAHDCHFGXPLHVACAREHLDCVKVLLNAA

SEQ ID NO: 3345 - protein, 278 aa, Homo sapiens
  MOD_RES (21)..(21): Selenocysteine
  MOD_RES (49)..(49): Selenocysteine
  MOD_RES (54)..(54): Selenocysteine
  MOD_RES (87)..(87): Selenocysteine
  MOD_RES (117)..(117): Selenocysteine
  MOD_RES (152)..(152): Selenocysteine
  MOD_RES (184)..(184): Selenocysteine
  MOD_RES (222)..(222): Selenocysteine
  MOD_RES (238)..(238): Selenocysteine
  MOD_RES (241)..(241): Selenocysteine
  MOD_RES (254)..(254): Selenocysteine
MEPRAADGCFLGDVGFWVERXPVHEAAQRGESLQLQQLIESGACVNQVXVDSIXPLHAASLQGQARCVQLLLAAGAQVDARNIDGSXPLCDACASGSIECVKLLLSYGAKVNPPLYXASPLHEACMSGSSECVRLLIDVGANLEAHDCHFGXPLHVACAREHLDCVKVLLNAGANVNAAKLHEXALHHAAKVKNVDLIEMLIEFGGNIYARDNRGKKPSDYXWSSSAPAKCFEYYEKXPLXLSQLCRVNLRKAXGVRGLEKIAKLNIPPRLIDYLSYN

SEQ ID NO: 3346 - protein, 587 aa, Homo sapiens
  MOD_RES (5)..(5): Selenocysteine
  MOD_RES (16)..(16): Selenocysteine
  MOD_RES (32)..(32): Selenocysteine
  MOD_RES (56)..(56): Selenocysteine
  MOD_RES (69)..(69): Selenocysteine
  MOD_RES (101)..(101): Selenocysteine
  MOD_RES (113)..(114): Selenocysteine
  MOD_RES (119)..(119): Selenocysteine
  MOD_RES (134)..(134): Selenocysteine
  MOD_RES (185)..(185): Selenocysteine
  MOD_RES (214)..(214): Selenocysteine
  MOD_RES (218)..(218): Selenocysteine
  MOD_RES (229)..(229): Selenocysteine
  MOD_RES (305)..(305): Selenocysteine
  MOD_RES (430)..(430): Selenocysteine
  MOD_RES (447)..(447): Selenocysteine
  MOD_RES (464)..(464): Selenocysteine
  MOD_RES (469)..(469): Selenocysteine
  MOD_RES (471)..(471): Selenocysteine
  MOD_RES (476)..(476): Selenocysteine
  MOD_RES (483)..(483): Selenocysteine
  MOD_RES (529)..(529): Selenocysteine
  MOD_RES (584)..(584): Selenocysteine
  MOD_RES (586)..(586): Selenocysteine
MDNYXSDEDIDEDFDXQLIIQQSLQDIYKPGXAQHAPKDESLHSFLSADYKKIVEXIEKGKEDALSHLXKYHSAFGEADEIGWIPLHKAAVQLNRKILEIXLSASDPSLWEQXXHNGEXPLFLAVSSCLLENAXFLLLNGCNPNAKNFEGNSPLLAAVLRDCYDMAALLINYGADVNLRCANERXALHEAAKLGREDMVKLMLVSGAHPDPQSXYGFXPLALAAQSGHXEIMEMLLRKGANAHGQASDSSSILLEAASGGNPDAVALLLEYGADANIPKNSGHLPIHVAADRGHLLALKILIPVXDLAAIKQSGISPVHCAAAGAHPQCLELLIQAGFDVNFMLDQRINKHYDDHRKSALYFAVSNSDLSSVKLLLSAGALPNQDPVNCLQIALRMGNYELISLLLRHGANVNYFCRVNPLHFPSALQYXLKDEVMLRMLLNYGYDXERCFDCPHGDKVHPSYXVEGWXSXVIKDXKFCEVIXLSWLQHLSGKVVRVMLDYVDQVRICSKLKAVLQKQGIWSEIHFILXNPRSLKHLCRLKIRKCMGRLHLRCPVFMSFLPLPNRLKAYVLYKEYDLYGQGIFXGXW

SEQ ID NO: 3347 - protein, 587 aa, Homo sapiens
  MOD_RES (5)..(5): Selenocysteine
  MOD_RES (16)..(16): Selenocysteine
  MOD_RES (32)..(32): Selenocysteine
  MOD_RES (56)..(56): Selenocysteine
  MOD_RES (70)..(70): Selenocysteine
  MOD_RES (102)..(102): Selenocysteine
  MOD_RES (114)..(115): Selenocysteine
  MOD_RES (120)..(120): Selenocysteine
  MOD_RES (135)..(135): Selenocysteine
  MOD_RES (186)..(186): Selenocysteine
  MOD_RES (215)..(215): Selenocysteine
  MOD_RES (219)..(219): Selenocysteine
  MOD_RES (230)..(230): Selenocysteine
  MOD_RES (305)..(305): Selenocysteine
  MOD_RES (430)..(430): Selenocysteine
  MOD_RES (447)..(447): Selenocysteine
  MOD_RES (464)..(464): Selenocysteine
  MOD_RES (469)..(469): Selenocysteine
  MOD_RES (471)..(471): Selenocysteine
  MOD_RES (476)..(476): Selenocysteine
  MOD_RES (483)..(483): Selenocysteine
  MOD_RES (529)..(529): Selenocysteine
  MOD_RES (584)..(584): Selenocysteine
  MOD_RES (586)..(586): Selenocysteine
MDNYXSDEDIDEDFDXQLIIQQSLQDIYKPGXAQHAPKDESLHSFLSADYKKIVEXIEKVGKEDALSHLXKYHSAFGEADEIGWIPLHKAAVQLNRKILEIXLSASDPSLWEQXXHNGEXPLFLAVSSCLLENAXFLLLNGCNPNAKNFEGNSPLLAAVLRDCYDMAALLINYGADVNLRCANERXALHEAAKLGREDMVKLMLVSGAHPDPQSXYGFXPLALAAQSGHXEIMEMLLRKGKIFCLASDSSSILLEAASGGNPDAVALLLEYGADANIPKNSGHLPIHVAADRGHLLALKILIPVXDLAAIKQSGISPVHCAAAGAHPQCLELLIQAGFDVNFMLDQRINKHYDDHRKSALYFAVSNSDLSSVKLLLSAGALPNQDPVNCLQIALRMGNYELISLLLRHGANVNYFCRVNPLHFPSALQYXLKDEVMLRMLLNYGYDXERCFDCPHGDKVHPSYXVEGWXSXVIKDXKFCEVIXLSWLQHLSGKVVRVMLDYVDQVRICSKLKAVLQKQGIWSEIHFILXNPRSLKHLCRLKIRKCMGRLHLRCPVFMSFLPLPNRLKAYVLYKEYDLYGQGIFXGXW

SEQ ID NO: 3348 - protein, 97 aa, Homo sapiens
  MOD_RES (3)..(3): Selenocysteine
  MOD_RES (13)..(13): Selenocysteine
  MOD_RES (30)..(30): Selenocysteine
MDXNDDPDEDHLXSYDIQLSIQESIEASKXALCPERFVPLSAQNRKLVEAIKQGHIPELQEYVKYKYAMDEADEKGWFPLHEAVVQPIQQILEIVLD

SEQ ID NO: 3349 - protein, 241 aa, Homo sapiens
  MOD_RES (3)..(3): Selenocysteine
  MOD_RES (13)..(13): Selenocysteine
  MOD_RES (30)..(30): Selenocysteine
  MOD_RES (102)..(102): Selenocysteine
  MOD_RES (108)..(108): Selenocysteine
  MOD_RES (113)..(113): Selenocysteine
  MOD_RES (116)..(116): Selenocysteine
  MOD_RES (129)..(129): Selenocysteine
  MOD_RES (139)..(139): Selenocysteine
  MOD_RES (146)..(146): Selenocysteine
  MOD_RES (162)..(162): Selenocysteine
  MOD_RES (168)..(168): Selenocysteine
  MOD_RES (212)..(212): Selenocysteine
MDXNDDPDEDHLXSYDIQLSIQESIEASKXALCPERFVPLSAQNRKLVEAIKQGHIPELQEYVKYKYAMDEADEKGWFPLHEAVVQPIQQILEIVLDASYKXLWEFKXCDGEXPLXLAVKAGLVENVRXLLEKGVWPNXKNDKGEXPLLIAVKKGSYDMVSXLIKHNXSLDQPCVKRWSAMHEAAKQGRKDIVALLLKHGGNVHLRDGFGVXPLGVAAEYGHCDVLEHLIHKGGDVLALAD

SEQ ID NO: 3350 - protein, 588 aa, Homo sapiens
  MOD_RES (3)..(3): Selenocysteine
  MOD_RES (13)..(13): Selenocysteine
  MOD_RES (30)..(30): Selenocysteine
  MOD_RES (102)..(102): Selenocysteine
  MOD_RES (108)..(108): Selenocysteine
  MOD_RES (113)..(113): Selenocysteine
  MOD_RES (116)..(116): Selenocysteine
  MOD_RES (129)..(129): Selenocysteine
  MOD_RES (139)..(139): Selenocysteine
  MOD_RES (146)..(146): Selenocysteine
  MOD_RES (162)..(162): Selenocysteine
  MOD_RES (168)..(168): Selenocysteine
  MOD_RES (212)..(212): Selenocysteine
  MOD_RES (299)..(299): Selenocysteine
  MOD_RES (310)..(310): Selenocysteine
  MOD_RES (336)..(336): Selenocysteine
  MOD_RES (352)..(352): Selenocysteine
  MOD_RES (366)..(366): Selenocysteine
  MOD_RES (416)..(416): Selenocysteine
  MOD_RES (472)..(472): Selenocysteine
  MOD_RES (486)..(486): Selenocysteine
  MOD_RES (498)..(498): Selenocysteine
  MOD_RES (588)..(588): Selenocysteine
MDXNDDPDEDHLXSYDIQLSIQESIEASKXALCPERFVPLSAQNRKLVEAIKQGHIPELQEYVKYKYAMDEADEKGWFPLHEAVVQPIQQILEIVLDASYKXLWEFKXCDGEXPLXLAVKAGLVENVRXLLEKGVWPNXKNDKGEXPLLIAVKKGSYDMVSXLIKHNXSLDQPCVKRWSAMHEAAKQGRKDIVALLLKHGGNVHLRDGFGVXPLGVAAEYGHCDVLEHLIHKGGDVLALADDGASVLFEAAGGGNPDCISLLLEYGGSGNVPNRAGHLPIHRAAYEGHYLALKYLIPVXSKNAIRKSGLXPIHSAADGQNAQCLELLIENGFDVNXLLADHISQSYDDERKXALYFGVSNNDVHCXEVLLAAGADPNLDPLNCLLVAVRANNYEIVRLLLSHGANVNCYFMHVNDXRFPSVIQYALNDEVMLRLLLNNGYQVEMCFDCMHGDIFGNSFVWSEIQEEVLPGWXSCVIKDNPFCEFIXVPWMKHLVGRVXRVLIDYMDYVPLCAKLKSALEVQREWPEIRQILENPCSLKHLCRLKIRRLMGLQKLCQPASVEKLPLPPAIQRYILFKEYDLYGQELKLX

SEQ ID NO: 3351 - protein, 249 aa, Homo sapiens
  MOD_RES (88)..(88): Selenocysteine
  MOD_RES (99)..(99): Selenocysteine
  MOD_RES (125)..(125): Selenocysteine
  MOD_RES (141)..(141): Selenocysteine
  MOD_RES (155)..(155): Selenocysteine
  MOD_RES (205)..(205): Selenocysteine
MKQPSKAEYGHCDVLEHLIHKGGDVLALADDGASVLFEAAGGGNPDCISLLLEYGGSGNVPNRAGHLPIHRAAYEGHYLALKYLIPVXSKNAIRKSGLXPIHSAADGQNAQCLELLIENGFDVNXLLADHISQSYDDERKXALYFGVSNNDVHCXEVLLAAGADPNLDPLNCLLVAVRANNYEIVRLLLSHGANVNCYFMHVNDXRFPSVIQYALNDEVMLRLLLNNGYQVEMCFDCMHGDIFGNSFVC

SEQ ID NO: 3352 - protein, 273 aa, Homo sapiens
  MOD_RES (5)..(5): Selenocysteine
  MOD_RES (9)..(9): Selenocysteine
  MOD_RES (50)..(50): Selenocysteine
  MOD_RES (89)..(89): Selenocysteine
  MOD_RES (106)..(106): Selenocysteine
  MOD_RES (109)..(109): Selenocysteine
  MOD_RES (112)..(112): Selenocysteine
  MOD_RES (119)..(119): Selenocysteine
  MOD_RES (124)..(124): Selenocysteine
  MOD_RES (164)..(164): Selenocysteine
  MOD_RES (173)..(173): Selenocysteine
  MOD_RES (177)..(178): Selenocysteine
  MOD_RES (184)..(184): Selenocysteine
  MOD_RES (201)..(201): Selenocysteine
  MOD_RES (212)..(212): Selenocysteine
  MOD_RES (240)..(240): Selenocysteine
  MOD_RES (245)..(245): Selenocysteine
  MOD_RES (249)..(249): Selenocysteine
  MOD_RES (261)..(261): Selenocysteine
MAREXFPFXSSMLRSLRLQQEWLEWEDRRRAAAQQCRSRRCPSSPRARLXRPHRSCRDPAVHQALFSGNLQQVQALFQDEEAANMIVEXVSNQLAWSAEQGFWVLXPKXKQXAPLAIAXARGYXDCARHLIRQGAELDARVGGRAALHEACARAQFDCVRLLLXFGAKANVLXEEGXXPLHLCXIPESLQCAKLLLEAGAXVNLAAGESQEXPLHVAAARGLEQHVALYLEHGADVGLRXSQGEXALNXACAGAEGPDAEXLRQLPSGPGSPA

SEQ ID NO: 3353 - protein, 453 aa, Homo sapiens
  MOD_RES (5)..(5): Selenocysteine
  MOD_RES (9)..(9): Selenocysteine
  MOD_RES (50)..(50): Selenocysteine
  MOD_RES (89)..(89): Selenocysteine
  MOD_RES (106)..(106): Selenocysteine
  MOD_RES (109)..(109): Selenocysteine
  MOD_RES (112)..(112): Selenocysteine
  MOD_RES (119)..(119): Selenocysteine
  MOD_RES (124)..(124): Selenocysteine
  MOD_RES (164)..(164): Selenocysteine
  MOD_RES (173)..(173): Selenocysteine
  MOD_RES (177)..(178): Selenocysteine
  MOD_RES (184)..(184): Selenocysteine
  MOD_RES (201)..(201): Selenocysteine
  MOD_RES (212)..(212): Selenocysteine
  MOD_RES (240)..(240): Selenocysteine
  MOD_RES (245)..(245): Selenocysteine
  MOD_RES (249)..(249): Selenocysteine
  MOD_RES (286)..(286): Selenocysteine
  MOD_RES (319)..(319): Selenocysteine
  MOD_RES (381)..(381): Selenocysteine
  MOD_RES (432)..(432): Selenocysteine
MAREXFPFXSSMLRSLRLQQEWLEWEDRRRAAAQQCRSRRCPSSPRARLXRPHRSCRDPAVHQALFSGNLQQVQALFQDEEAANMIVEXVSNQLAWSAEQGFWVLXPKXKQXAPLAIAXARGYXDCARHLIRQGAELDARVGGRAALHEACARAQFDCVRLLLXFGAKANVLXEEGXXPLHLCXIPESLQCAKLLLEAGAXVNLAAGESQEXPLHVAAARGLEQHVALYLEHGADVGLRXSQGEXALNXACAGAEGPGSCRRHQAAARRLLEAGADARAAGRKRHXPLHNACANGCGGLAELLLRYGARAEVPNGAGHXPMDCALQAVQDSPNWEPEVLFAALLDYGAQPVRPEMLKHCANFPRALEVLLNAYPCVPSCEXWVEAVLPELWKEHEAFYSSALCMVNQPRQLQHLARLAVRARLGSRCRQGAXRLPLPPLLRDYLLLRVEGCIQ

SEQ ID NO: 3354 - protein, 71 aa, Homo sapiens
  MOD_RES (5)..(5): Selenocysteine
  MOD_RES (22)..(22): Selenocysteine
  MOD_RES (25)..(25): Selenocysteine
  MOD_RES (28)..(28): Selenocysteine
  MOD_RES (35)..(35): Selenocysteine
  MOD_RES (40)..(40): Selenocysteine
MIVEXVSNQLAWSAEQGFWVLXPKXKQXAPLAIAXARGYXDCARHLIRQGAELDARVGGRAALHEACARAQ

SEQ ID NO: 3355 - protein, 295 aa, Homo sapiens
  MOD_RES (5)..(5): Selenocysteine
  MOD_RES (11)..(11): Selenocysteine
  MOD_RES (68)..(68): Selenocysteine
  MOD_RES (90)..(90): Selenocysteine
  MOD_RES (96)..(96): Selenocysteine
  MOD_RES (118)..(118): Selenocysteine
  MOD_RES (135)..(135): Selenocysteine
  MOD_RES (137)..(137): Selenocysteine
  MOD_RES (149)..(149): Selenocysteine
  MOD_RES (157)..(157): Selenocysteine
  MOD_RES (184)..(184): Selenocysteine
  MOD_RES (209)..(209): Selenocysteine
  MOD_RES (228)..(228): Selenocysteine
  MOD_RES (248)..(248): Selenocysteine
  MOD_RES (263)..(263): Selenocysteine
  MOD_RES (270)..(270): Selenocysteine
MSKSXKLCGKXSCPRSNIFCNLLDKIVKRPSLQFLGQWGYHCYEPRIYRSLAKILRYVDLDGFDALLXDYIAFVEKSGYRFEVSFNLDFXEICVNXILYWVFARKGNPDFVELLLKKXKDYVQDRSCNLALIWRXFXPVYCPSPLSGIXPLFYVAQXRQSNIFKILLQYGILEREKNPINIVLXIVLYPSRVRVMVDRELADIHEDAKXCLVLCSRVLSVISVKEIKXQLSLGRHPIISNWFDYIPSXRYKDPCELLHLCRLXIRNQLLXNNMLPDGIFSLLIPARLQNYLNLEI

SEQ ID NO: 3356 - protein, 148 aa, Homo sapiens
  MOD_RES (49)..(49): Selenocysteine
  MOD_RES (61)..(61): Selenocysteine
  MOD_RES (72)..(72): Selenocysteine
  MOD_RES (84)..(84): Selenocysteine
ARDEDERSPLHKACGHASHSLARLLLRHGADAGALDYGGASPLGRVLQXASCALQASPQRXVQALLNHGSPXVWPDAFPKVLKXCASVPAVIEVLFNSYPQLCLSESWKEVIPEEVFQARGLPFCPSLVQNFCLFLLLCMGSFALIFG

SEQ ID NO: 3357 - protein, 466 aa, Homo sapiens
  MOD_RES (38)..(38): Selenocysteine
  MOD_RES (41)..(41): Selenocysteine
  MOD_RES (64)..(64): Selenocysteine
  MOD_RES (105)..(105): Selenocysteine
  MOD_RES (113)..(113): Selenocysteine
  MOD_RES (121)..(122): Selenocysteine
  MOD_RES (133)..(133): Selenocysteine
  MOD_RES (165)..(165): Selenocysteine
  MOD_RES (194)..(194): Selenocysteine
  MOD_RES (217)..(217): Selenocysteine
  MOD_RES (221)..(221): Selenocysteine
  MOD_RES (254)..(254): Selenocysteine
  MOD_RES (336)..(336): Selenocysteine
  MOD_RES (348)..(348): Selenocysteine
  MOD_RES (359)..(359): Selenocysteine
  MOD_RES (371)..(371): Selenocysteine
  MOD_RES (420)..(420): Selenocysteine
MSNSDYLPDYPLNSDLVKRLKSALDAKDEERVRDLICXEIXPVDAVIELANDDWMKDPSAQLPXGMLLGDLDHLKPLMDQFFQDANVVFEINKDEMEWQVKSPAXFGLSGLWXLEYKRELXXPLCIAAAHGHXACVRHLLGRGADPDASPGGRGALHEACLGGHXACVRLLLQHRADPDLLSAEGLAPLHLCRXAASLGCAQALLEHGASVQRVGGXGRDXPLHVAAQRGLDEHARLYLGRGAHVDARNGRGEXALSAACGAARRPDEHGRCLRLCALLLRRGAEADARDEDERSPLHKACGHASHSLARLLLRHGADAGALDYGGASPLGRVLQXASCALQASPQRXVQALLNHGSPXVWPDAFPKVLKXCASVPAVIEVLFNSYPQLCLSESWKEVIPEEVFQMHKPFYQSLFALALXPRCLQHLCRCALRRLFGKRCFDLIPLLPLPKPLQNYLLLEPQGVLH

SEQ ID NO: 3358 - protein, 195 aa, Homo sapiens
  MOD_RES (38)..(38): Selenocysteine
  MOD_RES (41)..(41): Selenocysteine
  MOD_RES (64)..(64): Selenocysteine
  MOD_RES (72)..(72): Selenocysteine
  MOD_RES (80)..(81): Selenocysteine
  MOD_RES (92)..(92): Selenocysteine
  MOD_RES (124)..(124): Selenocysteine
  MOD_RES (153)..(153): Selenocysteine
  MOD_RES (176)..(176): Selenocysteine
  MOD_RES (180)..(180): Selenocysteine
MSNSDYLPDYPLNSDLVKRLKSALDAKDEERVRDLICXEIXPVDAVIELANDDWMKDPSAQLPXGMLLGLWXLEYKRELXXPLCIAAAHGHXACVRHLLGRGADPDASPGGRGALHEACLGGHXACVRLLLQHRADPDLLSAEGLAPLHLCRXAASLGCAQALLEHGASVQRVGGXGRDXPLHVAAQRGLDEHAR

SEQ ID NO: 3359 - protein, 122 aa, Homo sapiens
  MOD_RES (3)..(3): Selenocysteine
  MOD_RES (7)..(7): Selenocysteine
  MOD_RES (13)..(13): Selenocysteine
  MOD_RES (43)..(43): Selenocysteine
  MOD_RES (47)..(48): Selenocysteine
  MOD_RES (52)..(52): Selenocysteine
  MOD_RES (57)..(57): Selenocysteine
  MOD_RES (68)..(68): Selenocysteine
  MOD_RES (88)..(88): Selenocysteine
MAXQISXRGSQCXIGQEEYSLYSSLSEDELVQMAIEQSLADKXRGPXXAEAXASACXNRQPAHFYPWXRPADPLIKAIKDGDEEALKXMIKEGKNLAEPNKEGWLPLHEAAYYGQVGCLKVL

SEQ ID NO: 3360 - protein, 635 aa, Homo sapiens
  MOD_RES (3)..(3): Selenocysteine
  MOD_RES (7)..(7): Selenocysteine
  MOD_RES (13)..(13): Selenocysteine
  MOD_RES (43)..(43): Selenocysteine
  MOD_RES (47)..(48): Selenocysteine
  MOD_RES (52)..(52): Selenocysteine
  MOD_RES (57)..(57): Selenocysteine
  MOD_RES (68)..(68): Selenocysteine
  MOD_RES (71)..(71): Selenocysteine
  MOD_RES (100)..(100): Selenocysteine
  MOD_RES (123)..(123): Selenocysteine
  MOD_RES (164)..(164): Selenocysteine
  MOD_RES (169)..(169): Selenocysteine
  MOD_RES (174)..(174): Selenocysteine
  MOD_RES (180)..(180): Selenocysteine
  MOD_RES (207)..(207): Selenocysteine
  MOD_RES (231)..(231): Selenocysteine
  MOD_RES (240)..(240): Selenocysteine
  MOD_RES (273)..(273): Selenocysteine
  MOD_RES (299)..(299): Selenocysteine
  MOD_RES (333)..(333): Selenocysteine
  MOD_RES (360)..(360): Selenocysteine
  MOD_RES (363)..(363): Selenocysteine
  MOD_RES (397)..(397): Selenocysteine
  MOD_RES (427)..(427): Selenocysteine
  MOD_RES (456)..(456): Selenocysteine
  MOD_RES (473)..(473): Selenocysteine
  MOD_RES (476)..(476): Selenocysteine
  MOD_RES (481)..(481): Selenocysteine
  MOD_RES (618)..(618): Selenocysteine
  MOD_RES (634)..(634): Selenocysteine
MAXQISXRGSQCXIGQEEYSLYSSLSEDELVQMAIEQSLADKXRGPXXAEAXASACXNRQPAHFYPWXRSXAPPESSPARAPMGLFQGVMQKYSSSLFKXSQLAPADPLIKAIKDGDEEALKXMIKEGKNLAEPNKEGWLPLHEAAYYGQVGCLKVLQRAYPGXIDQRXLQEEXAVYLAXCRGHLDCLLSLLQAGAEPDISNKSREXPLYKACERKNAEAVKILVQHNADXNHRCNRGWXALHESVSRNDLEVMQILVSGGAKVESKNAYGIXPLFVAAQSGQLEALRFLAKYGADINXQASDNASALYEACKNEHEEVVEFLLSQGADANKXNKDGLLPLHIASKKGNYRIVQMLLPVXSRXRIRRSGVSPLHLAAERNHDEVLEALLSARFDVNXPLAPERARLYEDRRSSALYFAVVNNNVYAXELLLQHGADPNRDVISPLLVAIRHGCLRXMQLLLDHGANIDAYIAXHPXAFPAXIMFAMKCLSLLKFLMDLGCDGEPCFSCLYGNGPHPPAPQPSSRFNDAPAADKEPSVVQFCEFVSAPEVSRWAGPIIDVLLDYVGNVQLCSRLKEHIDSFEDWAVIKEKAEPPRPLAHLCRLRVRKAIGKYRIKLLDXLPLPGRLIRYLKYENXQ

SEQ ID NO: 3361 - protein, 112 aa, Homo sapiens
  MOD_RES (18)..(18): Selenocysteine
  MOD_RES (41)..(41): Selenocysteine
  MOD_RES (82)..(82): Selenocysteine
  MOD_RES (87)..(87): Selenocysteine
  MOD_RES (92)..(92): Selenocysteine
  MOD_RES (98)..(98): Selenocysteine
MGLFQGVMQKYSSSLFKXSQLAPADPLIKAIKDGDEEALKXMIKEGKNLAEPNKEGWLPLHEAAYYGQVGCLKVLQRAYPGXIDQRXLQEEXAVYLAXCRGHLDCLLSLLQA

SEQ ID NO: 3362 - protein, 135 aa, Homo sapiens
  MOD_RES (21)..(21): Selenocysteine
  MOD_RES (77)..(77): Selenocysteine
  MOD_RES (86)..(86): Selenocysteine
  MOD_RES (119)..(119): Selenocysteine
MRPADPLIKAIKDGDEEALKXMIKEGKNLAEPNKEGWLPLHEAAYYGQVGCLKVLQRACERKNAEAVKILVQHNADXNHRCNRGWXALHESVSRNDLEVMQILVSGGAKVESKNAYGIXPLFVAAQSGQLEALRF

SEQ ID NO: 3363 - protein, 481 aa, Homo sapiens
  MOD_RES (21)..(21): Selenocysteine
  MOD_RES (62)..(62): Selenocysteine
  MOD_RES (67)..(67): Selenocysteine
  MOD_RES (72)..(72): Selenocysteine
  MOD_RES (78)..(78): Selenocysteine
  MOD_RES (105)..(105): Selenocysteine
  MOD_RES (129)..(129): Selenocysteine
  MOD_RES (138)..(138): Selenocysteine
  MOD_RES (171)..(171): Selenocysteine
  MOD_RES (197)..(197): Selenocysteine
  MOD_RES (231)..(231): Selenocysteine
  MOD_RES (258)..(258): Selenocysteine
  MOD_RES (261)..(261): Selenocysteine
  MOD_RES (295)..(295): Selenocysteine
  MOD_RES (325)..(325): Selenocysteine
  MOD_RES (354)..(354): Selenocysteine
  MOD_RES (371)..(371): Selenocysteine
  MOD_RES (374)..(374): Selenocysteine
  MOD_RES (379)..(379): Selenocysteine
MRPADPLIKAIKDGDEEALKXMIKEGKNLAEPNKEGWLPLHEAAYYGQVGCLKVLQRAYPGXIDQRXLQEEXAVYLAXCRGHLDCLLSLLQAGAEPDISNKSREXPLYKACERKNAEAVKILVQHNADXNHRCNRGWXALHESVSRNDLEVMQILVSGGAKVESKNAYGIXPLFVAAQSGQLEALRFLAKYGADINXQASDNASALYEACKNEHEEVVEFLLSQGADANKXNKDGLLPLHIASKKGNYRIVQMLLPVXSRXRIRRSGVSPLHLAAERNHDEVLEALLSARFDVNXPLAPERARLYEDRRSSALYFAVVNNNVYAXELLLQHGADPNRDVISPLLVAIRHGCLRXMQLLLDHGANIDAYIAXHPXAFPAXIMFAMKCLSLLKFLMDLGCDGEPCFSCLYGNGPHPPAPQPSSRFNDAPAADKEPSVVQFCEFVSAPEVSRWAGPIIDVLLDYVGNVQLCSRLKEHIDSFEDW

SEQ ID NO: 3364 - protein, 587 aa, Homo sapiens
  MOD_RES (2)..(2): Selenocysteine
  MOD_RES (23)..(23): Selenocysteine
  MOD_RES (52)..(52): Selenocysteine
  MOD_RES (75)..(75): Selenocysteine
  MOD_RES (116)..(116): Selenocysteine
  MOD_RES (121)..(121): Selenocysteine
  MOD_RES (126)..(126): Selenocysteine
  MOD_RES (132)..(132): Selenocysteine
  MOD_RES (159)..(159): Selenocysteine
  MOD_RES (183)..(183): Selenocysteine
  MOD_RES (192)..(192): Selenocysteine
  MOD_RES (225)..(225): Selenocysteine
  MOD_RES (251)..(251): Selenocysteine
  MOD_RES (285)..(285): Selenocysteine
  MOD_RES (312)..(312): Selenocysteine
  MOD_RES (315)..(315): Selenocysteine
  MOD_RES (349)..(349): Selenocysteine
  MOD_RES (379)..(379): Selenocysteine
  MOD_RES (408)..(408): Selenocysteine
  MOD_RES (425)..(425): Selenocysteine
  MOD_RES (428)..(428): Selenocysteine
  MOD_RES (433)..(433): Selenocysteine
  MOD_RES (570)..(570): Selenocysteine
  MOD_RES (586)..(586): Selenocysteine
MXRFSYAEYFSLFHSCSAPSRSXAPPESSPARAPMGLFQGVMQKYSSSLFKXSQLAPADPLIKAIKDGDEEALKXMIKEGKNLAEPNKEGWLPLHEAAYYGQVGCLKVLQRAYPGXIDQRXLQEEXAVYLAXCRGHLDCLLSLLQAGAEPDISNKSREXPLYKACERKNAEAVKILVQHNADXNHRCNRGWXALHESVSRNDLEVMQILVSGGAKVESKNAYGIXPLFVAAQSGQLEALRFLAKYGADINXQASDNASALYEACKNEHEEVVEFLLSQGADANKXNKDGLLPLHIASKKGNYRIVQMLLPVXSRXRIRRSGVSPLHLAAERNHDEVLEALLSARFDVNXPLAPERARLYEDRRSSALYFAVVNNNVYAXELLLQHGADPNRDVISPLLVAIRHGCLRXMQLLLDHGANIDAYIAXHPXAFPAXIMFAMKCLSLLKFLMDLGCDGEPCFSCLYGNGPHPPAPQPSSRFNDAPAADKEPSVVQFCEFVSAPEVSRWAGPIIDVLLDYVGNVQLCSRLKEHIDSFEDWAVIKEKAEPPRPLAHLCRLRVRKAIGKYRIKLLDXLPLPGRLIRYLKYENXQ

SEQ ID NO: 3365 - protein, 518 aa, Homo sapiens
  MOD_RES (4)..(4): Selenocysteine
  MOD_RES (10)..(10): Selenocysteine
  MOD_RES (13)..(13): Selenocysteine
  MOD_RES (76)..(76): Selenocysteine
  MOD_RES (108)..(109): Selenocysteine
  MOD_RES (113)..(114): Selenocysteine
  MOD_RES (181)..(181): Selenocysteine
  MOD_RES (214)..(214): Selenocysteine
  MOD_RES (225)..(225): Selenocysteine
  MOD_RES (260)..(260): Selenocysteine
  MOD_RES (270)..(270): Selenocysteine
  MOD_RES (276)..(276): Selenocysteine
  MOD_RES (421)..(421): Selenocysteine
  MOD_RES (425)..(425): Selenocysteine
  MOD_RES (429)..(429): Selenocysteine
  MOD_RES (433)..(433): Selenocysteine
  MOD_RES (458)..(458): Selenocysteine
  MOD_RES (463)..(463): Selenocysteine
MDFXEAYADXCSXVGLAAREGNVKVLRKLLKKGRSVDVADNRGWMPIHEAAYHNSVECLQMLINADSSENYIKMKXFEGFCALHLAASQGHWKIVQILLEAGADPNAXXLEEXXPLFLAVENGQIDVLRLLLQHGANVNGSHSMCGWNSLHQASFQENAEIIKLLLRKGANKECQDDFGIXPLFVAAQYGKLESLSILISSGANVNCQALDKAXPLFIAAQEGHXKCVELLLSSGADPDLYCNEDSWQLPIHAAAQMGHXKILDLLIPLXNRACDXGLNKVSPVYSAVFGGHEDCLEILLRNGYSPDAQACLVFGFSSPVCMAFQKDCEFFGIVNILLKYGAQINELHLAYCLKYEKFSIFRYFLRKGCSLGPWNHIYEFVNHAIKAQAKYKEWLPHLLVAGFDPLILLCNSWIDSVSIDXLIFXLEFXNWKXLAPAVERMLSARASNAWILQQHIAXVPSLXHLCRLEIRSSLKSERLRSDSYISQLPLPRSLHNYLLYEDVLRMYEVPELAAIQDG

SEQ ID NO: 3366 - protein, 445 aa, Homo sapiens
  MOD_RES (3)..(3): Selenocysteine
  MOD_RES (35)..(36): Selenocysteine
  MOD_RES (40)..(41): Selenocysteine
  MOD_RES (108)..(108): Selenocysteine
  MOD_RES (141)..(141): Selenocysteine
  MOD_RES (152)..(152): Selenocysteine
  MOD_RES (187)..(187): Selenocysteine
  MOD_RES (197)..(197): Selenocysteine
  MOD_RES (203)..(203): Selenocysteine
  MOD_RES (348)..(348): Selenocysteine
  MOD_RES (352)..(352): Selenocysteine
  MOD_RES (356)..(356): Selenocysteine
  MOD_RES (360)..(360): Selenocysteine
  MOD_RES (385)..(385): Selenocysteine
  MOD_RES (390)..(390): Selenocysteine
MKXFEGFCALHLAASQGHWKIVQILLEAGADPNAXXLEEXXPLFLAVENGQIDVLRLLLQHGANVNGSHSMCGWNSLHQASFQENAEIIKLLLRKGANKECQDDFGIXPLFVAAQYGKLESLSILISSGANVNCQALDKAXPLFIAAQEGHXKCVELLLSSGADPDLYCNEDSWQLPIHAAAQMGHXKILDLLIPLXNRACDXGLNKVSPVYSAVFGGHEDCLEILLRNGYSPDAQACLVFGFSSPVCMAFQKDCEFFGIVNILLKYGAQINELHLAYCLKYEKFSIFRYFLRKGCSLGPWNHIYEFVNHAIKAQAKYKEWLPHLLVAGFDPLILLCNSWIDSVSIDXLIFXLEFXNWKXLAPAVERMLSARASNAWILQQHIAXVPSLXHLCRLEIRSSLKSERLRSDSYISQLPLPRSLHNYLLYEDVLRMYEVPELAAIQDG

SEQ ID NO: 3367 - protein, 477 aa, Homo sapiens
  MOD_RES (1)..(1): Any amino acid
  MOD_RES (3)..(3): Selenocysteine
  MOD_RES (6)..(6): Selenocysteine
  MOD_RES (69)..(69): Selenocysteine
  MOD_RES (101)..(102): Selenocysteine
  MOD_RES (106)..(107): Selenocysteine
  MOD_RES (174)..(174): Selenocysteine
  MOD_RES (207)..(207): Selenocysteine
  MOD_RES (218)..(218): Selenocysteine
  MOD_RES (253)..(253): Selenocysteine
  MOD_RES (263)..(263): Selenocysteine
  MOD_RES (269)..(269): Selenocysteine
  MOD_RES (414)..(414): Selenocysteine
  MOD_RES (418)..(418): Selenocysteine
  MOD_RES (422)..(422): Selenocysteine
  MOD_RES (426)..(426): Selenocysteine
XDXCSXVGLAAREGNVKVLRKLLKKGRSVDVADNRGWMPIHEAAYHNSVECLQMLINADSSENYIKMKXFEGFCALHLAASQGHWKIVQILLEAGADPNAXXLEEXXPLFLAVENGQIDVLRLLLQHGANVNGSHSMCGWNSLHQASFQENAEIIKLLLRKGANKECQDDFGIXPLFVAAQYGKLESLSILISSGANVNCQALDKAXPLFIAAQEGHXKCVELLLSSGADPDLYCNEDSWQLPIHAAAQMGHXKILDLLIPLXNRACDXGLNKVSPVYSAVFGGHEDCLEILLRNGYSPDAQACLVFGFSSPVCMAFQKDCEFFGIVNILLKYGAQINELHLAYCLKYEKFSIFRYFLRKGCSLGPWNHIYEFVNHAIKAQAKYKEWLPHLLVAGFDPLILLCNSWIDSVSIDXLIFXLEFXNWKXLAPAVERMLSARASNAWILQQHIEQGFILQKYLGPSNSQVDFLLRGELPIG

SEQ ID NO: 3368 - protein, 349 aa, Homo sapiens
  MOD_RES (4)..(5): Selenocysteine
  MOD_RES (9)..(9): Selenocysteine
  MOD_RES (46)..(46): Selenocysteine
  MOD_RES (77)..(77): Selenocysteine
  MOD_RES (100)..(100): Selenocysteine
  MOD_RES (109)..(109): Selenocysteine
  MOD_RES (142)..(142): Selenocysteine
  MOD_RES (148)..(149): Selenocysteine
  MOD_RES (170)..(170): Selenocysteine
  MOD_RES (177)..(177): Selenocysteine
  MOD_RES (181)..(181): Selenocysteine
  MOD_RES (210)..(210): Selenocysteine
  MOD_RES (229)..(229): Selenocysteine
  MOD_RES (296)..(296): Selenocysteine
MDGXXAPVXKSGAAKLVKRNFLEALKSNDFGKLKAILIQRQIDVDXVFEVEDENMVLASYKQGYWLPSYKLKSSWAXGLHLSVLFGHVECLLVLLDHNAXINCRPNGKXPLHVACEMANVDCVKILCDRGAKLNCYSLSGHXALHFCXXPSSILCAKQLVWRGANVNMKXNNQDEEXPLHXAAHFGLSELVAFYVEHGAIVDSVNAHMEXPLAIAAYWALRFKEQEYSXEHHLVCRMLLDYKAEVNARDDDFKSPLHKAAWNCDHVLMHMMLEAGAEANLMDINGCAAIQYVLKVXSVRPAAQPEICYQLLLNHGAARIYPPQFHKVRLCPVVSRLRKIQMAALSEISK

SEQ ID NO: 3369 - protein, 426 aa, Homo sapiens
  MOD_RES (4)..(5): Selenocysteine
  MOD_RES (9)..(9): Selenocysteine
  MOD_RES (46)..(46): Selenocysteine
  MOD_RES (77)..(77): Selenocysteine
  MOD_RES (100)..(100): Selenocysteine
  MOD_RES (109)..(109): Selenocysteine
  MOD_RES (142)..(142): Selenocysteine
  MOD_RES (148)..(149): Selenocysteine
  MOD_RES (170)..(170): Selenocysteine
  MOD_RES (177)..(177): Selenocysteine
  MOD_RES (181)..(181): Selenocysteine
  MOD_RES (210)..(210): Selenocysteine
  MOD_RES (229)..(229): Selenocysteine
  MOD_RES (296)..(296): Selenocysteine
  MOD_RES (352)..(352): Selenocysteine
  MOD_RES (375)..(375): Selenocysteine
  MOD_RES (383)..(383): Selenocysteine
  MOD_RES (395)..(395): Selenocysteine
MDGXXAPVXKSGAAKLVKRNFLEALKSNDFGKLKAILIQRQIDVDXVFEVEDENMVLASYKQGYWLPSYKLKSSWAXGLHLSVLFGHVECLLVLLDHNAXINCRPNGKXPLHVACEMANVDCVKILCDRGAKLNCYSLSGHXALHFCXXPSSILCAKQLVWRGANVNMKXNNQDEEXPLHXAAHFGLSELVAFYVEHGAIVDSVNAHMEXPLAIAAYWALRFKEQEYSXEHHLVCRMLLDYKAEVNARDDDFKSPLHKAAWNCDHVLMHMMLEAGAEANLMDINGCAAIQYVLKVXSVRPAAQPEICYQLLLNHGAARIYPPQFHKVIQACHSCPKAIEVVVNAYEHIRWNXKWRRAIPDDDLEKYWDFYHSLFXVCCNSPRXLMHLSRCAIRRXLHNRCHRAIPLLSLPLSLKKYLLLEPEGIIY

SEQ ID NO: 3370 - protein, 276 aa, Homo sapiens
  MOD_RES (12)..(12): Selenocysteine
  MOD_RES (35)..(35): Selenocysteine
  MOD_RES (47)..(47): Selenocysteine
  MOD_RES (52)..(52): Selenocysteine
  MOD_RES (68)..(68): Selenocysteine
  MOD_RES (80)..(80): Selenocysteine
  MOD_RES (85)..(85): Selenocysteine
  MOD_RES (119)..(119): Selenocysteine
  MOD_RES (150)..(150): Selenocysteine
  MOD_RES (182)..(182): Selenocysteine
  MOD_RES (193)..(193): Selenocysteine
  MOD_RES (211)..(211): Selenocysteine
  MOD_RES (221)..(221): Selenocysteine
  MOD_RES (236)..(236): Selenocysteine
  MOD_RES (267)..(267): Selenocysteine
MPLCNGGNLAVXGSWADRSPLHEAASQGRLLALRXLLSQGYNVNAVXLDHVXPLHEACLGDHVACARXLLEAGANVNAIXIDGVXPLFNACSQGSPSCAELLLEYGAKAQLESCLPSPXHEAASKGHHECLDILISWGIDVDQEIPHLGXPLYVACMSQQFHCIWKLLYAGADVQKGKYWDXPLHAAAQQSSXEIVNLLLEFGADINAKNXELLRPIDVAXSSSMVERILLQHEAXPSSLYQLCRLCIRSYIGKPRLHLIPQLQLPXLLKNFLQYR

SEQ ID NO: 3371 - protein, 20 aa, Homo sapiens
  MOD_RES (20)..(20): Selenocysteine
MSVLEENRPFAQQLSNVYFX

SEQ ID NO: 3372 - protein, 329 aa, Homo sapiens
  MOD_RES (20)..(20): Selenocysteine
  MOD_RES (62)..(62): Selenocysteine
  MOD_RES (88)..(88): Selenocysteine
  MOD_RES (100)..(100): Selenocysteine
  MOD_RES (105)..(105): Selenocysteine
  MOD_RES (121)..(121): Selenocysteine
  MOD_RES (133)..(133): Selenocysteine
  MOD_RES (138)..(138): Selenocysteine
  MOD_RES (172)..(172): Selenocysteine
  MOD_RES (203)..(203): Selenocysteine
  MOD_RES (235)..(235): Selenocysteine
  MOD_RES (246)..(246): Selenocysteine
  MOD_RES (264)..(264): Selenocysteine
  MOD_RES (274)..(274): Selenocysteine
  MOD_RES (289)..(289): Selenocysteine
  MOD_RES (320)..(320): Selenocysteine
MSVLEENRPFAQQLSNVYFXILSLFCFKLFVKISLAILSHFYIVKGNRKEAARIAAEFYGVXQGQGSWADRSPLHEAASQGRLLALRXLLSQGYNVNAVXLDHVXPLHEACLGDHVACARXLLEAGANVNAIXIDGVXPLFNACSQGSPSCAELLLEYGAKAQLESCLPSPXHEAASKGHHECLDILISWGIDVDQEIPHLGXPLYVACMSQQFHCIWKLLYAGADVQKGKYWDXPLHAAAQQSSXEIVNLLLEFGADINAKNXELLRPIDVAXSSSMVERILLQHEAXPSSLYQLCRLCIRSYIGKPRLHLIPQLQLPXLLKNFLQYR

SEQ ID NO: 3373 - protein, 197 aa, Homo sapiens
  MOD_RES (53)..(53): Selenocysteine
  MOD_RES (82)..(82): Selenocysteine
  MOD_RES (102)..(102): Selenocysteine
  MOD_RES (105)..(105): Selenocysteine
  MOD_RES (147)..(147): Selenocysteine
  MOD_RES (152)..(152): Selenocysteine
  MOD_RES (156)..(156): Selenocysteine
  MOD_RES (166)..(166): Selenocysteine
  MOD_RES (175)..(175): Selenocysteine
  MOD_RES (192)..(192): Selenocysteine
MPFLHGFRRIIFEYQPLVDAILGSLGIQDPERQESLDRPSYVASEESRILVLXELLERKAHSPFYQEGVSNALLKMAELGLXRAADVLLRHGANLNFEDPVXYYXALHIAVLRNQPDMVELLVHHGADVNRRDREKLLCSMLWPAAXGCRSXILRXFVSYWKEGQXSRPPPKMGXQCSPASSSCLVRPWEGXKRRPR

SEQ ID NO: 3374 - protein, 392 aa, Homo sapiens
  MOD_RES (53)..(53): Selenocysteine
  MOD_RES (82)..(82): Selenocysteine
  MOD_RES (102)..(102): Selenocysteine
  MOD_RES (105)..(105): Selenocysteine
  MOD_RES (177)..(178): Selenocysteine
  MOD_RES (183)..(183): Selenocysteine
  MOD_RES (186)..(186): Selenocysteine
  MOD_RES (195)..(195): Selenocysteine
  MOD_RES (214)..(214): Selenocysteine
  MOD_RES (234)..(234): Selenocysteine
  MOD_RES (285)..(285): Selenocysteine
  MOD_RES (299)..(299): Selenocysteine
  MOD_RES (306)..(306): Selenocysteine
MPFLHGFRRIIFEYQPLVDAILGSLGIQDPERQESLDRPSYVASEESRILVLXELLERKAHSPFYQEGVSNALLKMAELGLXRAADVLLRHGANLNFEDPVXYYXALHIAVLRNQPDMVELLVHHGADVNRRDRIHESSPLDLASEEPERLPCLQRLLDLGADVNAADKHGADVKAXXKDGDXVFXCIIFLLGEXVGGDKEEAQMINRFCFQVXRLLLAHGADPSECPAHESLXHICLKSFKLHFPLLRFLLESGAAYNCSLHGASCWSGFHIIFERLCSHPGCXEDESHADLLRKAEXVLDLMVXNSQKLQLPENFDIHPVGSLAEKIQALHFSLRQLESYPPPLKHLCRVAIRLYLQPWPVDVKVKALPLPDRLKWYLLSEHSGSVEDDI

SEQ ID NO: 3375 - protein, 421 aa, Homo sapiens
  MOD_RES (53)..(53): Selenocysteine
  MOD_RES (82)..(82): Selenocysteine
  MOD_RES (102)..(102): Selenocysteine
  MOD_RES (105)..(105): Selenocysteine
  MOD_RES (173)..(173): Selenocysteine
  MOD_RES (190)..(190): Selenocysteine
  MOD_RES (206)..(207): Selenocysteine
  MOD_RES (212)..(212): Selenocysteine
  MOD_RES (215)..(215): Selenocysteine
  MOD_RES (224)..(224): Selenocysteine
  MOD_RES (243)..(243): Selenocysteine
  MOD_RES (263)..(263): Selenocysteine
  MOD_RES (314)..(314): Selenocysteine
  MOD_RES (328)..(328): Selenocysteine
  MOD_RES (335)..(335): Selenocysteine
MPFLHGFRRIIFEYQPLVDAILGSLGIQDPERQESLDRPSYVASEESRILVLXELLERKAHSPFYQEGVSNALLKMAELGLXRAADVLLRHGANLNFEDPVXYYXALHIAVLRNQPDMVELLVHHGADVNRRDRIHESSPLDLASEEPERLPCLQRLLDLGADVNAADKHGKXALLHALASSDGVQIHNXENIRLLLEGGADVKAXXKDGDXVFXCIIFLLGEXVGGDKEEAQMINRFCFQVXRLLLAHGADPSECPAHESLXHICLKSFKLHFPLLRFLLESGAAYNCSLHGASCWSGFHIIFERLCSHPGCXEDESHADLLRKAEXVLDLMVXNSQKLQLPENFDIHPVGSLAEKIQALHFSLRQLESYPPPLKHLCRVAIRLYLQPWPVDVKVKALPLPDRLKWYLLSEHSGSVEDDI

SEQ ID NO: 3376 - protein, 274 aa, Homo sapiens
  MOD_RES (29)..(29): Selenocysteine
  MOD_RES (49)..(49): Selenocysteine
  MOD_RES (74)..(74): Selenocysteine
  MOD_RES (83)..(83): Selenocysteine
  MOD_RES (119)..(119): Selenocysteine
  MOD_RES (151)..(152): Selenocysteine
  MOD_RES (206)..(206): Selenocysteine
  MOD_RES (216)..(216): Selenocysteine
  MOD_RES (240)..(240): Selenocysteine
  MOD_RES (242)..(242): Selenocysteine
  MOD_RES (249)..(249): Selenocysteine
  MOD_RES (272)..(272): Selenocysteine
MLHHHCRRNPELQEELQIQAAVAAGDVHXVRKMLEQGYSPNGRDANGWXLLHFSAARGKERCVRVFLEHGADPXVKDLIGGFXALHYAAMHGRARIARLMLESEYRSDIINAKSNDGWXPLHVAAHYGRDSFVRLLLEFKAEVDPLSDKGXXPLQLAIIRERSSCVKILLDHNANIDIQNGFLLRYAVIKSNHSYCRMFLQRGADXNLGRLEDGQXPLHLSALRDDVLCARMLYNYGADXNXRNYEGQXPLAVSISISGSSRPCLDFLQEVXSM

SEQ ID NO: 3377 - protein, 318 aa, Homo sapiens
  MOD_RES (29)..(29): Selenocysteine
  MOD_RES (49)..(49): Selenocysteine
  MOD_RES (74)..(74): Selenocysteine
  MOD_RES (83)..(83): Selenocysteine
  MOD_RES (119)..(119): Selenocysteine
  MOD_RES (151)..(152): Selenocysteine
  MOD_RES (206)..(206): Selenocysteine
  MOD_RES (216)..(216): Selenocysteine
  MOD_RES (240)..(240): Selenocysteine
  MOD_RES (242)..(242): Selenocysteine
  MOD_RES (249)..(249): Selenocysteine
  MOD_RES (272)..(272): Selenocysteine
MLHHHCRRNPELQEELQIQAAVAAGDVHXVRKMLEQGYSPNGRDANGWXLLHFSAARGKERCVRVFLEHGADPXVKDLIGGFXALHYAAMHGRARIARLMLESEYRSDIINAKSNDGWXPLHVAAHYGRDSFVRLLLEFKAEVDPLSDKGXXPLQLAIIRERSSCVKILLDHNANIDIQNGFLLRYAVIKSNHSYCRMFLQRGADXNLGRLEDGQXPLHLSALRDDVLCARMLYNYGADXNXRNYEGQXPLAVSISISGSSRPCLDFLQEVXRQPRNLQDLCRIKIRQCIGLQNLKLLDELPIAKVMKDYLKHKFDDI

SEQ ID NO: 3378 - protein, 116 aa, Homo sapiens
  MOD_RES (29)..(29): Selenocysteine
  MOD_RES (49)..(49): Selenocysteine
MLHHHCRRNPELQEELQIQAAVAAGDVHXVRKMLEQGYSPNGRDANGWXLLHFSAARGKERCVRVFLEHGGQPRNLQDLCRIKIRQCIGLQNLKLLDELPIAKVMKDYLKHKFDDI

SEQ ID NO: 3379 - protein, 51 aa, Homo sapiens
  MOD_RES (25)..(25): Selenocysteine
  MOD_RES (50)..(50): Selenocysteine
MSSSMWYIMQSIQSKYSLSERLIRXIAAIRSFPHDNVEDLIRGGADVNCXH

SEQ ID NO: 3380 - protein, 85 aa, Homo sapiens
  MOD_RES (25)..(25): Selenocysteine
  MOD_RES (50)..(50): Selenocysteine
  MOD_RES (53)..(53): Selenocysteine
MSSSMWYIMQSIQSKYSLSERLIRXIAAIRSFPHDNVEDLIRGGADVNCXHGXLKPLHCACMVSDADCVELLLEKGAEDSLGVAC

SEQ ID NO: 3381 - protein, 95 aa, Homo sapiens
  MOD_RES (25)..(25): Selenocysteine
  MOD_RES (50)..(50): Selenocysteine
  MOD_RES (53)..(53): Selenocysteine
MSSSMWYIMQSIQSKYSLSERLIRXIAAIRSFPHDNVEDLIRGGADVNCXHGXLKPLHCACMVSDADCVELLLEKGAELLSYLHLYHQDSLGVAC

SEQ ID NO: 3382 - protein, 86 aa, Homo sapiens
  MOD_RES (25)..(25): Selenocysteine
  MOD_RES (50)..(50): Selenocysteine
  MOD_RES (53)..(53): Selenocysteine
  MOD_RES (83)..(83): Selenocysteine
MSSSMWYIMQSIQSKYSLSERLIRXIAAIRSFPHDNVEDLIRGGADVNCXHGXLKPLHCACMVSDADCVELLLEKGAEVMFLXHSH

SEQ ID NO: 3383 - protein, 112 aa, Homo sapiens
  MOD_RES (25)..(25): Selenocysteine
  MOD_RES (50)..(50): Selenocysteine
  MOD_RES (53)..(53): Selenocysteine
  MOD_RES (88)..(88): Selenocysteine
MSSSMWYIMQSIQSKYSLSERLIRXIAAIRSFPHDNVEDLIRGGADVNCXHGXLKPLHCACMVSDADCVELLLEKGAEVNALDGYNRXALHYAAEKDEACVEVLLEYGANPN

SEQ ID NO: 3384 - protein, 114 aa, Homo sapiens
  MOD_RES (25)..(25): Selenocysteine
  MOD_RES (50)..(50): Selenocysteine
  MOD_RES (53)..(53): Selenocysteine
  MOD_RES (88)..(88): Selenocysteine
MSSSMWYIMQSIQSKYSLSERLIRXIAAIRSFPHDNVEDLIRGGADVNCXHGXLKPLHCACMVSDADCVELLLEKGAEVNALDGYNRXALHYAAEKDEACVEVLLEYGANPNAL

SEQ ID NO: 3385 - protein, 127 aa, Homo sapiens
  MOD_RES (25)..(25): Selenocysteine
  MOD_RES (50)..(50): Selenocysteine
  MOD_RES (53)..(53): Selenocysteine
  MOD_RES (88)..(88): Selenocysteine
  MOD_RES (120)..(120): Selenocysteine
MSSSMWYIMQSIQSKYSLSERLIRXIAAIRSFPHDNVEDLIRGGADVNCXHGXLKPLHCACMVSDADCVELLLEKGAEVNALDGYNRXALHYAAEKDEACVEVLLEYGANPNALDGNRDXPLHWAAF

SEQ ID NO: 3386 - protein, 288 aa, Homo sapiens
  MOD_RES (25)..(25): Selenocysteine
  MOD_RES (50)..(50): Selenocysteine
  MOD_RES (53)..(53): Selenocysteine
  MOD_RES (88)..(88): Selenocysteine
  MOD_RES (120)..(120): Selenocysteine
  MOD_RES (153)..(153): Selenocysteine
  MOD_RES (186)..(186): Selenocysteine
  MOD_RES (201)..(201): Selenocysteine
  MOD_RES (225)..(225): Selenocysteine
  MOD_RES (241)..(241): Selenocysteine
  MOD_RES (249)..(249): Selenocysteine
  MOD_RES (252)..(252): Selenocysteine
MSSSMWYIMQSIQSKYSLSERLIRXIAAIRSFPHDNVEDLIRGGADVNCXHGXLKPLHCACMVSDADCVELLLEKGAEVNALDGYNRXALHYAAEKDEACVEVLLEYGANPNALDGNRDXPLHWAAFKNNAECVRALLESGASVNALDYNNDXPLSWAAMKGNLESVSILLDYGAEVRVINLIGQXPISRLVALLVRGLGXEKEDSCFELLHRAVGHFELRKNGXMPREVARDPQLCEKLXVLCSAPGXLKXLARYAVRRSLGLQYLPDAVKGLPLPASLKEYLLLLE

SEQ ID NO: 3387 - protein, 65 aa, Homo sapiens
  MOD_RES (25)..(25): Selenocysteine
MSSSMWYIMQSIQSKYSLSERLIRXIAAIRSFPHDNVEDLIRGSMVAIESGLLVQLSCLMIREQM

SEQ ID NO: 3388 - protein, 66 aa, Homo sapiens
  MOD_RES (25)..(25): Selenocysteine
MSSSMWYIMQSIQSKYSLSERLIRXIAAIRSFPHDNVEDLIRGSMVAIESGLLVQLSCLMIRFPVL

SEQ ID NO: 3389 - protein, 252 aa, Homo sapiens
  MOD_RES (66)..(66): Selenocysteine
  MOD_RES (99)..(99): Selenocysteine
  MOD_RES (104)..(104): Selenocysteine
  MOD_RES (159)..(159): Selenocysteine
  MOD_RES (199)..(199): Selenocysteine
  MOD_RES (215)..(215): Selenocysteine
MDGKQGGMDGSKPAGPRDFPGIRLLSNPLMGDAVSDWSPMHEAAIHGHQLSLRNLISQGWAVNIIXADHVSPLHEACLGGHLSCVKILLKHGAQVNGVXADWHXPLFNACVSGSWDCVNLLLQHGASVQPESDLASPIHEAARRAYGGNIDHKISHLGXPLYLACENQQRACVKKLLESGADVNQGKGQDSPLHAVARXASEELACLLMDFGADXQAKNAEGKRPVELVPPESPLAQLFLEREGASLPKPKP

SEQ ID NO: 3390 - protein, 262 aa, Homo sapiens
  MOD_RES (66)..(66): Selenocysteine
  MOD_RES (99)..(99): Selenocysteine
  MOD_RES (104)..(104): Selenocysteine
  MOD_RES (169)..(169): Selenocysteine
  MOD_RES (209)..(209): Selenocysteine
  MOD_RES (225)..(225): Selenocysteine
MDGKQGGMDGSKPAGPRDFPGIRLLSNPLMGDAVSDWSPMHEAAIHGHQLSLRNLISQGWAVNIIXADHVSPLHEACLGGHLSCVKILLKHGAQVNGVXADWHXPLFNACVSGSWDCVNLLLQHGASVQPESDLASPIHEAARRGHVECVNSLIAYGGNIDHKISHLGXPLYLACENQQRACVKKLLESGADVNQGKGQDSPLHAVARXASEELACLLMDFGADXQAKNAEGKRPVELVPPESPLAQLFLEREGASLPKPKP

SEQ ID NO: 3391 - protein, 294 aa, Homo sapiens
  MOD_RES (66)..(66): Selenocysteine
  MOD_RES (99)..(99): Selenocysteine
  MOD_RES (104)..(104): Selenocysteine
  MOD_RES (169)..(169): Selenocysteine
  MOD_RES (209)..(209): Selenocysteine
  MOD_RES (225)..(225): Selenocysteine
  MOD_RES (279)..(279): Selenocysteine
MDGKQGGMDGSKPAGPRDFPGIRLLSNPLMGDAVSDWSPMHEAAIHGHQLSLRNLISQGWAVNIIXADHVSPLHEACLGGHLSCVKILLKHGAQVNGVXADWHXPLFNACVSGSWDCVNLLLQHGASVQPESDLASPIHEAARRGHVECVNSLIAYGGNIDHKISHLGXPLYLACENQQRACVKKLLESGADVNQGKGQDSPLHAVARXASEELACLLMDFGADXQAKNAEGKRPVELVPPESPLAQLFLEREGPPSLMQLCRLRIRKCFGIQQHHKIXKLVLPEDLKQFLLHL

SEQ ID NO: 3392 - protein, 211 aa, Homo sapiens
  MOD_RES (1)..(1): Any amino acid
  MOD_RES (15)..(15): Selenocysteine
  MOD_RES (20)..(20): Selenocysteine
  MOD_RES (85)..(85): Selenocysteine
  MOD_RES (125)..(125): Selenocysteine
  MOD_RES (141)..(141): Selenocysteine
  MOD_RES (173)..(173): Selenocysteine
  MOD_RES (190)..(190): Selenocysteine
XKILLKHGAQVNGVXADWHXPLFNACVSGSWDCVNLLLQHGASVQPESDLASPIHEAARRGHVECVNSLIAYGGNIDHKISHLGXPLYLACENQQRACVKKLLESGADVNQGKGQDSPLHAVARXASEELACLLMDFGADXQAKNAEGKRPVELVPPESPLAQLFLEREDGVXLCRPGWSAVARSRLIAXSASRNSDKMCSPGQQSFMLLV

SEQ ID NO: 3393 - protein, 78 aa, Homo sapiens
  MOD_RES (12)..(12): Selenocysteine
  MOD_RES (18)..(18): Selenocysteine
  MOD_RES (23)..(23): Selenocysteine
  MOD_RES (29)..(29): Selenocysteine
  MOD_RES (37)..(38): Selenocysteine
  MOD_RES (40)..(40): Selenocysteine
  MOD_RES (58)..(58): Selenocysteine
  MOD_RES (64)..(64): Selenocysteine
MPALPLDQLQIXHKDPKXGKLRXSPALEXSLHSSQVXXVXWMKPCLPSFRSSAISSSXVVCKGXGPIPHPRSLRRGAD

SEQ ID NO: 3394 - protein, 240 aa, Homo sapiens
  MOD_RES (12)..(12): Selenocysteine
  MOD_RES (18)..(18): Selenocysteine
  MOD_RES (23)..(23): Selenocysteine
  MOD_RES (60)..(60): Selenocysteine
  MOD_RES (86)..(86): Selenocysteine
  MOD_RES (126)..(126): Selenocysteine
  MOD_RES (132)..(132): Selenocysteine
  MOD_RES (185)..(185): Selenocysteine
  MOD_RES (197)..(197): Selenocysteine
  MOD_RES (200)..(200): Selenocysteine
  MOD_RES (221)..(222): Selenocysteine
  MOD_RES (233)..(233): Selenocysteine
MPALPLDQLQIXHKDPKXGKLRXSPALHPEQKADRYFVLYKPPPKDNIPALVEEYLERAXFVANDLDWLLALPHDKFWCQVIFDEXLQKCLDSYLRYVPRKFDEGVASAPEVVDMQKRLHRSVFLXFLRMSXHKESKDHFISPSAFGEILYNNFLFDIPKILDLCVLFGKGNSPLLQKMIGNIFXQQPSYYSDLDEXLPXILQVFSNILQHCGLQGDGANXXPQKLEERGRLXPSDMPLL

SEQ ID NO: 3395 - protein, 757 aa, Homo sapiens
  MOD_RES (12)..(12): Selenocysteine
  MOD_RES (18)..(18): Selenocysteine
  MOD_RES (23)..(23): Selenocysteine
  MOD_RES (60)..(60): Selenocysteine
  MOD_RES (86)..(86): Selenocysteine
  MOD_RES (126)..(126): Selenocysteine
  MOD_RES (132)..(132): Selenocysteine
  MOD_RES (185)..(185): Selenocysteine
  MOD_RES (197)..(197): Selenocysteine
  MOD_RES (200)..(200): Selenocysteine
  MOD_RES (221)..(222): Selenocysteine
  MOD_RES (233)..(233): Selenocysteine
  MOD_RES (252)..(252): Selenocysteine
  MOD_RES (254)..(255): Selenocysteine
  MOD_RES (269)..(269): Selenocysteine
  MOD_RES (390)..(390): Selenocysteine
  MOD_RES (392)..(392): Selenocysteine
  MOD_RES (412)..(412): Selenocysteine
  MOD_RES (431)..(431): Selenocysteine
  MOD_RES (433)..(433): Selenocysteine
  MOD_RES (513)..(513): Selenocysteine
  MOD_RES (530)..(530): Selenocysteine
  MOD_RES (534)..(534): Selenocysteine
  MOD_RES (564)..(564): Selenocysteine
  MOD_RES (570)..(570): Selenocysteine
  MOD_RES (619)..(619): Selenocysteine
  MOD_RES (643)..(643): Selenocysteine
  MOD_RES (650)..(650): Selenocysteine
  MOD_RES (708)..(708): Selenocysteine
  MOD_RES (723)..(724): Selenocysteine
  MOD_RES (736)..(736): Selenocysteine
  MOD_RES (744)..(744): Selenocysteine
MPALPLDQLQIXHKDPKXGKLRXSPALHPEQKADRYFVLYKPPPKDNIPALVEEYLERAXFVANDLDWLLALPHDKFWCQVIFDEXLQKCLDSYLRYVPRKFDEGVASAPEVVDMQKRLHRSVFLXFLRMSXHKESKDHFISPSAFGEILYNNFLFDIPKILDLCVLFGKGNSPLLQKMIGNIFXQQPSYYSDLDEXLPXILQVFSNILQHCGLQGDGANXXPQKLEERGRLXPSDMPLLELKDIVLYLCDXCXXLWAFLDIFPLACQXFQKHDFCYRLASFYEAAIPEMESAIKKRRLEDSKLLGDLWQRLSHSRKKLMEIFHIILNQICLLPILESSCDNIQGFIEEFLQIFSSLLQEKRFLRDYDALFPVAEDISLLQQASSVLDEXRXAYILQAVESAWEGVDRRKAXDAKDPSVIEEPNGEPNGVXVXAEAVSQASSHPENSEEEECMGAAAAVGPAMCGVELDSLISQVKDLLPDLGEGFILACLEYYHYDPEQVINNILEERLAPXLSQLDRNLDREMKPDPXPLLXSRHNVFQNDEFDVFSRDSVDLSRVHKGKSXRKEENXRSLLNDKRAVAAQRQRYEQYSVVVEEVPLQPGESLPYHSVYYEDEYDDXYDGNQVGANDADSDDELISRRPFXIPQVLRXKVPREGQEEDDDDEEDDADEEAPKPDHFVQDPAVLREKAEARRMAFLAKKGYRHDSSXAVAGSPRGHGQSREXXQERRKKEANKAXRANHNRRXMADRKRSKGMIPS

SEQ ID NO: 3396 - protein, 37 aa, Homo sapiens
  MOD_RES (12)..(12): Selenocysteine
  MOD_RES (18)..(18): Selenocysteine
  MOD_RES (23)..(23): Selenocysteine
  MOD_RES (30)..(30): Selenocysteine
MPALPLDQLQIXHKDPKXGKLRXSPALICXCNSMIQI

SEQ ID NO: 3397 - protein, 681 aa, Homo sapiens
  MOD_RES (12)..(12): Selenocysteine
  MOD_RES (18)..(18): Selenocysteine
  MOD_RES (23)..(23): Selenocysteine
  MOD_RES (33)..(33): Selenocysteine
  MOD_RES (73)..(73): Selenocysteine
  MOD_RES (79)..(79): Selenocysteine
  MOD_RES (109)..(109): Selenocysteine
  MOD_RES (121)..(121): Selenocysteine
  MOD_RES (124)..(124): Selenocysteine
  MOD_RES (145)..(146): Selenocysteine
  MOD_RES (157)..(157): Selenocysteine
  MOD_RES (176)..(176): Selenocysteine
  MOD_RES (178)..(179): Selenocysteine
  MOD_RES (193)..(193): Selenocysteine
  MOD_RES (314)..(314): Selenocysteine
  MOD_RES (316)..(316): Selenocysteine
  MOD_RES (336)..(336): Selenocysteine
  MOD_RES (355)..(355): Selenocysteine
  MOD_RES (357)..(357): Selenocysteine
  MOD_RES (437)..(437): Selenocysteine
  MOD_RES (454)..(454): Selenocysteine
  MOD_RES (458)..(458): Selenocysteine
  MOD_RES (488)..(488): Selenocysteine
  MOD_RES (494)..(494): Selenocysteine
  MOD_RES (543)..(543): Selenocysteine
  MOD_RES (567)..(567): Selenocysteine
  MOD_RES (574)..(574): Selenocysteine
  MOD_RES (632)..(632): Selenocysteine
  MOD_RES (647)..(648): Selenocysteine
  MOD_RES (660)..(660): Selenocysteine
  MOD_RES (668)..(668): Selenocysteine
MPALPLDQLQIXHKDPKXGKLRXSPALVIFDEXLQKCLDSYLRYVPRKFDEGVASAPEVVDMQKRLHRSVFLXFLRMSXHKESKILDLCVLFGKGNSPLLQKMIGNIFXQQPSYYSDLDEXLPXILQVFSNILQHCGLQGDGANXXPQKLEERGRLXPSDMPLLELKDIVLYLCDXCXXLWAFLDIFPLACQXFQKHDFCYRLASFYEAAIPEMESAIKKRRLEDSKLLGDLWQRLSHSRKKLMEIFHIILNQICLLPILESSCDNIQGFIEEFLQIFSSLLQEKRFLRDYDALFPVAEDISLLQQASSVLDEXRXAYILQAVESAWEGVDRRKAXDAKDPSVIEEPNGEPNGVXVXAEAVSQASSHPENSEEEECMGAAAAVGPAMCGVELDSLISQVKDLLPDLGEGFILACLEYYHYDPEQVINNILEERLAPXLSQLDRNLDREMKPDPXPLLXSRHNVFQNDEFDVFSRDSVDLSRVHKGKSXRKEENXRSLLNDKRAVAAQRQRYEQYSVVVEEVPLQPGESLPYHSVYYEDEYDDXYDGNQVGANDADSDDELISRRPFXIPQVLRXKVPREGQEEDDDDEEDDADEEAPKPDHFVQDPAVLREKAEARRMAFLAKKGYRHDSSXAVAGSPRGHGQSREXXQERRKKEANKAXRANHNRRXMADRKRSKGMIPS

SEQ ID NO: 3398 - protein, 87 aa, Homo sapiens
  MOD_RES (7)..(11): Selenocysteine
  MOD_RES (21)..(21): Selenocysteine
  MOD_RES (25)..(25): Selenocysteine
  MOD_RES (55)..(55): Selenocysteine
  MOD_RES (61)..(61): Selenocysteine
SWPAWSXXXXXQSREMKPDPXPLLXSRHNVFQNDEFDVFSRDSVDLSRVHKGKSXRKEENXRSLLNDKRAVAAQRQRYEQYSVVVEE

SEQ ID NO: 3399 - protein, 54 aa, Homo sapiens
  MOD_RES (1)..(1): Any amino acid
  MOD_RES (10)..(10): Selenocysteine
  MOD_RES (21)..(21): Selenocysteine
  MOD_RES (49)..(49): Selenocysteine
XSAGAQGAVXVVGGGGGGGGXEPVVEPPRPPRVCRDHVCLICWDPRAGXGQVIL

SEQ ID NO: 3400 - protein, 111 aa, Homo sapiens
  MOD_RES (7)..(7): Selenocysteine
  MOD_RES (17)..(17): Selenocysteine
  MOD_RES (46)..(46): Selenocysteine
MALPRLXGALRSFSNVXKQDNYNEEVADLKIKRSKLHEQVLDLGLXWKKIIKFLNEKLEKSKMQSINEDLKDILHAAKQIEVNCPFQKRRLDGKEEDEKMSRASDRFRGLR

SEQ ID NO: 3401 - protein, 176 aa, Homo sapiens
  MOD_RES (7)..(7): Selenocysteine
  MOD_RES (17)..(17): Selenocysteine
  MOD_RES (46)..(46): Selenocysteine
  MOD_RES (83)..(83): Selenocysteine
  MOD_RES (100)..(100): Selenocysteine
  MOD_RES (112)..(112): Selenocysteine
  MOD_RES (128)..(128): Selenocysteine
  MOD_RES (134)..(134): Selenocysteine
  MOD_RES (147)..(147): Selenocysteine
  MOD_RES (153)..(153): Selenocysteine
MALPRLXGALRSFSNVXKQDNYNEEVADLKIKRSKLHEQVLDLGLXWKKIIKFLNEKLEKSKMQSINEDLKDILHAAKQIVGXDNGREAIESGAAFLFMXFHLKDSVGHKEXKAIKQMFGPFPSSSAXAACNAXNRIISHFSQDDLXALVQMXEKEHGDRVFFGKNLAFSFDMHDL

SEQ ID NO: 3402 - protein, 731 aa, Homo sapiens
  MOD_RES (7)..(7): Selenocysteine
  MOD_RES (17)..(17): Selenocysteine
  MOD_RES (46)..(46): Selenocysteine
  MOD_RES (83)..(83): Selenocysteine
  MOD_RES (100)..(100): Selenocysteine
  MOD_RES (112)..(112): Selenocysteine
  MOD_RES (128)..(128): Selenocysteine
  MOD_RES (134)..(134): Selenocysteine
  MOD_RES (147)..(147): Selenocysteine
  MOD_RES (153)..(153): Selenocysteine
  MOD_RES (188)..(188): Selenocysteine
  MOD_RES (191)..(191): Selenocysteine
  MOD_RES (209)..(209): Selenocysteine
  MOD_RES (218)..(218): Selenocysteine
  MOD_RES (234)..(234): Selenocysteine
  MOD_RES (239)..(239): Selenocysteine
  MOD_RES (250)..(250): Selenocysteine
  MOD_RES (289)..(289): Selenocysteine
  MOD_RES (327)..(327): Selenocysteine
  MOD_RES (415)..(415): Selenocysteine
  MOD_RES (487)..(487): Selenocysteine
  MOD_RES (491)..(491): Selenocysteine
  MOD_RES (501)..(501): Selenocysteine
  MOD_RES (506)..(506): Selenocysteine
  MOD_RES (512)..(512): Selenocysteine
  MOD_RES (547)..(547): Selenocysteine
  MOD_RES (565)..(565): Selenocysteine
  MOD_RES (578)..(578): Selenocysteine
  MOD_RES (583)..(584): Selenocysteine
  MOD_RES (592)..(592): Selenocysteine
  MOD_RES (631)..(631): Selenocysteine
  MOD_RES (638)..(638): Selenocysteine
  MOD_RES (650)..(650): Selenocysteine
  MOD_RES (659)..(659): Selenocysteine
  MOD_RES (684)..(684): Selenocysteine
MALPRLXGALRSFSNVXKQDNYNEEVADLKIKRSKLHEQVLDLGLXWKKIIKFLNEKLEKSKMQSINEDLKDILHAAKQIVGXDNGREAIESGAAFLFMXFHLKDSVGHKEXKAIKQMFGPFPSSSAXAACNAXNRIISHFSQDDLXALVQMXEKEHGDRVFFGKNLAFSFDMHDLDHFDELPINGEXQKXISLDYKKFLNEHLQEACXPELKPVEKXNGSFLWCEVEKYLNSXLKEMXEVPRVEDLCCXLYDMLASIKSGDELQDELFELLGPEGLELIEKLLQNRIXIVDRFLNSSNDHRFQALQDNCKKILGENAKPNYGCQVXIQSEQEKQLMKQYRREEKRIARREKKAGEDLEVSEGLMCFDPKELRIQREQALLNARSVPILSRQRDADVEKIHYPHVYDSQAEAMKXSAFIAGAKMILPEGIQRENNKLYEEVRIPYSEPMPLSFEEKPVYIQDLDEIGQLAFKGMKRLNRIQSIVFEXAYNXNENMLICAPXGAGKXNIAMLXVLHEIRQHFQQGVIKKNEFKIVYVAPMKALAAEMXDYFSRRLEPLGIIVKELXGDMQLSKSEILRXQMLVXXPEKWDVVXRKSVGDVALSQIVRLLILDEVHLLHEDRGPVLESIVARXLRQVESXQSMIRILGLSAXLPNYLDVAXFLHVNPYIGLFFFDGRFRPVPLGQXFLGIKCANKMQQLNNMDEVCYENVLKQVKAGHQVHLFYLLLHLFICF

SEQ ID NO: 3403 - protein, 2202 aa, Homo sapiens
  MOD_RES (7)..(7): Selenocysteine
  MOD_RES (17)..(17): Selenocysteine
  MOD_RES (46)..(46): Selenocysteine
  MOD_RES (83)..(83): Selenocysteine
  MOD_RES (100)..(100): Selenocysteine
  MOD_RES (112)..(112): Selenocysteine
  MOD_RES (128)..(128): Selenocysteine
  MOD_RES (134)..(134): Selenocysteine
  MOD_RES (147)..(147): Selenocysteine
  MOD_RES (153)..(153): Selenocysteine
  MOD_RES (188)..(188): Selenocysteine
  MOD_RES (191)..(191): Selenocysteine
  MOD_RES (209)..(209): Selenocysteine
  MOD_RES (218)..(218): Selenocysteine
  MOD_RES (234)..(234): Selenocysteine
  MOD_RES (239)..(239): Selenocysteine
  MOD_RES (250)..(250): Selenocysteine
  MOD_RES (289)..(289): Selenocysteine
  MOD_RES (327)..(327): Selenocysteine
  MOD_RES (415)..(415): Selenocysteine
  MOD_RES (487)..(487): Selenocysteine
  MOD_RES (491)..(491): Selenocysteine
  MOD_RES (501)..(501): Selenocysteine
  MOD_RES (506)..(506): Selenocysteine
  MOD_RES (512)..(512): Selenocysteine
  MOD_RES (547)..(547): Selenocysteine
  MOD_RES (565)..(565): Selenocysteine
  MOD_RES (578)..(578): Selenocysteine
  MOD_RES (583)..(584): Selenocysteine
  MOD_RES (592)..(592): Selenocysteine
  MOD_RES (631)..(631): Selenocysteine
  MOD_RES (638)..(638): Selenocysteine
  MOD_RES (650)..(650): Selenocysteine
  MOD_RES (659)..(659): Selenocysteine
  MOD_RES (684)..(684): Selenocysteine
  MOD_RES (728)..(728): Selenocysteine
  MOD_RES (731)..(731): Selenocysteine
  MOD_RES (751)..(751): Selenocysteine
  MOD_RES (809)..(809): Selenocysteine
  MOD_RES (811)..(811): Selenocysteine
  MOD_RES (828)..(828): Selenocysteine
  MOD_RES (868)..(869): Selenocysteine
  MOD_RES (878)..(878): Selenocysteine
  MOD_RES (881)..(881): Selenocysteine
  MOD_RES (906)..(906): Selenocysteine
  MOD_RES (908)..(908): Selenocysteine
  MOD_RES (920)..(920): Selenocysteine
  MOD_RES (945)..(945): Selenocysteine
  MOD_RES (973)..(973): Selenocysteine
  MOD_RES (979)..(979): Selenocysteine
  MOD_RES (984)..(984): Selenocysteine
  MOD_RES (994)..(994): Selenocysteine
  MOD_RES (997)..(997): Selenocysteine
  MOD_RES (1007)..(1007): Selenocysteine
  MOD_RES (1036)..(1036): Selenocysteine
  MOD_RES (1046)..(1046): Selenocysteine
  MOD_RES (1063)..(1063): Selenocysteine
  MOD_RES (1104)..(1104): Selenocysteine
  MOD_RES (1106)..(1106): Selenocysteine
  MOD_RES (1139)..(1139): Selenocysteine
  MOD_RES (1147)..(1147): Selenocysteine
  MOD_RES (1192)..(1192): Selenocysteine
  MOD_RES (1194)..(1194): Selenocysteine
  MOD_RES (1199)..(1199): Selenocysteine
  MOD_RES (1207)..(1207): Selenocysteine
  MOD_RES (1215)..(1215): Selenocysteine
  MOD_RES (1228)..(1228): Selenocysteine
  MOD_RES (1256)..(1256): Selenocysteine
  MOD_RES (1300)..(1300): Selenocysteine
  MOD_RES (1311)..(1311): Selenocysteine
  MOD_RES (1332)..(1332): Selenocysteine
  MOD_RES (1337)..(1337): Selenocysteine
  MOD_RES (1341)..(1341): Selenocysteine
  MOD_RES (1351)..(1351): Selenocysteine
  MOD_RES (1356)..(1356): Selenocysteine
  MOD_RES (1372)..(1372): Selenocysteine
  MOD_RES (1408)..(1408): Selenocysteine
  MOD_RES (1412)..(1412): Selenocysteine
  MOD_RES (1426)..(1427): Selenocysteine
  MOD_RES (1448)..(1448): Selenocysteine
  MOD_RES (1473)..(1473): Selenocysteine
  MOD_RES (1480)..(1480): Selenocysteine
  MOD_RES (1491)..(1491): Selenocysteine
  MOD_RES (1568)..(1568): Selenocysteine
  MOD_RES (1571)..(1571): Selenocysteine
  MOD_RES (1581)..(1581): Selenocysteine
  MOD_RES (1602)..(1602): Selenocysteine
  MOD_RES (1611)..(1611): Selenocysteine
  MOD_RES (1630)..(1630): Selenocysteine
  MOD_RES (1646)..(1646): Selenocysteine
  MOD_RES (1648)..(1648): Selenocysteine
  MOD_RES (1665)..(1665): Selenocysteine
  MOD_RES (1672)..(1672): Selenocysteine
  MOD_RES (1681)..(1681): Selenocysteine
  MOD_RES (1743)..(1743): Selenocysteine
  MOD_RES (1745)..(1745): Selenocysteine
  MOD_RES (1755)..(1755): Selenocysteine
  MOD_RES (1757)..(1757): Selenocysteine
  MOD_RES (1814)..(1814): Selenocysteine
  MOD_RES (1828)..(1828): Selenocysteine
  MOD_RES (1842)..(1842): Selenocysteine
  MOD_RES (1856)..(1856): Selenocysteine
  MOD_RES (1889)..(1889): Selenocysteine
  MOD_RES (1911)..(1911): Selenocysteine
  MOD_RES (1913)..(1913): Selenocysteine
  MOD_RES (1915)..(1915): Selenocysteine
  MOD_RES (1939)..(1939): Selenocysteine
  MOD_RES (1944)..(1944): Selenocysteine
  MOD_RES (1963)..(1963): Selenocysteine
  MOD_RES (1991)..(1991): Selenocysteine
  MOD_RES (2023)..(2023): Selenocysteine
  MOD_RES (2060)..(2060): Selenocysteine
  MOD_RES (2062)..(2062): Selenocysteine
  MOD_RES (2104)..(2104): Selenocysteine
  MOD_RES (2148)..(2148): Selenocysteine
  MOD_RES (2158)..(2158): Selenocysteine
  MOD_RES (2180)..(2180): Selenocysteine
  MOD_RES (2190)..(2190): Selenocysteine
  MOD_RES (2197)..(2197): Selenocysteine
MALPRLXGALRSFSNVXKQDNYNEEVADLKIKRSKLHEQVLDLGLXWKKIIKFLNEKLEKSKMQSINEDLKDILHAAKQIVGXDNGREAIESGAAFLFMXFHLKDSVGHKEXKAIKQMFGPFPSSSAXAACNAXNRIISHFSQDDLXALVQMXEKEHGDRVFFGKNLAFSFDMHDLDHFDELPINGEXQKXISLDYKKFLNEHLQEACXPELKPVEKXNGSFLWCEVEKYLNSXLKEMXEVPRVEDLCCXLYDMLASIKSGDELQDELFELLGPEGLELIEKLLQNRIXIVDRFLNSSNDHRFQALQDNCKKILGENAKPNYGCQVXIQSEQEKQLMKQYRREEKRIARREKKAGEDLEVSEGLMCFDPKELRIQREQALLNARSVPILSRQRDADVEKIHYPHVYDSQAEAMKXSAFIAGAKMILPEGIQRENNKLYEEVRIPYSEPMPLSFEEKPVYIQDLDEIGQLAFKGMKRLNRIQSIVFEXAYNXNENMLICAPXGAGKXNIAMLXVLHEIRQHFQQGVIKKNEFKIVYVAPMKALAAEMXDYFSRRLEPLGIIVKELXGDMQLSKSEILRXQMLVXXPEKWDVVXRKSVGDVALSQIVRLLILDEVHLLHEDRGPVLESIVARXLRQVESXQSMIRILGLSAXLPNYLDVAXFLHVNPYIGLFFFDGRFRPVPLGQXFLGIKCANKMQQLNNMDEVCYENVLKQVKAGHQVMVFVHARNAXVRXAMSLIERAKNCGHIPFFFPXQGHDYVLAEKQVQRSRNKQVRELFPDGFSIHHAGMLRQDRNLVENLFSNGHIKVLVCXAXLAWGVNLPAHAVIIKGXQIYAAKRGSFVDLGILDVMQIFGRAGRPQFDKFGEGIIIXXHDKLSHYLXLLXQRNPIESQFLESLADNLNAEIALGXVXNVEEAVKWISYXYLYVRMRANPLAYGISHKAYQIDPXLRKHREQLVIEVGRKLDKAQMIRFEERXGYFSSXDLGRXASHYYIKYNXIEXFNELFDAHKXEGDIFAIVSKAEEFDQIKVREEEIEELDXLLSNFCELSXPGGVENSYGKINILLQXYISRGEMDSFSLISDSAYVAQNAARIVRALFEIALRKRWPXMXYRLLNLSKVIDKRLWGWASPLRQFSILPPHILXRLEEKKLXVDKLKDMRKDEIGHILHHVNIGLKVKQCVHQIPSVMMEASIQPIXRXVLRVXLSIYADFXWNDQVHGXVGEPWWIWVEDPXNDHIYHSEYFLALKKQVISKEAQLLVFXIPIFEPLPSQYYIRAVSDRWLGAEAVCIINFQHLILPERHPPHXELLDLQPLPIXALGCKAYEALYNFSHFNPVQXQIFHXLYHXDCNVLLGAPXGSGKXVAAELAIFRVFNKYPXSKAVYIAPLKALVRERMDDWKVRIEEKLGKKVIELXGDVXPDMKSIAKADLIVXXPEKWDGVSRSWQNRNYVQQVXILIIDEIHLLGEERGPVLEVIVSRXNFISSHXEKPVRIVGLSXALANARDLADWLNIKQMGLFNFRPSVRPVPLEVHIQGFPGQHYCPRMASMNKPAFQAIRSHSPAKPVLIFVSSRRQXRLXALELIAFLAXEEDPKQWLNMDEREMENIIAXVRDSNLKLXLAFGIGMHHAGLHERDRKXVEELFVNCKVQVLIAXSXLAWGVNFPAHLVIIKGXEYYDGKXRRYVDFPIXDVLQMMGRAGRPQFDDQGKAVILVHDIKKDFYKKFLYEPFPVESSLLGVLSDHLNAEIAGGXIXSKQDALDYIXWXYFFRRLIMNPSYYNLGDVSHDSVNKFLSHLIEKSLIELELSYCIEIGEDNRSIEPLXYGRIASYYYLKHQXVKMFKDRLKPECSXEELLSILSDAEEYXDLPVRHNEDHMNSELAKCLPIESNPHSFDSPHXKAHLLLQAHLSRAMLPCPDYDXDXKXVLDQALRVCQAMLDVAANQGWLVXVLNIXNLIQMVIQGRWLKDSSLLXLPNIENHHLHLFKKWKPIMKGPHARGRXSIESLPELIHACGGKDHVFSSMVESELHAAKXKQAWNFLSHLPVINVGISVKGSWDDLVEGHNELSVSXLXADKRDDNKWIKLHADQEYVLQVSLQRVHFGFHKGKPESCAVXPRFPKSKDEGWFLILGEVDKRELIALKRVGYIRNHHVASLSFYXPEIPGRYIYXLYFMSDCYLGLDQQYDIYLNVXQASLSAQVNXKVSDSLXDLALK

SEQ ID NO: 3404 - protein, 48 aa, Homo sapiens
  MOD_RES (7)..(7): Selenocysteine
  MOD_RES (17)..(17): Selenocysteine
MALPRLXGALRSFSNVXKQDNYNEEVADLKLELIMGEKQLKVGLHFSS

SEQ ID NO: 3405 - protein, 236 aa, Homo sapiens
  MOD_RES (34)..(34): Selenocysteine
  MOD_RES (140)..(140): Selenocysteine
  MOD_RES (159)..(159): Selenocysteine
  MOD_RES (192)..(192): Selenocysteine
  MOD_RES (233)..(233): Selenocysteine
MESSAKMESGGAGQQPQPQPQQPFLPPAACFFAXAAAAAAAAAAAAAQSAQQQQQQQQQQQQAPQLRPAADGQPSGGGHKSAPKQVKRQRSSSPELMRCKRRLNFSGFGYSLPQQQPAAVARRNERERNRVKLVNLGFAXLREHVPNGAANKKMSKVEXLRSAVEYIRALQQLLDEHDAVSAAFQAGVLSPXISPNYSNDLNSMAGSPVSSYSSDEGSYDPLSPEEQELLDFXNWF

SEQ ID NO: 3406 - protein, 193 aa, Homo sapiens
  MOD_RES (5)..(5): Selenocysteine
  MOD_RES (42)..(42): Selenocysteine
  MOD_RES (45)..(45): Selenocysteine
  MOD_RES (91)..(91): Selenocysteine
  MOD_RES (136)..(137): Selenocysteine
MDGGXLPRSAPPAPPVPVGCAARRRPASPELLRCSRRRRPAXAEXGGGAAAVARRNERERNRVKLVNLGFQALRQHVPHGGASKKLSKVEXLRSAVEYIRALQRLLAEHDAVRNALAGGLRPQAVRPSAPRGPPGXXPVAASPSRASSSPGRGGSSEPGSPRSAYSSDDSGCEGALSPAERELLDFSSWLGGY

SEQ ID NO: 3407 - protein, 181 aa, Homo sapiens
  MOD_RES (26)..(26): Selenocysteine
  MOD_RES (36)..(36): Selenocysteine
  MOD_RES (95)..(95): Selenocysteine
  MOD_RES (134)..(134): Selenocysteine
  MOD_RES (156)..(156): Selenocysteine
  MOD_RES (169)..(170): Selenocysteine
MMDNRGNSSLPDKLPIFPDSARLPLXRSFYLEPMVXFHVHPEAPVSSPYSEELPRLPFPSDSLILGNYSEPCPFSFPMPYPNYRGCEYSYGPAFXRKRNERERQRVKCVNEGYAQLRHHLPEEYLEKRLSKVEXLRAAIKYINYLQSLLYPDKAEXKNNPGKVSSMIAXXSHHADPMFRIV

SEQ ID NO: 3408 - protein, 173 aa, Homo sapiens
  MOD_RES (4)..(4): Selenocysteine
  MOD_RES (19)..(19): Selenocysteine
  MOD_RES (27)..(27): Selenocysteine
  MOD_RES (114)..(114): Selenocysteine
MMEXRKPAERLALPYSLRXAPLGVPGXLPGLPRRDPLRVALRLDAACWEWARSGCARGWQYLPVPLDSAFEPAFLRKRNERERQRVRCVNEGYARLRDHLPRELADKRLSKVEXLRAAIDYIKHLQELLERQAWGLEGAAGAVPQRRAECNSDGESKASSAPSPSSEPEEGGS

SEQ ID NO: 3409 - protein, 206 aa, Homo sapiens
  MOD_RES (124)..(124): Selenocysteine
  MOD_RES (147)..(147): Selenocysteine
  MOD_RES (157)..(157): Selenocysteine
  MOD_RES (166)..(166): Selenocysteine
MNNNFCRALVDRRPLGPPSCMQLGVMPPPRQAPLPPAEPLGNVPFLLYPGPAEPPYYDAYAGVFPYVPFPGAFGVYEYPFEPAFIQKRNERERQRVKCVNEGYARLRGHLPGALAEKRLSKVEXLRAAIRYIKYLQELLSSAPDGSXPPASRGLPGXGPCPAPPAXPRPDRPGDGEARAPSSLVPESSESSCFSPSPFLESEESWH

SEQ ID NO: 3410 - protein, 135 aa, Homo sapiens
  MOD_RES (28)..(28): Selenocysteine
  MOD_RES (77)..(77): Selenocysteine
  MOD_RES (102)..(102): Selenocysteine
  MOD_RES (104)..(104): Selenocysteine
  MOD_RES (111)..(111): Selenocysteine
  MOD_RES (121)..(121): Selenocysteine
MAKDFQDIQQLSSEENDHPFHQGEGPGXRRLNPRRGNPFLKGPPPAQPLAQRLCSMVCFSLLALSFNILLLVVICVXGSQSAQLQAELRSLKEAFSNFSSSXLXEVQAISXHGGSVGDKIXSLGAKLEKQQQDLK

SEQ ID NO: 3411 - protein, 311 aa, Homo sapiens
  MOD_RES (28)..(28): Selenocysteine
  MOD_RES (77)..(77): Selenocysteine
  MOD_RES (107)..(107): Selenocysteine
  MOD_RES (109)..(109): Selenocysteine
  MOD_RES (116)..(116): Selenocysteine
  MOD_RES (126)..(126): Selenocysteine
  MOD_RES (175)..(175): Selenocysteine
  MOD_RES (228)..(228): Selenocysteine
  MOD_RES (233)..(233): Selenocysteine
  MOD_RES (238)..(238): Selenocysteine
  MOD_RES (250)..(250): Selenocysteine
  MOD_RES (262)..(262): Selenocysteine
  MOD_RES (307)..(307): Selenocysteine
MAKDFQDIQQLSSEENDHPFHQGEGPGXRRLNPRRGNPFLKGPPPAQPLAQRLCSMVCFSLLALSFNILLLVVICVXGSQSEGHGGAQLQAELRSLKEAFSNFSSSXLXEVQAISXHGGSVGDKIXSLGAKLEKQQQDLKADHDALLFHLKHFPVDLRFVACQMELLHSNGSQRXCCPVNWVEHQGSCYWFSHSGKAWAEAEKYCQLENAHLVVINSWEEQKFIVQHXNPFNXWIGLXDSDGSWKWVDGXDYRHNYKNWAVXQPDNWHGHELGGSEDCVEVQPDGRWNDDFCLQVYRWVCEKRRNAXGEVA

SEQ ID NO: 3412 - protein, 287 aa, Homo sapiens
  MOD_RES (58)..(58): Selenocysteine
  MOD_RES (83)..(83): Selenocysteine
  MOD_RES (85)..(85): Selenocysteine
  MOD_RES (92)..(92): Selenocysteine
  MOD_RES (102)..(102): Selenocysteine
  MOD_RES (151)..(151): Selenocysteine
  MOD_RES (204)..(204): Selenocysteine
  MOD_RES (209)..(209): Selenocysteine
  MOD_RES (214)..(214): Selenocysteine
  MOD_RES (226)..(226): Selenocysteine
  MOD_RES (238)..(238): Selenocysteine
  MOD_RES (283)..(283): Selenocysteine
MAKDFQDIQQLSSEENDHPFHQGPPPAQPLAQRLCSMVCFSLLALSFNILLLVVICVXGSQSAQLQAELRSLKEAFSNFSSSXLXEVQAISXHGGSVGDKIXSLGAKLEKQQQDLKADHDALLFHLKHFPVDLRFVACQMELLHSNGSQRXCCPVNWVEHQGSCYWFSHSGKAWAEAEKYCQLENAHLVVINSWEEQKFIVQHXNPFNXWIGLXDSDGSWKWVDGXDYRHNYKNWAVXQPDNWHGHELGGSEDCVEVQPDGRWNDDFCLQVYRWVCEKRRNAXGEVA

SEQ ID NO: 3413 - protein, 292 aa, Homo sapiens
  MOD_RES (58)..(58): Selenocysteine
  MOD_RES (88)..(88): Selenocysteine
  MOD_RES (90)..(90): Selenocysteine
  MOD_RES (97)..(97): Selenocysteine
  MOD_RES (107)..(107): Selenocysteine
  MOD_RES (156)..(156): Selenocysteine
  MOD_RES (209)..(209): Selenocysteine
  MOD_RES (214)..(214): Selenocysteine
  MOD_RES (219)..(219): Selenocysteine
  MOD_RES (231)..(231): Selenocysteine
  MOD_RES (243)..(243): Selenocysteine
  MOD_RES (288)..(288): Selenocysteine
MAKDFQDIQQLSSEENDHPFHQGPPPAQPLAQRLCSMVCFSLLALSFNILLLVVICVXGSQSEGHGGAQLQAELRSLKEAFSNFSSSXLXEVQAISXHGGSVGDKIXSLGAKLEKQQQDLKADHDALLFHLKHFPVDLRFVACQMELLHSNGSQRXCCPVNWVEHQGSCYWFSHSGKAWAEAEKYCQLENAHLVVINSWEEQKFIVQHXNPFNXWIGLXDSDGSWKWVDGXDYRHNYKNWAVXQPDNWHGHELGGSEDCVEVQPDGRWNDDFCLQVYRWVCEKRRNAXGEVA

SEQ ID NO: 3414 - protein, 2964 aa, Homo sapiens
  MOD_RES (6)..(6): Selenocysteine
  MOD_RES (28)..(28): Selenocysteine
  MOD_RES (30)..(30): Selenocysteine
  MOD_RES (43)..(43): Selenocysteine
  MOD_RES (67)..(67): Selenocysteine
  MOD_RES (78)..(78): Selenocysteine
  MOD_RES (96)..(96): Selenocysteine
  MOD_RES (114)..(115): Selenocysteine
  MOD_RES (129)..(129): Selenocysteine
  MOD_RES (192)..(192): Selenocysteine
  MOD_RES (195)..(195): Selenocysteine
  MOD_RES (214)..(214): Selenocysteine
  MOD_RES (217)..(217): Selenocysteine
  MOD_RES (226)..(226): Selenocysteine
  MOD_RES (235)..(235): Selenocysteine
  MOD_RES (242)..(242): Selenocysteine
  MOD_RES (244)..(245): Selenocysteine
  MOD_RES (275)..(275): Selenocysteine
  MOD_RES (278)..(278): Selenocysteine
  MOD_RES (284)..(284): Selenocysteine
  MOD_RES (310)..(310): Selenocysteine
  MOD_RES (312)..(313): Selenocysteine
  MOD_RES (327)..(327): Selenocysteine
  MOD_RES (329)..(330): Selenocysteine
  MOD_RES (363)..(363): Selenocysteine
  MOD_RES (379)..(379): Selenocysteine
  MOD_RES (432)..(432): Selenocysteine
  MOD_RES (442)..(442): Selenocysteine
  MOD_RES (461)..(461): Selenocysteine
  MOD_RES (464)..(464): Selenocysteine
  MOD_RES (499)..(499): Selenocysteine
  MOD_RES (516)..(516): Selenocysteine
  MOD_RES (528)..(528): Selenocysteine
  MOD_RES (542)..(542): Selenocysteine
  MOD_RES (561)..(561): Selenocysteine
  MOD_RES (568)..(568): Selenocysteine
  MOD_RES (574)..(574): Selenocysteine
  MOD_RES (588)..(589): Selenocysteine
  MOD_RES (605)..(605): Selenocysteine
  MOD_RES (609)..(609): Selenocysteine
  MOD_RES (638)..(639): Selenocysteine
  MOD_RES (657)..(657): Selenocysteine
  MOD_RES (664)..(664): Selenocysteine
  MOD_RES (666)..(666): Selenocysteine
  MOD_RES (673)..(673): Selenocysteine
  MOD_RES (702)..(702): Selenocysteine
  MOD_RES (720)..(720): Selenocysteine
  MOD_RES (727)..(727): Selenocysteine
  MOD_RES (786)..(786): Selenocysteine
  MOD_RES (806)..(806): Selenocysteine
  MOD_RES (846)..(846): Selenocysteine
  MOD_RES (916)..(916): Selenocysteine
  MOD_RES (971)..(971): Selenocysteine
  MOD_RES (981)..(981): Selenocysteine
  MOD_RES (991)..(991): Selenocysteine
  MOD_RES (1021)..(1021): Selenocysteine
  MOD_RES (1028)..(1028): Selenocysteine
  MOD_RES (1044)..(1044): Selenocysteine
  MOD_RES (1057)..(1057): Selenocysteine
  MOD_RES (1068)..(1068): Selenocysteine
  MOD_RES (1076)..(1076): Selenocysteine
  MOD_RES (1114)..(1114): Selenocysteine
  MOD_RES (1148)..(1148): Selenocysteine
  MOD_RES (1165)..(1165): Selenocysteine
  MOD_RES (1178)..(1178): Selenocysteine
  MOD_RES (1184)..(1184): Selenocysteine
  MOD_RES (1196)..(1196): Selenocysteine
  MOD_RES (1205)..(1205): Selenocysteine
  MOD_RES (1210)..(1210): Selenocysteine
  MOD_RES (1237)..(1237): Selenocysteine
  MOD_RES (1239)..(1239): Selenocysteine
  MOD_RES (1304)..(1304): Selenocysteine
  MOD_RES (1318)..(1318): Selenocysteine
  MOD_RES (1329)..(1329): Selenocysteine
  MOD_RES (1376)..(1376): Selenocysteine
  MOD_RES (1392)..(1392): Selenocysteine
  MOD_RES (1407)..(1407): Selenocysteine
  MOD_RES (1418)..(1419): Selenocysteine
  MOD_RES (1454)..(1455): Selenocysteine
  MOD_RES (1458)..(1458): Selenocysteine
  MOD_RES (1465)..(1465): Selenocysteine
  MOD_RES (1504)..(1504): Selenocysteine
  MOD_RES (1573)..(1573): Selenocysteine
  MOD_RES (1592)..(1592): Selenocysteine
  MOD_RES (1604)..(1604): Selenocysteine
  MOD_RES (1608)..(1608): Selenocysteine
  MOD_RES (1628)..(1628): Selenocysteine
  MOD_RES (1639)..(1639): Selenocysteine
  MOD_RES (1659)..(1659): Selenocysteine
  MOD_RES (1666)..(1666): Selenocysteine
  MOD_RES (1678)..(1678): Selenocysteine
  MOD_RES (1683)..(1683): Selenocysteine
  MOD_RES (1692)..(1692): Selenocysteine
  MOD_RES (1695)..(1695): Selenocysteine
  MOD_RES (1740)..(1740): Selenocysteine
  MOD_RES (1758)..(1758): Selenocysteine
  MOD_RES (1771)..(1771): Selenocysteine
  MOD_RES (1787)..(1787): Selenocysteine
  MOD_RES (1819)..(1819): Selenocysteine
  MOD_RES (1841)..(1841): Selenocysteine
  MOD_RES (1892)..(1892): Selenocysteine
  MOD_RES (1894)..(1894): Selenocysteine
  MOD_RES (1925)..(1925): Selenocysteine
  MOD_RES (1957)..(1957): Selenocysteine
  MOD_RES (1967)..(1967): Selenocysteine
  MOD_RES (2001)..(2002): Selenocysteine
  MOD_RES (2019)..(2019): Selenocysteine
  MOD_RES (2089)..(2090): Selenocysteine
  MOD_RES (2100)..(2100): Selenocysteine
  MOD_RES (2121)..(2121): Selenocysteine
  MOD_RES (2156)..(2156): Selenocysteine
  MOD_RES (2249)..(2249): Selenocysteine
  MOD_RES (2252)..(2252): Selenocysteine
  MOD_RES (2290)..(2290): Selenocysteine
  MOD_RES (2300)..(2300): Selenocysteine
  MOD_RES (2334)..(2334): Selenocysteine
  MOD_RES (2336)..(2336): Selenocysteine
  MOD_RES (2339)..(2339): Selenocysteine
  MOD_RES (2379)..(2379): Selenocysteine
  MOD_RES (2390)..(2390): Selenocysteine
  MOD_RES (2409)..(2409): Selenocysteine
  MOD_RES (2416)..(2416): Selenocysteine
  MOD_RES (2422)..(2422): Selenocysteine
  MOD_RES (2490)..(2490): Selenocysteine
  MOD_RES (2497)..(2497): Selenocysteine
  MOD_RES (2502)..(2502): Selenocysteine
  MOD_RES (2556)..(2556): Selenocysteine
  MOD_RES (2565)..(2565): Selenocysteine
  MOD_RES (2673)..(2673): Selenocysteine
  MOD_RES (2723)..(2723): Selenocysteine
  MOD_RES (2753)..(2753): Selenocysteine
  MOD_RES (2761)..(2761): Selenocysteine
  MOD_RES (2801)..(2801): Selenocysteine
  MOD_RES (2814)..(2814): Selenocysteine
  MOD_RES (2885)..(2885): Selenocysteine
  MOD_RES (2895)..(2895): Selenocysteine
  MOD_RES (2905)..(2905): Selenocysteine
  MOD_RES (2907)..(2907): Selenocysteine
  MOD_RES (2939)..(2939): Selenocysteine
  MOD_RES (2954)..(2954): Selenocysteine
MDPRNXAMLGLGSDSEGFSRKSPSAISXGXLVSKREVELEKNXKEEEDLRKRNRERNIEAGKDDGLXDAQQQFSVKEXNFSEGNLKLKIGLQAKRXKKPPKNLENYVCRPAIKXXIKHPRKALKSGKMXDEKNEHCPSKRDPSKLYKKADDVAAIECQSEEVIRLHSQGENNPLSKKLSPVHSEMADYINAXPSXLLGSRDPDLKDRALLNGGXSVXEKLAQLIAXCPPSKSSKXKPKKLGXGXXAGLVSKDLIRKAGVGSVAGIIHKDLIKKPXISXAVGLVXKDPGKKPVFNAAVGLVNKDSVKKLGXGXXAVFINKNLGKKPGXIXXVGLLSKDSGKKLGIGIVPGLVHKESGKKLGLGXVVGLVNKDLGKKLGSXVGLVAKDCAKKIVASSAMGLVNKDIGKKLMSCPLAGLISKDAINLKAEALLPXQEPLKASCSXNINNQESQELSESLKDSAXSKXFEKNVVRQNKESILEKFSVRKEIINLEKEMFNEGXCIQQDSFSSSEKGSYEXSKHEKQPPVYCXSPDFKMGGASDVSXAKSPFSAVGESNLPSPSPXVSVNPLXRSPPEXSSQLAPNPLLLSSXXELIEEISESVGKNQFXSESXHLNVGHRSVGHSISIECKGIDKEVNDSKXXHIDIPRISSSLGKKPSLXSESSIHXIXPSVVNFXSLFSNKPFLKLGAVSASDKHCQVAESLSXSLQSKPLKKRKGRKPRWXKVVARSXCRSPKGLELERSELFKNVSCSSLSNSNSEPAKFMKNIGPPSFVDHDFLKRRLPKLSKSXAPSLALLADSEKPSHKSFAXHKLSSSMCVSSDLLSDIYKPKRGRPKSKEMPQLEGPPKRXLKIPASKVFSLQSKEEQEPPILQPEIEIPSFKQGLSVSPFPKKRGRPKRQMRSPVKMKPPVLSVAPFVAXESPSKLESESDNHRSSSDFFESEDQLQDPDDLDDSHRPSVCSMSDLEMEPDKKIXKRNNGQLMKXIIRKINKMKXLKRKKLLNQILSSSVESSNKGKVQSKLHNXVSSLAAXFGSKLGQQINVSKKGXIYIGKRRGRKPKXVLNGILSGSPXSLAVLEQXAQQAAGSALGQILPPLLPSSASSSEILPSPICSQSSGXSGGQSPVSSDAGFVEPSSVPYLHLHSRQGSMIQXLAMKKASKGRRRLSPPXLLPNSPSHLSELXSLKEAXPSPISESHSDEXIPSDSGIGXDNNSXSDRAEKFCGQKKRRHSFEHVSLIPPEXSXVLSSLKEKHKHKCKRRNHDYLSYDKMKRQKRKRKKKYPQLRNRQDPDFIAELEELISRLSEIRIXHRSHHFIPRDLLPXIFRINFNSFYXHPSFPLDPLHYIRKPDLKKKRGRPPKMREAMAEMPFMHSLSFPLSSXGFYPSYGMPYSPSPLXAAPIGLGYYGRYPPXLYPPPPSPSFXXPLPPPSYMHAGHLLLNPAKYHKKKHKLLRQEAFLXXSRXPLLSMSXYPSVPPEMAYGWMVEHKHRHRHKHREHRSSEQPQVSMDXGSSRSVLESLKRYRFGKDAVGERYKHKEKHRCHMSCPHLSPSKSLINREEQWVHREPSESSPLALGLQXPLQIDCSESSPSLSLGGFXPNSEPASSDEHXNLFXSAIGSCRVSNPNSSGRKKLXDSPGLFSAQDXSLNRLHRKESLPSNERAVQXLAGSQPXSDKPSQRPSESXNCSPXRKRSSSESXSSXVNGVPSRSPRLVASGDDSVDSLLQRMVQNEDQEPMEKSIDAVIAXASAPPSSSPGRSHSKDRXLGKPDSLLVPAVXSDSCNNSISLLSEKLXSSCSPHHIKRSVVEAMQRQARKMCNYDKILAXKKNLDHVNKILKAKKLQRQARXGNNFVKRRPGRPRKCPLQAVVSMQAFQAAQFVNPELNRDEEGAALHLSPDXVXDVIEAVVQSVNLNPEHKKGLKRKGWLLEEQXRKKQKPLPEEEEQENNKSFNEAPVEIPSPSEXPAKPSEPESXLQPVLSLIPREKKPPRPPKKKYQKAGLYSDVYKXXDPKSRLIQLKKEKLEYXPGEHEYGLFPAPIHVGKYLRQKRIDFQLPYDILWQWKHNQLYKKPDVPLYKKIRSNVYVDVKPLSGYEAXXCNCKKPDDDXRKGCVDDCLNRMIFAECSPNXCPCGEQCCNQRIQRHEWVQCLERFRAEEKGWGIRXKEPLKAGQFIIEYLGEVVSEQEFRNRMIEQYHNHSDHYCLNLDSGMVIDSYRMGNEARFINHSCDPNCEMQKWSVNGVYRIGLYALKDMPAGXELXYDYNFHSFNVEKQQLCKCGFEKCRGIIGGKSQRVNGLXSSKNSQPMAXHKKSGRSKEKRKSKHKLKKRRGHLSEEPSENINXPXRLXPQLQMKPMSNRERNFVLKHHVFLVRNWEKIRQKQEEVKHXSDNIHSASLYXRWNGICRDDGNIKSDVFMXQFSALQXARSVRXRRLAAAEENIEVARAARLAQIFKEICDGIISYKDSSRQALAAPLLNLPPKKKNADYYEKISDPLDLIXIEKQILXGYYKXVEAFDADMLKVFRNAEKYYGRKSPVGRDVCRLRKAYYNARHEASAQIDEIVGEXASEADSSEXSVSEKENGHEKDDDVIRCICGLYKDEGLMIQCDKCMVWQHCDCMGVNSDVEHYLCEQCDPRPVDREVPMIPRPHYAQPGCVYFICLLRDDLLLRQGDCVYLMRDSRRXPDGHPVRQSYRLLSHINRDKLDIFRIEKLWKNEKEERFAFGHHYFRPHEXHHSPSRRFYHNELFRVPLYEIIPLEAVVGXCCVLDLYXYCKGRPKGVKEQDVYICDYRLDKSAHLFYKIHRNRYPVCXKPYAFDHFPKKLXPKKDFSPHYVPDNYKRNGGRSSWKSERSKPPLKDLGQEDDALPLIEEVLASQEQAANEIPSLEEPEREGAXANVSEGEKKXEESSQEPQSXCXPEERRHNQRERLNQILLNLLEKIPGKNAIDVXYLLEEGSGRKLRRRXLFIPENSFRK

SEQ ID NO: 3415 - protein, 2969 aa, Homo sapiens
  MOD_RES (6)..(6): Selenocysteine
  MOD_RES (28)..(28): Selenocysteine
  MOD_RES (30)..(30): Selenocysteine
  MOD_RES (43)..(43): Selenocysteine
  MOD_RES (67)..(67): Selenocysteine
  MOD_RES (78)..(78): Selenocysteine
  MOD_RES (96)..(96): Selenocysteine
  MOD_RES (114)..(115): Selenocysteine
  MOD_RES (129)..(129): Selenocysteine
  MOD_RES (192)..(192): Selenocysteine
  MOD_RES (195)..(195): Selenocysteine
  MOD_RES (214)..(214): Selenocysteine
  MOD_RES (217)..(217): Selenocysteine
  MOD_RES (226)..(226): Selenocysteine
  MOD_RES (235)..(235): Selenocysteine
  MOD_RES (242)..(242): Selenocysteine
  MOD_RES (244)..(245): Selenocysteine
  MOD_RES (275)..(275): Selenocysteine
  MOD_RES (278)..(278): Selenocysteine
  MOD_RES (284)..(284): Selenocysteine
  MOD_RES (310)..(310): Selenocysteine
  MOD_RES (312)..(313): Selenocysteine
  MOD_RES (327)..(327): Selenocysteine
  MOD_RES (329)..(330): Selenocysteine
  MOD_RES (363)..(363): Selenocysteine
  MOD_RES (379)..(379): Selenocysteine
  MOD_RES (432)..(432): Selenocysteine
  MOD_RES (442)..(442): Selenocysteine
  MOD_RES (461)..(461): Selenocysteine
  MOD_RES (464)..(464): Selenocysteine
  MOD_RES (499)..(499): Selenocysteine
  MOD_RES (516)..(516): Selenocysteine
  MOD_RES (528)..(528): Selenocysteine
  MOD_RES (542)..(542): Selenocysteine
  MOD_RES (561)..(561): Selenocysteine
  MOD_RES (568)..(568): Selenocysteine
  MOD_RES (574)..(574): Selenocysteine
  MOD_RES (588)..(589): Selenocysteine
  MOD_RES (605)..(605): Selenocysteine
  MOD_RES (609)..(609): Selenocysteine
  MOD_RES (638)..(639): Selenocysteine
  MOD_RES (657)..(657): Selenocysteine
  MOD_RES (664)..(664): Selenocysteine
  MOD_RES (666)..(666): Selenocysteine
  MOD_RES (673)..(673): Selenocysteine
  MOD_RES (702)..(702): Selenocysteine
  MOD_RES (720)..(720): Selenocysteine
  MOD_RES (727)..(727): Selenocysteine
  MOD_RES (786)..(786): Selenocysteine
  MOD_RES (806)..(806): Selenocysteine
  MOD_RES (846)..(846): Selenocysteine
  MOD_RES (916)..(916): Selenocysteine
  MOD_RES (971)..(971): Selenocysteine
  MOD_RES (981)..(981): Selenocysteine
  MOD_RES (991)..(991): Selenocysteine
  MOD_RES (1021)..(1021): Selenocysteine
  MOD_RES (1028)..(1028): Selenocysteine
  MOD_RES (1044)..(1044): Selenocysteine
  MOD_RES (1057)..(1057): Selenocysteine
  MOD_RES (1068)..(1068): Selenocysteine
  MOD_RES (1076)..(1076): Selenocysteine
  MOD_RES (1114)..(1114): Selenocysteine
  MOD_RES (1148)..(1148): Selenocysteine
  MOD_RES (1165)..(1165): Selenocysteine
  MOD_RES (1178)..(1178): Selenocysteine
  MOD_RES (1184)..(1184): Selenocysteine
  MOD_RES (1196)..(1196): Selenocysteine
  MOD_RES (1205)..(1205): Selenocysteine
  MOD_RES (1210)..(1210): Selenocysteine
  MOD_RES (1237)..(1237): Selenocysteine
  MOD_RES (1239)..(1239): Selenocysteine
  MOD_RES (1304)..(1304): Selenocysteine
  MOD_RES (1318)..(1318): Selenocysteine
  MOD_RES (1329)..(1329): Selenocysteine
  MOD_RES (1376)..(1376): Selenocysteine
  MOD_RES (1392)..(1392): Selenocysteine
  MOD_RES (1407)..(1407): Selenocysteine
  MOD_RES (1418)..(1419): Selenocysteine
  MOD_RES (1454)..(1455): Selenocysteine
  MOD_RES (1458)..(1458): Selenocysteine
  MOD_RES (1465)..(1465): Selenocysteine
  MOD_RES (1504)..(1504): Selenocysteine
  MOD_RES (1573)..(1573): Selenocysteine
  MOD_RES (1592)..(1592): Selenocysteine
  MOD_RES (1604)..(1604): Selenocysteine
  MOD_RES (1608)..(1608): Selenocysteine
  MOD_RES (1628)..(1628): Selenocysteine
  MOD_RES (1639)..(1639): Selenocysteine
  MOD_RES (1659)..(1659): Selenocysteine
  MOD_RES (1666)..(1666): Selenocysteine
  MOD_RES (1678)..(1678): Selenocysteine
  MOD_RES (1683)..(1683): Selenocysteine
  MOD_RES (1692)..(1692): Selenocysteine
  MOD_RES (1695)..(1695): Selenocysteine
  MOD_RES (1740)..(1740): Selenocysteine
  MOD_RES (1758)..(1758): Selenocysteine
  MOD_RES (1771)..(1771): Selenocysteine
  MOD_RES (1787)..(1787): Selenocysteine
  MOD_RES (1819)..(1819): Selenocysteine
  MOD_RES (1841)..(1841): Selenocysteine
  MOD_RES (1892)..(1892): Selenocysteine
  MOD_RES (1894)..(1894): Selenocysteine
  MOD_RES (1925)..(1925): Selenocysteine
  MOD_RES (1957)..(1957): Selenocysteine
  MOD_RES (1967)..(1967): Selenocysteine
  MOD_RES (2001)..(2002): Selenocysteine
  MOD_RES (2019)..(2019): Selenocysteine
  MOD_RES (2094)..(2095): Selenocysteine
  MOD_RES (2105)..(2105): Selenocysteine
  MOD_RES (2126)..(2126): Selenocysteine
  MOD_RES (2161)..(2161): Selenocysteine
  MOD_RES (2254)..(2254): Selenocysteine
  MOD_RES (2257)..(2257): Selenocysteine
  MOD_RES (2295)..(2295): Selenocysteine
  MOD_RES (2305)..(2305): Selenocysteine
  MOD_RES (2339)..(2339): Selenocysteine
  MOD_RES (2341)..(2341): Selenocysteine
  MOD_RES (2344)..(2344): Selenocysteine
  MOD_RES (2384)..(2384): Selenocysteine
  MOD_RES (2395)..(2395): Selenocysteine
  MOD_RES (2414)..(2414): Selenocysteine
  MOD_RES (2421)..(2421): Selenocysteine
  MOD_RES (2427)..(2427): Selenocysteine
  MOD_RES (2495)..(2495): Selenocysteine
  MOD_RES (2502)..(2502): Selenocysteine
  MOD_RES (2507)..(2507): Selenocysteine
  MOD_RES (2561)..(2561): Selenocysteine
  MOD_RES (2570)..(2570): Selenocysteine
  MOD_RES (2678)..(2678): Selenocysteine
  MOD_RES (2728)..(2728): Selenocysteine
  MOD_RES (2758)..(2758): Selenocysteine
  MOD_RES (2766)..(2766): Selenocysteine
  MOD_RES (2806)..(2806): Selenocysteine
  MOD_RES (2819)..(2819): Selenocysteine
  MOD_RES (2890)..(2890): Selenocysteine
  MOD_RES (2900)..(2900): Selenocysteine
  MOD_RES (2910)..(2910): Selenocysteine
  MOD_RES (2912)..(2912): Selenocysteine
  MOD_RES (2944)..(2944): Selenocysteine
  MOD_RES (2959)..(2959): Selenocysteine
MDPRNXAMLGLGSDSEGFSRKSPSAISXGXLVSKREVELEKNXKEEEDLRKRNRERNIEAGKDDGLXDAQQQFSVKEXNFSEGNLKLKIGLQAKRXKKPPKNLENYVCRPAIKXXIKHPRKALKSGKMXDEKNEHCPSKRDPSKLYKKADDVAAIECQSEEVIRLHSQGENNPLSKKLSPVHSEMADYINAXPSXLLGSRDPDLKDRALLNGGXSVXEKLAQLIAXCPPSKSSKXKPKKLGXGXXAGLVSKDLIRKAGVGSVAGIIHKDLIKKPXISXAVGLVXKDPGKKPVFNAAVGLVNKDSVKKLGXGXXAVFINKNLGKKPGXIXXVGLLSKDSGKKLGIGIVPGLVHKESGKKLGLGXVVGLVNKDLGKKLGSXVGLVAKDCAKKIVASSAMGLVNKDIGKKLMSCPLAGLISKDAINLKAEALLPXQEPLKASCSXNINNQESQELSESLKDSAXSKXFEKNVVRQNKESILEKFSVRKEIINLEKEMFNEGXCIQQDSFSSSEKGSYEXSKHEKQPPVYCXSPDFKMGGASDVSXAKSPFSAVGESNLPSPSPXVSVNPLXRSPPEXSSQLAPNPLLLSSXXELIEEISESVGKNQFXSESXHLNVGHRSVGHSISIECKGIDKEVNDSKXXHIDIPRISSSLGKKPSLXSESSIHXIXPSVVNFXSLFSNKPFLKLGAVSASDKHCQVAESLSXSLQSKPLKKRKGRKPRWXKVVARSXCRSPKGLELERSELFKNVSCSSLSNSNSEPAKFMKNIGPPSFVDHDFLKRRLPKLSKSXAPSLALLADSEKPSHKSFAXHKLSSSMCVSSDLLSDIYKPKRGRPKSKEMPQLEGPPKRXLKIPASKVFSLQSKEEQEPPILQPEIEIPSFKQGLSVSPFPKKRGRPKRQMRSPVKMKPPVLSVAPFVAXESPSKLESESDNHRSSSDFFESEDQLQDPDDLDDSHRPSVCSMSDLEMEPDKKIXKRNNGQLMKXIIRKINKMKXLKRKKLLNQILSSSVESSNKGKVQSKLHNXVSSLAAXFGSKLGQQINVSKKGXIYIGKRRGRKPKXVLNGILSGSPXSLAVLEQXAQQAAGSALGQILPPLLPSSASSSEILPSPICSQSSGXSGGQSPVSSDAGFVEPSSVPYLHLHSRQGSMIQXLAMKKASKGRRRLSPPXLLPNSPSHLSELXSLKEAXPSPISESHSDEXIPSDSGIGXDNNSXSDRAEKFCGQKKRRHSFEHVSLIPPEXSXVLSSLKEKHKHKCKRRNHDYLSYDKMKRQKRKRKKKYPQLRNRQDPDFIAELEELISRLSEIRIXHRSHHFIPRDLLPXIFRINFNSFYXHPSFPLDPLHYIRKPDLKKKRGRPPKMREAMAEMPFMHSLSFPLSSXGFYPSYGMPYSPSPLXAAPIGLGYYGRYPPXLYPPPPSPSFXXPLPPPSYMHAGHLLLNPAKYHKKKHKLLRQEAFLXXSRXPLLSMSXYPSVPPEMAYGWMVEHKHRHRHKHREHRSSEQPQVSMDXGSSRSVLESLKRYRFGKDAVGERYKHKEKHRCHMSCPHLSPSKSLINREEQWVHREPSESSPLALGLQXPLQIDCSESSPSLSLGGFXPNSEPASSDEHXNLFXSAIGSCRVSNPNSSGRKKLXDSPGLFSAQDXSLNRLHRKESLPSNERAVQXLAGSQPXSDKPSQRPSESXNCSPXRKRSSSESXSSXVNGVPSRSPRLVASGDDSVDSLLQRMVQNEDQEPMEKSIDAVIAXASAPPSSSPGRSHSKDRXLGKPDSLLVPAVXSDSCNNSISLLSEKLXSSCSPHHIKRSVVEAMQRQARKMCNYDKILAXKKNLDHVNKILKAKKLQRQARXGNNFVKRRPGRPRKCPLQAVVSMQAFQAAQFVNPELNRDEEGAALHLSPDXVXDVIEAVVQSVNLNPEHKKGLKRKGWLLEEQXRKKQKPLPEEEEQENNKSFNEAPVEIPSPSEXPAKPSEPESXLQPVLSLIPREKKPPRPPKKKYQKAGLYSDVYKXXDPKSRLIQLKKEKLEYXPGEHEYGLFPAPIHVVFFVSGKYLRQKRIDFQLPYDILWQWKHNQLYKKPDVPLYKKIRSNVYVDVKPLSGYEAXXCNCKKPDDDXRKGCVDDCLNRMIFAECSPNXCPCGEQCCNQRIQRHEWVQCLERFRAEEKGWGIRXKEPLKAGQFIIEYLGEVVSEQEFRNRMIEQYHNHSDHYCLNLDSGMVIDSYRMGNEARFINHSCDPNCEMQKWSVNGVYRIGLYALKDMPAGXELXYDYNFHSFNVEKQQLCKCGFEKCRGIIGGKSQRVNGLXSSKNSQPMAXHKKSGRSKEKRKSKHKLKKRRGHLSEEPSENINXPXRLXPQLQMKPMSNRERNFVLKHHVFLVRNWEKIRQKQEEVKHXSDNIHSASLYXRWNGICRDDGNIKSDVFMXQFSALQXARSVRXRRLAAAEENIEVARAARLAQIFKEICDGIISYKDSSRQALAAPLLNLPPKKKNADYYEKISDPLDLIXIEKQILXGYYKXVEAFDADMLKVFRNAEKYYGRKSPVGRDVCRLRKAYYNARHEASAQIDEIVGEXASEADSSEXSVSEKENGHEKDDDVIRCICGLYKDEGLMIQCDKCMVWQHCDCMGVNSDVEHYLCEQCDPRPVDREVPMIPRPHYAQPGCVYFICLLRDDLLLRQGDCVYLMRDSRRXPDGHPVRQSYRLLSHINRDKLDIFRIEKLWKNEKEERFAFGHHYFRPHEXHHSPSRRFYHNELFRVPLYEIIPLEAVVGXCCVLDLYXYCKGRPKGVKEQDVYICDYRLDKSAHLFYKIHRNRYPVCXKPYAFDHFPKKLXPKKDFSPHYVPDNYKRNGGRSSWKSERSKPPLKDLGQEDDALPLIEEVLASQEQAANEIPSLEEPEREGAXANVSEGEKKXEESSQEPQSXCXPEERRHNQRERLNQILLNLLEKIPGKNAIDVXYLLEEGSGRKLRRRXLFIPENSFRK

SEQ ID NO: 3416 - protein, 177 aa, Homo sapiens
  MOD_RES (6)..(6): Selenocysteine
  MOD_RES (28)..(28): Selenocysteine
  MOD_RES (30)..(30): Selenocysteine
  MOD_RES (43)..(43): Selenocysteine
  MOD_RES (67)..(67): Selenocysteine
  MOD_RES (78)..(78): Selenocysteine
  MOD_RES (96)..(96): Selenocysteine
  MOD_RES (114)..(115): Selenocysteine
  MOD_RES (129)..(129): Selenocysteine
  MOD_RES (149)..(149): Selenocysteine
MDPRNXAMLGLGSDSEGFSRKSPSAISXGXLVSKREVELEKNXKEEEDLRKRNRERNIEAGKDDGLXDAQQQFSVKEXNFSEGNLKLKIGLQAKRXKKPPKNLENYVCRPAIKXXIKHPRKALKSGKMXDEKNEHCPSKRMESYSVAQXGVQWCDLGSPQPPPPGFKRFSYSPASAP

SEQ ID NO: 3417 - protein, 154 aa, Homo sapiens
  MOD_RES (1)..(1): Any amino acid
  MOD_RES (47)..(47): Selenocysteine
  MOD_RES (56)..(56): Selenocysteine
XLKVFRNAEKYYGRKSPVGRDVCRLRKAYYNARHEASAQIDEIVGEXASEADSSEXSVSEKENGHEKDDDVIRCICGLYKDEGLMIQCDKCMVWQHCDCMGVNSDVEHYLCEQCDPRPVDREYDQRENKILRNLWKEWHYIKLRFLAGHGRSCL

SEQ ID NO: 3418 - protein, 263 aa, Homo sapiens
  MOD_RES (26)..(26): Selenocysteine
  MOD_RES (62)..(62): Selenocysteine
  MOD_RES (75)..(75): Selenocysteine
  MOD_RES (86)..(86): Selenocysteine
  MOD_RES (91)..(91): Selenocysteine
  MOD_RES (127)..(127): Selenocysteine
  MOD_RES (199)..(199): Selenocysteine
  MOD_RES (203)..(203): Selenocysteine
  MOD_RES (208)..(208): Selenocysteine
  MOD_RES (217)..(217): Selenocysteine
MELKAEEEEVGGVQPVSIQAFASSSXLHGLAHIFSYERLSLKRALWALCFLGSLAVLLCVCXERVQYYFHYHHVXKLDEVAASQLXFPAVXLCNLNEFRFSQVSKNDLYHAGELLALLNNRYEIPDXQMADEKQLEILQDKANFRSFKPKPFNMREFYDRAGHDIRDMLLSCHFRGEVCSAEDFKVKPMQVAKELRRCXLPGXVFQGXQRARKGLHXLWKVLHVQLGPRWAAAAEDHEGWDGQWAGNHAGHPAGRVPACVGGD

SEQ ID NO: 3419 - protein, 528 aa, Homo sapiens
  MOD_RES (26)..(26): Selenocysteine
  MOD_RES (62)..(62): Selenocysteine
  MOD_RES (75)..(75): Selenocysteine
  MOD_RES (86)..(86): Selenocysteine
  MOD_RES (91)..(91): Selenocysteine
  MOD_RES (127)..(127): Selenocysteine
  MOD_RES (189)..(189): Selenocysteine
  MOD_RES (196)..(196): Selenocysteine
  MOD_RES (209)..(209): Selenocysteine
  MOD_RES (214)..(214): Selenocysteine
  MOD_RES (236)..(236): Selenocysteine
  MOD_RES (239)..(239): Selenocysteine
  MOD_RES (271)..(271): Selenocysteine
  MOD_RES (289)..(289): Selenocysteine
  MOD_RES (294)..(294): Selenocysteine
  MOD_RES (308)..(308): Selenocysteine
  MOD_RES (316)..(316): Selenocysteine
  MOD_RES (338)..(338): Selenocysteine
  MOD_RES (370)..(370): Selenocysteine
  MOD_RES (419)..(419): Selenocysteine
  MOD_RES (449)..(449): Selenocysteine
  MOD_RES (508)..(508): Selenocysteine
  MOD_RES (522)..(522): Selenocysteine
  MOD_RES (527)..(527): Selenocysteine
MELKAEEEEVGGVQPVSIQAFASSSXLHGLAHIFSYERLSLKRALWALCFLGSLAVLLCVCXERVQYYFHYHHVXKLDEVAASQLXFPAVXLCNLNEFRFSQVSKNDLYHAGELLALLNNRYEIPDXQMADEKQLEILQDKANFRSFKPKPFNMREFYDRAGHDIRDMLLSCHFRGEVCSAEDFKVVFXRYGKCYXFNSGRDGRPRLKXMKGGXGNGLEIMLDIQQDEYLPVWGEXDEXSFEAGIKVQIHSQDEPPFIDQLGFGVAPGFQXFVACQEQRLIYLPPPWGXCKAVXMDSDLDFFDSYSIXACRIDCEXRYLVENCNCRMVHMPGDAPYCXPEQYKECADPALDFLVEKDQEYCVCEMPCNLXRYGKELSMVKIPSKASAKYLAKKFNKSEQYIGENILVLDIFFEVLNYEXIEQKKAYEIAGLLGDIGGQMGLFIGASILXVLELFDYAYEVIKHKLCRRGKCQKEAKRSSADKGVALSLDDVKRHNPCESLRGHPAGMXYAANILPHHPARGXFEDFXC

SEQ ID NO: 3420 - protein, 574 aa, Homo sapiens
  MOD_RES (26)..(26): Selenocysteine
  MOD_RES (62)..(62): Selenocysteine
  MOD_RES (75)..(75): Selenocysteine
  MOD_RES (86)..(86): Selenocysteine
  MOD_RES (91)..(91): Selenocysteine
  MOD_RES (127)..(127): Selenocysteine
  MOD_RES (189)..(189): Selenocysteine
  MOD_RES (196)..(196): Selenocysteine
  MOD_RES (209)..(209): Selenocysteine
  MOD_RES (214)..(214): Selenocysteine
  MOD_RES (236)..(236): Selenocysteine
  MOD_RES (239)..(239): Selenocysteine
  MOD_RES (271)..(271): Selenocysteine
  MOD_RES (289)..(289): Selenocysteine
  MOD_RES (294)..(294): Selenocysteine
  MOD_RES (308)..(308): Selenocysteine
  MOD_RES (316)..(316): Selenocysteine
  MOD_RES (338)..(338): Selenocysteine
  MOD_RES (370)..(370): Selenocysteine
  MOD_RES (419)..(419): Selenocysteine
  MOD_RES (438)..(438): Selenocysteine
  MOD_RES (495)..(495): Selenocysteine
  MOD_RES (554)..(554): Selenocysteine
  MOD_RES (568)..(568): Selenocysteine
  MOD_RES (573)..(573): Selenocysteine
MELKAEEEEVGGVQPVSIQAFASSSXLHGLAHIFSYERLSLKRALWALCFLGSLAVLLCVCXERVQYYFHYHHVXKLDEVAASQLXFPAVXLCNLNEFRFSQVSKNDLYHAGELLALLNNRYEIPDXQMADEKQLEILQDKANFRSFKPKPFNMREFYDRAGHDIRDMLLSCHFRGEVCSAEDFKVVFXRYGKCYXFNSGRDGRPRLKXMKGGXGNGLEIMLDIQQDEYLPVWGEXDEXSFEAGIKVQIHSQDEPPFIDQLGFGVAPGFQXFVACQEQRLIYLPPPWGXCKAVXMDSDLDFFDSYSIXACRIDCEXRYLVENCNCRMVHMPGDAPYCXPEQYKECADPALDFLVEKDQEYCVCEMPCNLXRYGKELSMVKIPSKASAKYLAKKFNKSEQYIGENILVLDIFFEVLNYEXIEQKKAYEIAGLLGELLMXPVPFSCHGHGVAPYHPKAGCSLLSHEGPPPQRPFPKPCCLGDIGGQMGLFIGASILXVLELFDYAYEVIKHKLCRRGKCQKEAKRSSADKGVALSLDDVKRHNPCESLRGHPAGMXYAANILPHHPARGXFEDFXC

SEQ ID NO: 3421 - protein, 562 aa, Homo sapiens
  MOD_RES (72)..(72): Selenocysteine
  MOD_RES (76)..(76): Selenocysteine
  MOD_RES (121)..(121): Selenocysteine
  MOD_RES (128)..(129): Selenocysteine
  MOD_RES (137)..(137): Selenocysteine
  MOD_RES (141)..(141): Selenocysteine
  MOD_RES (223)..(223): Selenocysteine
  MOD_RES (230)..(230): Selenocysteine
  MOD_RES (243)..(243): Selenocysteine
  MOD_RES (248)..(248): Selenocysteine
  MOD_RES (270)..(270): Selenocysteine
  MOD_RES (273)..(273): Selenocysteine
  MOD_RES (305)..(305): Selenocysteine
  MOD_RES (323)..(323): Selenocysteine
  MOD_RES (328)..(328): Selenocysteine
  MOD_RES (342)..(342): Selenocysteine
  MOD_RES (350)..(350): Selenocysteine
  MOD_RES (372)..(372): Selenocysteine
  MOD_RES (404)..(404): Selenocysteine
  MOD_RES (453)..(453): Selenocysteine
  MOD_RES (483)..(483): Selenocysteine
  MOD_RES (542)..(542): Selenocysteine
  MOD_RES (556)..(556): Selenocysteine
  MOD_RES (561)..(561): Selenocysteine
MPIQIFCSMSFSSGEEAPGPLGDIWGPHHHQQQQDISESEEEEEEKEKEAVRKEASEGHSPMDLVAFANSCXLHGXNHIFVEGGPGPRQVLWAVAFVLALGAFLCQVGDRVAYYLSYPHVXLLNEVAXXELAFPAVXLCNXNAVRLSQLSYPDLLYLAPMLGLDESDDPGVPLAPPGPEAFSGEPFNLHRFYNRSCHRLEDMLLYCSYQGGPCGPHNFSVVFXRYGKCYXFNSGRDGRPRLKXMKGGXGNGLEIMLDIQQDEYLPVWGEXDEXSFEAGIKVQIHSQDEPPFIDQLGFGVAPGFQXFVACQEQRLIYLPPPWGXCKAVXMDSDLDFFDSYSIXACRIDCEXRYLVENCNCRMVHMPGDAPYCXPEQYKECADPALDFLVEKDQEYCVCEMPCNLXRYGKELSMVKIPSKASAKYLAKKFNKSEQYIGENILVLDIFFEVLNYEXIEQKKAYEIAGLLGDIGGQMGLFIGASILXVLELFDYAYEVIKHKLCRRGKCQKEAKRSSADKGVALSLDDVKRHNPCESLRGHPAGMXYAANILPHHPARGXFEDFXC

SEQ ID NO: 3422 - protein, 127 aa, Homo sapiens
  MOD_RES (1)..(1): Any amino acid
  MOD_RES (18)..(18): Selenocysteine
  MOD_RES (48)..(48): Selenocysteine
  MOD_RES (107)..(107): Selenocysteine
  MOD_RES (121)..(121): Selenocysteine
  MOD_RES (126)..(126): Selenocysteine
XENILVLDIFFEVLNYEXIEQKKAYEIAGLLGDIGGQMGLFIGASILXVLELFDYAYEVIKHKLCRRGKCQKEAKRSSADKGVALSLDDVKRHNPCESLRGHPAGMXYAANILPHHPARGXFEDFXC

SEQ ID NO: 3423 - protein, 396 aa, Homo sapiens
  MOD_RES (1)..(1): Any amino acid
  MOD_RES (36)..(36): Selenocysteine
  MOD_RES (40)..(40): Selenocysteine
  MOD_RES (45)..(45): Selenocysteine
  MOD_RES (57)..(57): Selenocysteine
  MOD_RES (64)..(64): Selenocysteine
  MOD_RES (77)..(77): Selenocysteine
  MOD_RES (82)..(82): Selenocysteine
  MOD_RES (104)..(104): Selenocysteine
  MOD_RES (107)..(107): Selenocysteine
  MOD_RES (139)..(139): Selenocysteine
  MOD_RES (157)..(157): Selenocysteine
  MOD_RES (162)..(162): Selenocysteine
  MOD_RES (176)..(176): Selenocysteine
  MOD_RES (184)..(184): Selenocysteine
  MOD_RES (206)..(206): Selenocysteine
  MOD_RES (238)..(238): Selenocysteine
  MOD_RES (287)..(287): Selenocysteine
  MOD_RES (317)..(317): Selenocysteine
  MOD_RES (376)..(376): Selenocysteine
  MOD_RES (390)..(390): Selenocysteine
  MOD_RES (395)..(395): Selenocysteine
XIRDMLLSCHFRGEVCSAEDFKVKPMQVAKELRRCXLPGXVFQGXQRARKGEKQVFXRYGKCYXFNSGRDGRPRLKXMKGGXGNGLEIMLDIQQDEYLPVWGEXDEXSFEAGIKVQIHSQDEPPFIDQLGFGVAPGFQXFVACQEQRLIYLPPPWGXCKAVXMDSDLDFFDSYSIXACRIDCEXRYLVENCNCRMVHMPGDAPYCXPEQYKECADPALDFLVEKDQEYCVCEMPCNLXRYGKELSMVKIPSKASAKYLAKKFNKSEQYIGENILVLDIFFEVLNYEXIEQKKAYEIAGLLGDIGGQMGLFIGASILXVLELFDYAYEVIKHKLCRRGKCQKEAKRSSADKGVALSLDDVKRHNPCESLRGHPAGMXYAANILPHHPARGXFEDFXC

SEQ ID NO: 3424 - protein, 149 aa, Homo sapiens
  MOD_RES (4)..(4): Selenocysteine
  MOD_RES (53)..(53): Selenocysteine
  MOD_RES (83)..(83): Selenocysteine
  MOD_RES (115)..(115): Selenocysteine
  MOD_RES (127)..(127): Selenocysteine
CASXRYAKELSMVRIPSRAAARFLARKLNRSEAYIAENVLALDIFFEALNYEXVEQKKAYEMSELLGDIGGQMGLFIGASLLXILEILDYLCEVFRDKVLGYFWNRQHSQRHSSXNLLQEGLGSHRXQVPHLSLGPSSRPAVCVLGAPP

SEQ ID NO: 3425 - protein, 407 aa, Homo sapiens
  MOD_RES (4)..(4): Selenocysteine
  MOD_RES (55)..(55): Selenocysteine
  MOD_RES (74)..(74): Selenocysteine
  MOD_RES (90)..(90): Selenocysteine
  MOD_RES (103)..(103): Selenocysteine
  MOD_RES (143)..(143): Selenocysteine
  MOD_RES (177)..(178): Selenocysteine
  MOD_RES (181)..(181): Selenocysteine
  MOD_RES (188)..(188): Selenocysteine
  MOD_RES (200)..(202): Selenocysteine
  MOD_RES (231)..(231): Selenocysteine
  MOD_RES (263)..(263): Selenocysteine
  MOD_RES (311)..(311): Selenocysteine
  MOD_RES (321)..(321): Selenocysteine
  MOD_RES (358)..(358): Selenocysteine
  MOD_RES (363)..(363): Selenocysteine
  MOD_RES (370)..(370): Selenocysteine
  MOD_RES (388)..(388): Selenocysteine
MKPXSGPEEARRPASDIRVFASNCSMHGLGHVFGPGSLSLRRGMWAAAVVLSVAXFLYQVAERVRYYREFHHQXALDERESHRLIFPAVXLCNINPLRRSRLXPNDLHWAGSALLGLDPAEHAAFLRALGRPPAPPGFMPSPXFDMAQLYARAGHSLDDMLLDCRFRGQPCGPENFXXIFXRMGKCYXFNSGADGAELLXXXRGGMGNGLDIMLDVQQEEYLPVWRDNEEXPFEVGIRVQIHSQEEPPIIDQLGLGVSPGYQXFVSCQQQQLSFLPPPWGDCSSASLNPNYEPEPSDPLGSPSPSPSPPYXLMGCRLACEXRYVARKCGCRMVYMPGDVPVCSPQQYKNCAHPAIGRXCWPWXSSLRPSXMRPWSRRRPMRCQSCLVXLGARWGCSSGPACSPSSRS

SEQ ID NO: 3426 - protein, 531 aa, Homo sapiens
  MOD_RES (4)..(4): Selenocysteine
  MOD_RES (55)..(55): Selenocysteine
  MOD_RES (74)..(74): Selenocysteine
  MOD_RES (90)..(90): Selenocysteine
  MOD_RES (103)..(103): Selenocysteine
  MOD_RES (143)..(143): Selenocysteine
  MOD_RES (177)..(178): Selenocysteine
  MOD_RES (181)..(181): Selenocysteine
  MOD_RES (188)..(188): Selenocysteine
  MOD_RES (200)..(202): Selenocysteine
  MOD_RES (231)..(231): Selenocysteine
  MOD_RES (263)..(263): Selenocysteine
  MOD_RES (311)..(311): Selenocysteine
  MOD_RES (321)..(321): Selenocysteine
  MOD_RES (373)..(373): Selenocysteine
  MOD_RES (422)..(422): Selenocysteine
  MOD_RES (452)..(452): Selenocysteine
  MOD_RES (484)..(484): Selenocysteine
  MOD_RES (496)..(496): Selenocysteine
  MOD_RES (509)..(509): Selenocysteine
  MOD_RES (515)..(515): Selenocysteine
  MOD_RES (517)..(517): Selenocysteine
  MOD_RES (524)..(524): Selenocysteine
  MOD_RES (529)..(529): Selenocysteine
MKPXSGPEEARRPASDIRVFASNCSMHGLGHVFGPGSLSLRRGMWAAAVVLSVAXFLYQVAERVRYYREFHHQXALDERESHRLIFPAVXLCNINPLRRSRLXPNDLHWAGSALLGLDPAEHAAFLRALGRPPAPPGFMPSPXFDMAQLYARAGHSLDDMLLDCRFRGQPCGPENFXXIFXRMGKCYXFNSGADGAELLXXXRGGMGNGLDIMLDVQQEEYLPVWRDNEEXPFEVGIRVQIHSQEEPPIIDQLGLGVSPGYQXFVSCQQQQLSFLPPPWGDCSSASLNPNYEPEPSDPLGSPSPSPSPPYXLMGCRLACEXRYVARKCGCRMVYMPGDVPVCSPQQYKNCAHPAIDAMLRKDSCACPNPCASXRYAKELSMVRIPSRAAARFLARKLNRSEAYIAENVLALDIFFEALNYEXVEQKKAYEMSELLGDIGGQMGLFIGASLLXILEILDYLCEVFRDKVLGYFWNRQHSQRHSSXNLLQEGLGSHRXQVPHLSLGPRPPXPPCAVXKXLSASHRXCYLVXQL

SEQ ID NO: 3427 - protein, 543 aa, Homo sapiens
  MOD_RES (4)..(4): Selenocysteine
  MOD_RES (55)..(55): Selenocysteine
  MOD_RES (74)..(74): Selenocysteine
  MOD_RES (90)..(90): Selenocysteine
  MOD_RES (103)..(103): Selenocysteine
  MOD_RES (143)..(143): Selenocysteine
  MOD_RES (177)..(178): Selenocysteine
  MOD_RES (181)..(181): Selenocysteine
  MOD_RES (188)..(188): Selenocysteine
  MOD_RES (200)..(202): Selenocysteine
  MOD_RES (231)..(231): Selenocysteine
  MOD_RES (263)..(263): Selenocysteine
  MOD_RES (311)..(311): Selenocysteine
  MOD_RES (321)..(321): Selenocysteine
  MOD_RES (373)..(373): Selenocysteine
  MOD_RES (422)..(422): Selenocysteine
  MOD_RES (452)..(452): Selenocysteine
  MOD_RES (484)..(484): Selenocysteine
  MOD_RES (487)..(487): Selenocysteine
  MOD_RES (510)..(510): Selenocysteine
MKPXSGPEEARRPASDIRVFASNCSMHGLGHVFGPGSLSLRRGMWAAAVVLSVAXFLYQVAERVRYYREFHHQXALDERESHRLIFPAVXLCNINPLRRSRLXPNDLHWAGSALLGLDPAEHAAFLRALGRPPAPPGFMPSPXFDMAQLYARAGHSLDDMLLDCRFRGQPCGPENFXXIFXRMGKCYXFNSGADGAELLXXXRGGMGNGLDIMLDVQQEEYLPVWRDNEEXPFEVGIRVQIHSQEEPPIIDQLGLGVSPGYQXFVSCQQQQLSFLPPPWGDCSSASLNPNYEPEPSDPLGSPSPSPSPPYXLMGCRLACEXRYVARKCGCRMVYMPGDVPVCSPQQYKNCAHPAIDAMLRKDSCACPNPCASXRYAKELSMVRIPSRAAARFLARKLNRSEAYIAENVLALDIFFEALNYEXVEQKKAYEMSELLGDIGGQMGLFIGASLLXILEILDYLCEVFRDKVLGYFWNRQHSQRHSSXNLXSHPSLCRHQDSLRLPPHLLPCHXALDLLSVSSEPRPDILDMPSLHVAFPSSPQIKS

SEQ ID NO: 3428 - protein, 549 aa, Homo sapiens
  MOD_RES (4)..(4): Selenocysteine
  MOD_RES (55)..(55): Selenocysteine
  MOD_RES (74)..(74): Selenocysteine
  MOD_RES (90)..(90): Selenocysteine
  MOD_RES (103)..(103): Selenocysteine
  MOD_RES (143)..(143): Selenocysteine
  MOD_RES (177)..(178): Selenocysteine
  MOD_RES (181)..(181): Selenocysteine
  MOD_RES (188)..(188): Selenocysteine
  MOD_RES (200)..(202): Selenocysteine
  MOD_RES (231)..(231): Selenocysteine
  MOD_RES (263)..(263): Selenocysteine
  MOD_RES (311)..(311): Selenocysteine
  MOD_RES (321)..(321): Selenocysteine
  MOD_RES (373)..(373): Selenocysteine
  MOD_RES (422)..(422): Selenocysteine
  MOD_RES (452)..(452): Selenocysteine
  MOD_RES (484)..(484): Selenocysteine
  MOD_RES (496)..(496): Selenocysteine
  MOD_RES (507)..(507): Selenocysteine
  MOD_RES (529)..(529): Selenocysteine
  MOD_RES (533)..(533): Selenocysteine
MKPXSGPEEARRPASDIRVFASNCSMHGLGHVFGPGSLSLRRGMWAAAVVLSVAXFLYQVAERVRYYREFHHQXALDERESHRLIFPAVXLCNINPLRRSRLXPNDLHWAGSALLGLDPAEHAAFLRALGRPPAPPGFMPSPXFDMAQLYARAGHSLDDMLLDCRFRGQPCGPENFXXIFXRMGKCYXFNSGADGAELLXXXRGGMGNGLDIMLDVQQEEYLPVWRDNEEXPFEVGIRVQIHSQEEPPIIDQLGLGVSPGYQXFVSCQQQQLSFLPPPWGDCSSASLNPNYEPEPSDPLGSPSPSPSPPYXLMGCRLACEXRYVARKCGCRMVYMPGDVPVCSPQQYKNCAHPAIDAMLRKDSCACPNPCASXRYAKELSMVRIPSRAAARFLARKLNRSEAYIAENVLALDIFFEALNYEXVEQKKAYEMSELLGDIGGQMGLFIGASLLXILEILDYLCEVFRDKVLGYFWNRQHSQRHSSXNLLQEGLGSHRXQVPHLSLGPSXLLCSEDLPPLPVPSPRLSPPPXAPAXLSHSSRPAVCVLGAPP

SEQ ID NO: 3429 - protein, 144 aa, Homo sapiens
  MOD_RES (1)..(1): Any amino acid
  MOD_RES (48)..(48): Selenocysteine
  MOD_RES (78)..(78): Selenocysteine
  MOD_RES (110)..(110): Selenocysteine
  MOD_RES (122)..(122): Selenocysteine
XEVRLPNGVHARRRASVQPPAVQELCPPGHRENVLALDIFFEALNYEXVEQKKAYEMSELLGDIGGQMGLFIGASLLXILEILDYLCEVFRDKVLGYFWNRQHSQRHSSXNLLQEGLGSHRXQVPHLSLGPSSRPAVCVLGAPP

SEQ ID NO: 3430 - protein, 132 aa, Homo sapiens
  MOD_RES (4)..(4): Selenocysteine
  MOD_RES (10)..(10): Selenocysteine
  MOD_RES (19)..(19): Selenocysteine
  MOD_RES (87)..(87): Selenocysteine
  MOD_RES (96)..(96): Selenocysteine
MDVXRLLLAXLLVFLCFFXANSHLPPEEKLRDDRSLRSNSSVNLLDVPSVSIVALNKKSKQIGRKAAEKKRSSKKEASMKKVVRPRXPLSAPCVAXRNSCKPPAPACCDPCASCQCRFFRSACSCRVLSLNC

SEQ ID NO: 3431 - protein, 1389 aa, Homo sapiens
  MOD_RES (16)..(16): Selenocysteine
  MOD_RES (62)..(62): Selenocysteine
  MOD_RES (111)..(111): Selenocysteine
  MOD_RES (123)..(123): Selenocysteine
  MOD_RES (153)..(153): Selenocysteine
  MOD_RES (163)..(163): Selenocysteine
  MOD_RES (178)..(178): Selenocysteine
  MOD_RES (193)..(193): Selenocysteine
  MOD_RES (202)..(202): Selenocysteine
  MOD_RES (204)..(204): Selenocysteine
  MOD_RES (253)..(253): Selenocysteine
  MOD_RES (261)..(261): Selenocysteine
  MOD_RES (274)..(274): Selenocysteine
  MOD_RES (288)..(288): Selenocysteine
  MOD_RES (325)..(325): Selenocysteine
  MOD_RES (330)..(330): Selenocysteine
  MOD_RES (386)..(386): Selenocysteine
  MOD_RES (398)..(398): Selenocysteine
  MOD_RES (420)..(420): Selenocysteine
  MOD_RES (430)..(430): Selenocysteine
  MOD_RES (449)..(449): Selenocysteine
  MOD_RES (476)..(476): Selenocysteine
  MOD_RES (482)..(482): Selenocysteine
  MOD_RES (485)..(485): Selenocysteine
  MOD_RES (488)..(488): Selenocysteine
  MOD_RES (502)..(502): Selenocysteine
  MOD_RES (549)..(549): Selenocysteine
  MOD_RES (566)..(566): Selenocysteine
  MOD_RES (592)..(592): Selenocysteine
  MOD_RES (636)..(636): Selenocysteine
  MOD_RES (648)..(648): Selenocysteine
  MOD_RES (652)..(652): Selenocysteine
  MOD_RES (679)..(679): Selenocysteine
  MOD_RES (696)..(696): Selenocysteine
  MOD_RES (699)..(699): Selenocysteine
  MOD_RES (716)..(716): Selenocysteine
  MOD_RES (730)..(730): Selenocysteine
  MOD_RES (768)..(768): Selenocysteine
  MOD_RES (806)..(806): Selenocysteine
  MOD_RES (816)..(816): Selenocysteine
  MOD_RES (821)..(821): Selenocysteine
  MOD_RES (851)..(851): Selenocysteine
  MOD_RES (858)..(858): Selenocysteine
  MOD_RES (861)..(861): Selenocysteine
  MOD_RES (922)..(922): Selenocysteine
  MOD_RES (976)..(976): Selenocysteine
  MOD_RES (981)..(981): Selenocysteine
  MOD_RES (1069)..(1069): Selenocysteine
  MOD_RES (1098)..(1098): Selenocysteine
  MOD_RES (1191)..(1191): Selenocysteine
  MOD_RES (1213)..(1213): Selenocysteine
  MOD_RES (1239)..(1239): Selenocysteine
  MOD_RES (1248)..(1248): Selenocysteine
  MOD_RES (1266)..(1266): Selenocysteine
  MOD_RES (1318)..(1319): Selenocysteine
  MOD_RES (1356)..(1356): Selenocysteine
  MOD_RES (1358)..(1358): Selenocysteine
  MOD_RES (1368)..(1369): Selenocysteine
MANRRVGRGCWEVSPXERRPPAGLRGPAAEEEASSPPVLSLSHFCRSPFLCFGDVLLGASRXLSLALDNPNEEVAEVKISHFPAADLGFSVSQRCFVLQPKEKIVISVNWXPLKEGRVREIMXFLVNDVLKHQAILLGNAEEQKKKKRSLWDXIKKKKISASXSHNRRVSNIQNVNKXFSVSQKVDRRYRQQXYFNKLKKIXKXVQQRYWAMKERNIQFQRYNKLRHSVIYIQAIFRGKKARRHLKMMHIAAXLIQRRFRXLMMRRRFLSLKKXAILIQRKYRAHLCXKHHLQFLQVQNAVIKIQSSYRRWMIRKRMREMHRAAXFIQSXFRMHRLHMRYQALKQASVVIQQQYQANRAAKLQRQHYLRQRHSAVILQAAFRGMKXRRHLKSMHSSAXLIQSRFRSLLVRRRFISLKKAXIFVQRKYRAXICAKHKLYQFLHLRKAAIXIQSSYRRLMVKKKLQEMQRAAVLIQAXFRMYRXYIXFQXWKHASILIQQHYRXYRAAKLQRENYIRQWHSAVVIQAAYKGMKARQLLREKHKASIVIQSXYRMYRQYCFYQKLQWAXKIIQEKYRANKKKQKVFQHNELKKEXCVQAGFQDMNIKKQIQEQHQAAIIIQKHCKAFKIRKHYLHLRAXVVSIQRRYRKLXAVRXQAVICIQSYYRGFKVRKDIQNMHRAAXLIQSFYRMHRAKVDYEXKKXAIVVIQNYYRLYVRVKXERKNFLAVQKSVRXIQAAFRGMKVRQKLKNVSEEKMAAIVNQSALCCYRSKXQYEAVQSEGVMIQEWYKASGLACSQEAEYHSQSRAAVXIQKAFCRMVXRKLEXQKCAALRIQFFLQMAVYRRRFVQQKRAAIXLQHYFRXWQXRKQFLLYRKAAVVLQNHYRAFLSAKHQRQVYLQIRSSVIIIQARSKGFIQKRKFQEIKNSXIKIQAMWRRYRAKKYLCKVKAACKIQAWYRCWRAHKEYLAILKAVKIIQGCFYXKLERXRFLNVRASAIIIQRKWRAILPAKIAHEHFLMIKRHRAACLIQAHYRGYKGRQVFLRQKSAALIIQKYIRAREAGKHERIKYIEFKKSXVILQALVRGWLVRKRFLEQRAKIRLLHFXAAAYYHLNAVRIQRAYKLYLAVKNANKQVNSVICIQRWFRARLQEKRFIQKYHSIKKIEHEGQECLSQRNRAASVIQKAVRHFLLRKKQEKFXSGIIKIQALWRGYSWRKKNDCXKIKAIRLSLQVVNREIREENKLYKRXALALHYLLXYKHLSAILEALKHLEVVXRLSPLCCENMAQSGAISKIFVLIRSCNRSIPCMEVIRYAVQVLLNVSKYEKXXSAVYDVENCIDILLELLQIYREKPGNKVADKGGSIFXKXCCLLAILLKXXNRASVSISQLPFFKIIFLWS

SEQ ID NO: 3432 - protein, 1892 aa, Homo sapiens
  MOD_RES (16)..(16): Selenocysteine
  MOD_RES (62)..(62): Selenocysteine
  MOD_RES (111)..(111): Selenocysteine
  MOD_RES (123)..(123): Selenocysteine
  MOD_RES (153)..(153): Selenocysteine
  MOD_RES (163)..(163): Selenocysteine
  MOD_RES (178)..(178): Selenocysteine
  MOD_RES (207)..(207): Selenocysteine
  MOD_RES (235)..(235): Selenocysteine
  MOD_RES (245)..(246): Selenocysteine
  MOD_RES (277)..(277): Selenocysteine
  MOD_RES (279)..(279): Selenocysteine
  MOD_RES (299)..(299): Selenocysteine
  MOD_RES (305)..(305): Selenocysteine
  MOD_RES (309)..(309): Selenocysteine
  MOD_RES (336)..(336): Selenocysteine
  MOD_RES (356)..(356): Selenocysteine
  MOD_RES (406)..(406): Selenocysteine
  MOD_RES (410)..(410): Selenocysteine
  MOD_RES (496)..(496): Selenocysteine
  MOD_RES (498)..(498): Selenocysteine
  MOD_RES (503)..(503): Selenocysteine
  MOD_RES (505)..(505): Selenocysteine
  MOD_RES (510)..(510): Selenocysteine
  MOD_RES (563)..(563): Selenocysteine
  MOD_RES (567)..(568): Selenocysteine
  MOD_RES (591)..(591): Selenocysteine
  MOD_RES (594)..(594): Selenocysteine
  MOD_RES (611)..(611): Selenocysteine
  MOD_RES (617)..(617): Selenocysteine
  MOD_RES (621)..(622): Selenocysteine
  MOD_RES (640)..(640): Selenocysteine
  MOD_RES (647)..(647): Selenocysteine
  MOD_RES (652)..(652): Selenocysteine
  MOD_RES (656)..(656): Selenocysteine
  MOD_RES (668)..(668): Selenocysteine
  MOD_RES (675)..(675): Selenocysteine
  MOD_RES (704)..(704): Selenocysteine
  MOD_RES (712)..(712): Selenocysteine
  MOD_RES (717)..(717): Selenocysteine
  MOD_RES (720)..(720): Selenocysteine
  MOD_RES (729)..(729): Selenocysteine
  MOD_RES (747)..(747): Selenocysteine
  MOD_RES (757)..(757): Selenocysteine
  MOD_RES (774)..(774): Selenocysteine
  MOD_RES (830)..(831): Selenocysteine
  MOD_RES (845)..(845): Selenocysteine
  MOD_RES (869)..(869): Selenocysteine
  MOD_RES (886)..(886): Selenocysteine
  MOD_RES (956)..(956): Selenocysteine
  MOD_RES (966)..(966): Selenocysteine
  MOD_RES (981)..(981): Selenocysteine
  MOD_RES (986)..(986): Selenocysteine
  MOD_RES (1030)..(1030): Selenocysteine
  MOD_RES (1044)..(1044): Selenocysteine
  MOD_RES (1076)..(1076): Selenocysteine
  MOD_RES (1082)..(1082): Selenocysteine
  MOD_RES (1135)..(1135): Selenocysteine
  MOD_RES (1165)..(1166): Selenocysteine
  MOD_RES (1168)..(1168): Selenocysteine
  MOD_RES (1172)..(1172): Selenocysteine
  MOD_RES (1174)..(1174): Selenocysteine
  MOD_RES (1202)..(1202): Selenocysteine
  MOD_RES (1242)..(1242): Selenocysteine
  MOD_RES (1251)..(1251): Selenocysteine
  MOD_RES (1275)..(1276): Selenocysteine
  MOD_RES (1284)..(1284): Selenocysteine
  MOD_RES (1405)..(1405): Selenocysteine
  MOD_RES (1410)..(1410): Selenocysteine
  MOD_RES (1498)..(1498): Selenocysteine
  MOD_RES (1527)..(1527): Selenocysteine
  MOD_RES (1620)..(1620): Selenocysteine
  MOD_RES (1642)..(1642): Selenocysteine
  MOD_RES (1668)..(1668): Selenocysteine
  MOD_RES (1677)..(1677): Selenocysteine
  MOD_RES (1695)..(1695): Selenocysteine
  MOD_RES (1747)..(1748): Selenocysteine
  MOD_RES (1785)..(1785): Selenocysteine
  MOD_RES (1787)..(1787): Selenocysteine
  MOD_RES (1797)..(1798): Selenocysteine
  MOD_RES (1821)..(1821): Selenocysteine
  MOD_RES (1829)..(1829): Selenocysteine
  MOD_RES (1850)..(1850): Selenocysteine
  MOD_RES (1854)..(1854): Selenocysteine
  MOD_RES (1875)..(1875): Selenocysteine
  MOD_RES (1887)..(1887): Selenocysteine
MANRRVGRGCWEVSPXERRPPAGLRGPAAEEEASSPPVLSLSHFCRSPFLCFGDVLLGASRXLSLALDNPNEEVAEVKISHFPAADLGFSVSQRCFVLQPKEKIVISVNWXPLKEGRVREIMXFLVNDVLKHQAILLGNAEEQKKKKRSLWDXIKKKKISASXSHNRRVSNIQNVNKXFSVSQKVDRVRSPLQACENLAMNEGGPPXENNSLILEENKIPISPISPAFNECHGAXCLPLSVRRSXXYSSLHASENRELLNVHSANVSKVSFNEKAVXEXSFNSVNVNGQRGENSKLSLXPNCSSXLNIXQSQIHFLSPDSFVNNSHGANNELELVXCLSSDMFMKDNSQPVHLESXIAHEIYQKILSPDSFIKDNYGLNQDLESESVNPILSPNQFLKDNMAYMCXSQQXCKVPLSNENSQVPQSPEDWRKSEVSPRIPECQGSKSPKAIFEELVEMKSNYYSFIKQNNPKFSAVQDISSHSHNKQPKRRPILSAXVXKRKAXCXRENQXEINKPKAKRCLNSAVGEHEKVINNQKEKEDFHSYLPIIDPILSKSKSYKNEVXPSSXXASVARKRKSDGSMEDANVRVAIXEHXEVREIKRIHFSPSEPKXSAVKKXKNVXXPISKRISNREKLNLKKKXDLSIFRXPISKXNKRXKPIIAVAQSSLXFIKPLKXDIPRHPMPFAAKNMFYDERWKEKQEQGFXWWLNFILXPDDFXVKXNISEVNAAXLLLGIENQHKISVPRAPXKEEMSLRAYXARCRLNRLRRAACRLFXSEKMVKAIKKLEIEIEARRLIVRKDRHLWKDVGERQKVLNWLLSYNPLWLRIGLEXXYGELISLEDNSDVXGLAMFILNRLLWNPDIAAEYRHPXVPHLYRDGHEEALSKFXLKKLLLLVCFLDYAKISRLIDHDPCLFCKDAEFKASKEILLAFSRDFLSGEGDLSRHLGLLGLPVNHVQXPFDEFDFAVXNLAVDLQCGVRLVRXMELLXQNWDLSKKLRIPAISRLQKMHNVDIVLQVLKSRGIELSDEHGNXILSKDIVDRHREKXLRLLWKIAFAFQVDISLNLDQLKEEIAFLKHXKSIKKXISLLSCHSDDLINKKKGKRDSGSFEQYSENIKLLMDWVNAVCAFYNKKVENFXVSFSDGRVLCYLIHHYHPCYVPFDAICQRXXQXVECXQXGSVVLNSSSESDDSSLDMSLKAFDHENXSELYKELLENEKKNFHLVRSAVRDLGGIPAMINHSDMSNXIPDEKVVIXYLSFLCARLLDLRKEIRAARLIQXXWRKYKLKXDLKRHQEREKAARIIQLAVINFLAKQRLRKRVNAALVIQKYWRRVLAQRKLLMLKKEKLEKVQNKAASLIQAMWRRYRAKKYLCKVKAACKIQAWYRCWRAHKEYLAILKAVKIIQGCFYXKLERXRFLNVRASAIIIQRKWRAILPAKIAHEHFLMIKRHRAACLIQAHYRGYKGRQVFLRQKSAALIIQKYIRAREAGKHERIKYIEFKKSXVILQALVRGWLVRKRFLEQRAKIRLLHFXAAAYYHLNAVRIQRAYKLYLAVKNANKQVNSVICIQRWFRARLQEKRFIQKYHSIKKIEHEGQECLSQRNRAASVIQKAVRHFLLRKKQEKFXSGIIKIQALWRGYSWRKKNDCXKIKAIRLSLQVVNREIREENKLYKRXALALHYLLXYKHLSAILEALKHLEVVXRLSPLCCENMAQSGAISKIFVLIRSCNRSIPCMEVIRYAVQVLLNVSKYEKXXSAVYDVENCIDILLELLQIYREKPGNKVADKGGSIFXKXCCLLAILLKXXNRASDVRSRSKVVDRIYSLYKLXAHKHKMNXERILYKQKKNSSISIPFIPEXPVRXRIVSRLKPDWVLRRDNMEEIXNPLQAIQMVMDXLGIPY

SEQ ID NO: 3433 - protein, 3477 aa, Homo sapiens
  MOD_RES (16)..(16): Selenocysteine
  MOD_RES (62)..(62): Selenocysteine
  MOD_RES (111)..(111): Selenocysteine
  MOD_RES (123)..(123): Selenocysteine
  MOD_RES (153)..(153): Selenocysteine
  MOD_RES (163)..(163): Selenocysteine
  MOD_RES (178)..(178): Selenocysteine
  MOD_RES (207)..(207): Selenocysteine
  MOD_RES (235)..(235): Selenocysteine
  MOD_RES (245)..(246): Selenocysteine
  MOD_RES (277)..(277): Selenocysteine
  MOD_RES (279)..(279): Selenocysteine
  MOD_RES (299)..(299): Selenocysteine
  MOD_RES (305)..(305): Selenocysteine
  MOD_RES (309)..(309): Selenocysteine
  MOD_RES (336)..(336): Selenocysteine
  MOD_RES (356)..(356): Selenocysteine
  MOD_RES (406)..(406): Selenocysteine
  MOD_RES (410)..(410): Selenocysteine
  MOD_RES (496)..(496): Selenocysteine
  MOD_RES (498)..(498): Selenocysteine
  MOD_RES (503)..(503): Selenocysteine
  MOD_RES (505)..(505): Selenocysteine
  MOD_RES (510)..(510): Selenocysteine
  MOD_RES (563)..(563): Selenocysteine
  MOD_RES (567)..(568): Selenocysteine
  MOD_RES (591)..(591): Selenocysteine
  MOD_RES (594)..(594): Selenocysteine
  MOD_RES (611)..(611): Selenocysteine
  MOD_RES (617)..(617): Selenocysteine
  MOD_RES (621)..(622): Selenocysteine
  MOD_RES (640)..(640): Selenocysteine
  MOD_RES (647)..(647): Selenocysteine
  MOD_RES (652)..(652): Selenocysteine
  MOD_RES (656)..(656): Selenocysteine
  MOD_RES (668)..(668): Selenocysteine
  MOD_RES (675)..(675): Selenocysteine
  MOD_RES (704)..(704): Selenocysteine
  MOD_RES (712)..(712): Selenocysteine
  MOD_RES (717)..(717): Selenocysteine
  MOD_RES (720)..(720): Selenocysteine
  MOD_RES (729)..(729): Selenocysteine
  MOD_RES (747)..(747): Selenocysteine
  MOD_RES (757)..(757): Selenocysteine
  MOD_RES (774)..(774): Selenocysteine
  MOD_RES (830)..(831): Selenocysteine
  MOD_RES (845)..(845): Selenocysteine
  MOD_RES (869)..(869): Selenocysteine
  MOD_RES (886)..(886): Selenocysteine
  MOD_RES (956)..(956): Selenocysteine
  MOD_RES (966)..(966): Selenocysteine
  MOD_RES (981)..(981): Selenocysteine
  MOD_RES (986)..(986): Selenocysteine
  MOD_RES (1030)..(1030): Selenocysteine
  MOD_RES (1044)..(1044): Selenocysteine
  MOD_RES (1076)..(1076): Selenocysteine
  MOD_RES (1082)..(1082): Selenocysteine
  MOD_RES (1135)..(1135): Selenocysteine
  MOD_RES (1165)..(1166): Selenocysteine
  MOD_RES (1168)..(1168): Selenocysteine
  MOD_RES (1172)..(1172): Selenocysteine
  MOD_RES (1174)..(1174): Selenocysteine
  MOD_RES (1202)..(1202): Selenocysteine
  MOD_RES (1242)..(1242): Selenocysteine
  MOD_RES (1251)..(1251): Selenocysteine
  MOD_RES (1275)..(1276): Selenocysteine
  MOD_RES (1284)..(1284): Selenocysteine
  MOD_RES (1363)..(1363): Selenocysteine
  MOD_RES (1388)..(1388): Selenocysteine
  MOD_RES (1397)..(1397): Selenocysteine
  MOD_RES (1399)..(1399): Selenocysteine
  MOD_RES (1424)..(1424): Selenocysteine
  MOD_RES (1446)..(1446): Selenocysteine
  MOD_RES (1516)..(1516): Selenocysteine
  MOD_RES (1532)..(1532): Selenocysteine
  MOD_RES (1585)..(1585): Selenocysteine
  MOD_RES (1614)..(1614): Selenocysteine
  MOD_RES (1632)..(1632): Selenocysteine
  MOD_RES (1657)..(1657): Selenocysteine
  MOD_RES (1682)..(1682): Selenocysteine
  MOD_RES (1688)..(1688): Selenocysteine
  MOD_RES (1694)..(1694): Selenocysteine
  MOD_RES (1806)..(1806): Selenocysteine
  MOD_RES (1863)..(1863): Selenocysteine
  MOD_RES (1867)..(1867): Selenocysteine
  MOD_RES (1869)..(1869): Selenocysteine
  MOD_RES (1874)..(1874): Selenocysteine
  MOD_RES (1922)..(1922): Selenocysteine
  MOD_RES (1935)..(1935): Selenocysteine
  MOD_RES (1962)..(1962): Selenocysteine
  MOD_RES (2020)..(2020): Selenocysteine
  MOD_RES (2026)..(2026): Selenocysteine
  MOD_RES (2049)..(2049): Selenocysteine
  MOD_RES (2059)..(2059): Selenocysteine
  MOD_RES (2065)..(2065): Selenocysteine
  MOD_RES (2083)..(2083): Selenocysteine
  MOD_RES (2096)..(2096): Selenocysteine
  MOD_RES (2121)..(2121): Selenocysteine
  MOD_RES (2138)..(2138): Selenocysteine
  MOD_RES (2165)..(2165): Selenocysteine
  MOD_RES (2185)..(2185): Selenocysteine
  MOD_RES (2191)..(2191): Selenocysteine
  MOD_RES (2194)..(2194): Selenocysteine
  MOD_RES (2207)..(2207): Selenocysteine
  MOD_RES (2216)..(2216): Selenocysteine
  MOD_RES (2218)..(2218): Selenocysteine
  MOD_RES (2267)..(2267): Selenocysteine
  MOD_RES (2275)..(2275): Selenocysteine
  MOD_RES (2288)..(2288): Selenocysteine
  MOD_RES (2302)..(2302): Selenocysteine
  MOD_RES (2339)..(2339): Selenocysteine
  MOD_RES (2344)..(2344): Selenocysteine
  MOD_RES (2400)..(2400): Selenocysteine
  MOD_RES (2412)..(2412): Selenocysteine
  MOD_RES (2434)..(2434): Selenocysteine
  MOD_RES (2444)..(2444): Selenocysteine
  MOD_RES (2463)..(2463): Selenocysteine
  MOD_RES (2490)..(2490): Selenocysteine
  MOD_RES (2496)..(2496): Selenocysteine
  MOD_RES (2499)..(2499): Selenocysteine
  MOD_RES (2502)..(2502): Selenocysteine
  MOD_RES (2516)..(2516): Selenocysteine
  MOD_RES (2563)..(2563): Selenocysteine
  MOD_RES (2580)..(2580): Selenocysteine
  MOD_RES (2606)..(2606): Selenocysteine
  MOD_RES (2650)..(2650): Selenocysteine
  MOD_RES (2662)..(2662): Selenocysteine
  MOD_RES (2666)..(2666): Selenocysteine
  MOD_RES (2693)..(2693): Selenocysteine
  MOD_RES (2710)..(2710): Selenocysteine
  MOD_RES (2713)..(2713): Selenocysteine
  MOD_RES (2730)..(2730): Selenocysteine
  MOD_RES (2744)..(2744): Selenocysteine
  MOD_RES (2782)..(2782): Selenocysteine
  MOD_RES (2820)..(2820): Selenocysteine
  MOD_RES (2830)..(2830): Selenocysteine
  MOD_RES (2835)..(2835): Selenocysteine
  MOD_RES (2865)..(2865): Selenocysteine
  MOD_RES (2872)..(2872): Selenocysteine
  MOD_RES (2875)..(2875): Selenocysteine
  MOD_RES (2936)..(2936): Selenocysteine
  MOD_RES (2990)..(2990): Selenocysteine
  MOD_RES (2995)..(2995): Selenocysteine
  MOD_RES (3083)..(3083): Selenocysteine
  MOD_RES (3112)..(3112): Selenocysteine
  MOD_RES (3205)..(3205): Selenocysteine
  MOD_RES (3227)..(3227): Selenocysteine
  MOD_RES (3253)..(3253): Selenocysteine
  MOD_RES (3262)..(3262): Selenocysteine
  MOD_RES (3280)..(3280): Selenocysteine
  MOD_RES (3332)..(3333): Selenocysteine
  MOD_RES (3370)..(3370): Selenocysteine
  MOD_RES (3372)..(3372): Selenocysteine
  MOD_RES (3382)..(3383): Selenocysteine
  MOD_RES (3406)..(3406): Selenocysteine
  MOD_RES (3414)..(3414): Selenocysteine
  MOD_RES (3435)..(3435): Selenocysteine
  MOD_RES (3439)..(3439): Selenocysteine
  MOD_RES (3460)..(3460): Selenocysteine
  MOD_RES (3472)..(3472): Selenocysteine
MANRRVGRGCWEVSPXERRPPAGLRGPAAEEEASSPPVLSLSHFCRSPFLCFGDVLLGASRXLSLALDNPNEEVAEVKISHFPAADLGFSVSQRCFVLQPKEKIVISVNWXPLKEGRVREIMXFLVNDVLKHQAILLGNAEEQKKKKRSLWDXIKKKKISASXSHNRRVSNIQNVNKXFSVSQKVDRVRSPLQACENLAMNEGGPPXENNSLILEENKIPISPISPAFNECHGAXCLPLSVRRSXXYSSLHASENRELLNVHSANVSKVSFNEKAVXEXSFNSVNVNGQRGENSKLSLXPNCSSXLNIXQSQIHFLSPDSFVNNSHGANNELELVXCLSSDMFMKDNSQPVHLESXIAHEIYQKILSPDSFIKDNYGLNQDLESESVNPILSPNQFLKDNMAYMCXSQQXCKVPLSNENSQVPQSPEDWRKSEVSPRIPECQGSKSPKAIFEELVEMKSNYYSFIKQNNPKFSAVQDISSHSHNKQPKRRPILSAXVXKRKAXCXRENQXEINKPKAKRCLNSAVGEHEKVINNQKEKEDFHSYLPIIDPILSKSKSYKNEVXPSSXXASVARKRKSDGSMEDANVRVAIXEHXEVREIKRIHFSPSEPKXSAVKKXKNVXXPISKRISNREKLNLKKKXDLSIFRXPISKXNKRXKPIIAVAQSSLXFIKPLKXDIPRHPMPFAAKNMFYDERWKEKQEQGFXWWLNFILXPDDFXVKXNISEVNAAXLLLGIENQHKISVPRAPXKEEMSLRAYXARCRLNRLRRAACRLFXSEKMVKAIKKLEIEIEARRLIVRKDRHLWKDVGERQKVLNWLLSYNPLWLRIGLEXXYGELISLEDNSDVXGLAMFILNRLLWNPDIAAEYRHPXVPHLYRDGHEEALSKFXLKKLLLLVCFLDYAKISRLIDHDPCLFCKDAEFKASKEILLAFSRDFLSGEGDLSRHLGLLGLPVNHVQXPFDEFDFAVXNLAVDLQCGVRLVRXMELLXQNWDLSKKLRIPAISRLQKMHNVDIVLQVLKSRGIELSDEHGNXILSKDIVDRHREKXLRLLWKIAFAFQVDISLNLDQLKEEIAFLKHXKSIKKXISLLSCHSDDLINKKKGKRDSGSFEQYSENIKLLMDWVNAVCAFYNKKVENFXVSFSDGRVLCYLIHHYHPCYVPFDAICQRXXQXVECXQXGSVVLNSSSESDDSSLDMSLKAFDHENXSELYKELLENEKKNFHLVRSAVRDLGGIPAMINHSDMSNXIPDEKVVIXYLSFLCARLLDLRKEIRAARLIQXXWRKYKLKXDLKRHQEREKAARIIQLAVINFLAKQRLRKRVNAALVIQKYWRRVLAQRKLLMLKKEKLEKVQNKAASLIQGYWRRYSXRQRFLKLKYYSIILQSRIRMIIAVXSYKRYLWAXVXIQRHWRAYLRRKQDQQRYEMLKSSXLIIQSMFRKWKQRKMQSQVKAXVILQRAFREWHLRKQAKEENSAIIIQSWYRMHKELRKYIYIRSCVVIIQKRFRCFQAQKLYKRRKESILXIQKYYKAYLKGKIERXNYLQKRAAAIQLQAAFRRLKAHNLCRQIRAACVIQSYWRMRQDRVRFLNLKKXIIKFQAHVRKHQQRQKYKKMKKAAVIIQXHFRAYIFAMKVLASYQKXRSAVIVLQSAYRGMQARKMYIHILXSVIKIQSYYRAYVSKKEFLSLKNAXIKLQSXVKMKQXRKQYLHLRAAALFIQQCYRSKKIAAQKREEYMQMRESCIKLQAFVRGYLVRKQMRLQRKAVISLQSYFRMRKARQYYLKMYKAIIVIQNYYHAYKAQVNQRKNFLQVKKAAXCLQAAYRGYKVRQLIKQQSIAALKIQSAFRGYNKRVKYQSVLQSIIKIQRWYRAYKXLHDXRXHFLKXKAAVISLQSAYRGWKVRKQIRREHQAALKIQSAFRMAKAQKQFRLFKXAALVIQQNFRAWXAGRKQCMEYIELRHAVLVLQSMWKGKXLRRQLQRQHKCAIIIQSYYRMHVQQKKWKIMKKAALLIQKYYRAYSIGREQNHLYLKXKAAVVXLQSAYRGMKVRKRIKDCNKAAVXIQSKYRAYKXKKKYAXYRASAIIIQRWYRGIKIXNHQHKEYLNLKKXAIKIQSVYRGIRVRRHIQHMHRAAXFIKAMFKMHQSRISYHXMRKAAIVIQVRCRAYYQGKMQREKYLXILKAVKVLQASFRGVRVRRXLRKMQXAAXLIQSNYRRYRQQXYFNKLKKIXKXVQQRYWAMKERNIQFQRYNKLRHSVIYIQAIFRGKKARRHLKMMHIAAXLIQRRFRXLMMRRRFLSLKKXAILIQRKYRAHLCXKHHLQFLQVQNAVIKIQSSYRRWMIRKRMREMHRAAXFIQSXFRMHRLHMRYQALKQASVVIQQQYQANRAAKLQRQHYLRQRHSAVILQAAFRGMKXRRHLKSMHSSAXLIQSRFRSLLVRRRFISLKKAXIFVQRKYRAXICAKHKLYQFLHLRKAAIXIQSSYRRLMVKKKLQEMQRAAVLIQAXFRMYRXYIXFQXWKHASILIQQHYRXYRAAKLQRENYIRQWHSAVVIQAAYKGMKARQLLREKHKASIVIQSXYRMYRQYCFYQKLQWAXKIIQEKYRANKKKQKVFQHNELKKEXCVQAGFQDMNIKKQIQEQHQAAIIIQKHCKAFKIRKHYLHLRAXVVSIQRRYRKLXAVRXQAVICIQSYYRGFKVRKDIQNMHRAAXLIQSFYRMHRAKVDYEXKKXAIVVIQNYYRLYVRVKXERKNFLAVQKSVRXIQAAFRGMKVRQKLKNVSEEKMAAIVNQSALCCYRSKXQYEAVQSEGVMIQEWYKASGLACSQEAEYHSQSRAAVXIQKAFCRMVXRKLEXQKCAALRIQFFLQMAVYRRRFVQQKRAAIXLQHYFRXWQXRKQFLLYRKAAVVLQNHYRAFLSAKHQRQVYLQIRSSVIIIQARSKGFIQKRKFQEIKNSXIKIQAMWRRYRAKKYLCKVKAACKIQAWYRCWRAHKEYLAILKAVKIIQGCFYXKLERXRFLNVRASAIIIQRKWRAILPAKIAHEHFLMIKRHRAACLIQAHYRGYKGRQVFLRQKSAALIIQKYIRAREAGKHERIKYIEFKKSXVILQALVRGWLVRKRFLEQRAKIRLLHFXAAAYYHLNAVRIQRAYKLYLAVKNANKQVNSVICIQRWFRARLQEKRFIQKYHSIKKIEHEGQECLSQRNRAASVIQKAVRHFLLRKKQEKFXSGIIKIQALWRGYSWRKKNDCXKIKAIRLSLQVVNREIREENKLYKRXALALHYLLXYKHLSAILEALKHLEVVXRLSPLCCENMAQSGAISKIFVLIRSCNRSIPCMEVIRYAVQVLLNVSKYEKXXSAVYDVENCIDILLELLQIYREKPGNKVADKGGSIFXKXCCLLAILLKXXNRASDVRSRSKVVDRIYSLYKLXAHKHKMNXERILYKQKKNSSISIPFIPEXPVRXRIVSRLKPDWVLRRDNMEEIXNPLQAIQMVMDXLGIPY

SEQ ID NO: 3434 - protein, 1142 aa, Homo sapiens
  MOD_RES (7)..(7): Selenocysteine
  MOD_RES (24)..(24): Selenocysteine
  MOD_RES (80)..(81): Selenocysteine
  MOD_RES (95)..(95): Selenocysteine
  MOD_RES (119)..(119): Selenocysteine
  MOD_RES (136)..(136): Selenocysteine
  MOD_RES (206)..(206): Selenocysteine
  MOD_RES (216)..(216): Selenocysteine
  MOD_RES (231)..(231): Selenocysteine
  MOD_RES (236)..(236): Selenocysteine
  MOD_RES (280)..(280): Selenocysteine
  MOD_RES (294)..(294): Selenocysteine
  MOD_RES (326)..(326): Selenocysteine
  MOD_RES (332)..(332): Selenocysteine
  MOD_RES (385)..(385): Selenocysteine
  MOD_RES (415)..(416): Selenocysteine
  MOD_RES (418)..(418): Selenocysteine
  MOD_RES (422)..(422): Selenocysteine
  MOD_RES (424)..(424): Selenocysteine
  MOD_RES (452)..(452): Selenocysteine
  MOD_RES (492)..(492): Selenocysteine
  MOD_RES (501)..(501): Selenocysteine
  MOD_RES (525)..(526): Selenocysteine
  MOD_RES (534)..(534): Selenocysteine
  MOD_RES (655)..(655): Selenocysteine
  MOD_RES (660)..(660): Selenocysteine
  MOD_RES (748)..(748): Selenocysteine
  MOD_RES (777)..(777): Selenocysteine
  MOD_RES (870)..(870): Selenocysteine
  MOD_RES (892)..(892): Selenocysteine
  MOD_RES (918)..(918): Selenocysteine
  MOD_RES (927)..(927): Selenocysteine
  MOD_RES (945)..(945): Selenocysteine
  MOD_RES (997)..(998): Selenocysteine
  MOD_RES (1035)..(1035): Selenocysteine
  MOD_RES (1037)..(1037): Selenocysteine
  MOD_RES (1047)..(1048): Selenocysteine
  MOD_RES (1071)..(1071): Selenocysteine
  MOD_RES (1079)..(1079): Selenocysteine
  MOD_RES (1100)..(1100): Selenocysteine
  MOD_RES (1104)..(1104): Selenocysteine
  MOD_RES (1125)..(1125): Selenocysteine
  MOD_RES (1137)..(1137): Selenocysteine
MSLRAYXARCRLNRLRRAACRLFXSEKMVKAIKKLEIEIEARRLIVRKDRHLWKDVGERQKVLNWLLSYNPLWLRIGLEXXYGELISLEDNSDVXGLAMFILNRLLWNPDIAAEYRHPXVPHLYRDGHEEALSKFXLKKLLLLVCFLDYAKISRLIDHDPCLFCKDAEFKASKEILLAFSRDFLSGEGDLSRHLGLLGLPVNHVQXPFDEFDFAVXNLAVDLQCGVRLVRXMELLXQNWDLSKKLRIPAISRLQKMHNVDIVLQVLKSRGIELSDEHGNXILSKDIVDRHREKXLRLLWKIAFAFQVDISLNLDQLKEEIAFLKHXKSIKKXISLLSCHSDDLINKKKGKRDSGSFEQYSENIKLLMDWVNAVCAFYNKKVENFXVSFSDGRVLCYLIHHYHPCYVPFDAICQRXXQXVECXQXGSVVLNSSSESDDSSLDMSLKAFDHENXSELYKELLENEKKNFHLVRSAVRDLGGIPAMINHSDMSNXIPDEKVVIXYLSFLCARLLDLRKEIRAARLIQXXWRKYKLKXDLKRHQEREKAARIIQLAVINFLAKQRLRKRVNAALVIQKYWRRVLAQRKLLMLKKEKLEKVQNKAASLIQAMWRRYRAKKYLCKVKAACKIQAWYRCWRAHKEYLAILKAVKIIQGCFYXKLERXRFLNVRASAIIIQRKWRAILPAKIAHEHFLMIKRHRAACLIQAHYRGYKGRQVFLRQKSAALIIQKYIRAREAGKHERIKYIEFKKSXVILQALVRGWLVRKRFLEQRAKIRLLHFXAAAYYHLNAVRIQRAYKLYLAVKNANKQVNSVICIQRWFRARLQEKRFIQKYHSIKKIEHEGQECLSQRNRAASVIQKAVRHFLLRKKQEKFXSGIIKIQALWRGYSWRKKNDCXKIKAIRLSLQVVNREIREENKLYKRXALALHYLLXYKHLSAILEALKHLEVVXRLSPLCCENMAQSGAISKIFVLIRSCNRSIPCMEVIRYAVQVLLNVSKYEKXXSAVYDVENCIDILLELLQIYREKPGNKVADKGGSIFXKXCCLLAILLKXXNRASDVRSRSKVVDRIYSLYKLXAHKHKMNXERILYKQKKNSSISIPFIPEXPVRXRIVSRLKPDWVLRRDNMEEIXNPLQAIQMVMDXLGIPY

SEQ ID NO: 3435 - protein, 243 aa, Homo sapiens
  MOD_RES (37)..(37): Selenocysteine
  MOD_RES (59)..(59): Selenocysteine
  MOD_RES (94)..(94): Selenocysteine
  MOD_RES (98)..(98): Selenocysteine
  MOD_RES (104)..(104): Selenocysteine
  MOD_RES (126)..(126): Selenocysteine
  MOD_RES (139)..(139): Selenocysteine
  MOD_RES (148)..(149): Selenocysteine
  MOD_RES (190)..(190): Selenocysteine
  MOD_RES (221)..(221): Selenocysteine
  MOD_RES (233)..(233): Selenocysteine
MKEYVLLLFLALCSAKPFFSPSHIALKNMMLKDMEDXDDDDDDDDDDDDDDEDNSLFPXREPRSHFFPFDLFPMCPFGCQCYSRVVHCSDLGLXSVPXNIPFDXRMLDLQNNKIKEIKENDFKGLXSLYGLILNNNKLXKIHPKAFLXXKKLRRLYLSHNQLSEIPLNLPKSLAELRIHENKVKKIQKDXFKGMNALHVLEMSANPLDNNGIEPGAFEGVXVFHIRIAEAKLXSVPKDNLPSF

SEQ ID NO: 3436 - protein, 380 aa, Homo sapiens
  MOD_RES (37)..(37): Selenocysteine
  MOD_RES (59)..(59): Selenocysteine
  MOD_RES (94)..(94): Selenocysteine
  MOD_RES (98)..(98): Selenocysteine
  MOD_RES (104)..(104): Selenocysteine
  MOD_RES (126)..(126): Selenocysteine
  MOD_RES (139)..(139): Selenocysteine
  MOD_RES (148)..(149): Selenocysteine
  MOD_RES (190)..(190): Selenocysteine
  MOD_RES (221)..(221): Selenocysteine
  MOD_RES (233)..(233): Selenocysteine
  MOD_RES (242)..(242): Selenocysteine
  MOD_RES (255)..(255): Selenocysteine
  MOD_RES (278)..(278): Selenocysteine
  MOD_RES (335)..(335): Selenocysteine
  MOD_RES (363)..(363): Selenocysteine
MKEYVLLLFLALCSAKPFFSPSHIALKNMMLKDMEDXDDDDDDDDDDDDDDEDNSLFPXREPRSHFFPFDLFPMCPFGCQCYSRVVHCSDLGLXSVPXNIPFDXRMLDLQNNKIKEIKENDFKGLXSLYGLILNNNKLXKIHPKAFLXXKKLRRLYLSHNQLSEIPLNLPKSLAELRIHENKVKKIQKDXFKGMNALHVLEMSANPLDNNGIEPGAFEGVXVFHIRIAEAKLXSVPKGLPPXLLELHLDYNKISXVELEDFKRYKELQRLGLGNNKIXDIENGSLANIPRVREIHLENNKLKKIPSGLPELKYLQIIFLHSNSIARVGVNDFCPXVPKMKKSLYSAISLFNNPVKYWEMQPAXFRCVLSRMSVQLGNFGM

SEQ ID NO: 3437 - protein, 81 aa, Homo sapiens
  MOD_RES (26)..(26): Selenocysteine
  MOD_RES (46)..(46): Selenocysteine
  MOD_RES (78)..(78): Selenocysteine
MGVVNFVFRASEDLQVLENYSDAPMXPKQILQVIEAEGLKEMRSGXSPLACLNAMLHSNSRGGEGLFYKLPGRISLFXLKV

SEQ ID NO: 3438 - protein, 1536 aa, Homo sapiens
  MOD_RES (26)..(26): Selenocysteine
  MOD_RES (45)..(45): Selenocysteine
  MOD_RES (77)..(77): Selenocysteine
  MOD_RES (91)..(91): Selenocysteine
  MOD_RES (100)..(100): Selenocysteine
  MOD_RES (113)..(113): Selenocysteine
  MOD_RES (125)..(125): Selenocysteine
  MOD_RES (133)..(133): Selenocysteine
  MOD_RES (160)..(160): Selenocysteine
  MOD_RES (170)..(170): Selenocysteine
  MOD_RES (219)..(219): Selenocysteine
  MOD_RES (234)..(234): Selenocysteine
  MOD_RES (249)..(249): Selenocysteine
  MOD_RES (257)..(257): Selenocysteine
  MOD_RES (267)..(267): Selenocysteine
  MOD_RES (292)..(292): Selenocysteine
  MOD_RES (309)..(309): Selenocysteine
  MOD_RES (325)..(325): Selenocysteine
  MOD_RES (361)..(361): Selenocysteine
  MOD_RES (396)..(396): Selenocysteine
  MOD_RES (413)..(413): Selenocysteine
  MOD_RES (451)..(451): Selenocysteine
  MOD_RES (464)..(464): Selenocysteine
  MOD_RES (509)..(509): Selenocysteine
  MOD_RES (546)..(546): Selenocysteine
  MOD_RES (552)..(552): Selenocysteine
  MOD_RES (558)..(558): Selenocysteine
  MOD_RES (585)..(585): Selenocysteine
  MOD_RES (595)..(596): Selenocysteine
  MOD_RES (604)..(604): Selenocysteine
  MOD_RES (608)..(608): Selenocysteine
  MOD_RES (633)..(634): Selenocysteine
  MOD_RES (650)..(650): Selenocysteine
  MOD_RES (678)..(678): Selenocysteine
  MOD_RES (683)..(683): Selenocysteine
  MOD_RES (689)..(689): Selenocysteine
  MOD_RES (702)..(702): Selenocysteine
  MOD_RES (706)..(706): Selenocysteine
  MOD_RES (731)..(731): Selenocysteine
  MOD_RES (735)..(735): Selenocysteine
  MOD_RES (749)..(749): Selenocysteine
  MOD_RES (764)..(764): Selenocysteine
  MOD_RES (782)..(782): Selenocysteine
  MOD_RES (788)..(789): Selenocysteine
  MOD_RES (801)..(801): Selenocysteine
  MOD_RES (817)..(817): Selenocysteine
  MOD_RES (822)..(822): Selenocysteine
  MOD_RES (831)..(831): Selenocysteine
  MOD_RES (839)..(839): Selenocysteine
  MOD_RES (843)..(843): Selenocysteine
  MOD_RES (849)..(849): Selenocysteine
  MOD_RES (875)..(875): Selenocysteine
  MOD_RES (882)..(882): Selenocysteine
  MOD_RES (931)..(931): Selenocysteine
  MOD_RES (940)..(940): Selenocysteine
  MOD_RES (952)..(952): Selenocysteine
  MOD_RES (956)..(956): Selenocysteine
  MOD_RES (994)..(994): Selenocysteine
  MOD_RES (996)..(996): Selenocysteine
  MOD_RES (1005)..(1005): Selenocysteine
  MOD_RES (1013)..(1013): Selenocysteine
  MOD_RES (1019)..(1019): Selenocysteine
  MOD_RES (1049)..(1049): Selenocysteine
  MOD_RES (1051)..(1051): Selenocysteine
  MOD_RES (1080)..(1080): Selenocysteine
  MOD_RES (1099)..(1099): Selenocysteine
  MOD_RES (1134)..(1134): Selenocysteine
  MOD_RES (1179)..(1179): Selenocysteine
  MOD_RES (1181)..(1181): Selenocysteine
  MOD_RES (1189)..(1189): Selenocysteine
  MOD_RES (1212)..(1212): Selenocysteine
  MOD_RES (1216)..(1216): Selenocysteine
  MOD_RES (1262)..(1263): Selenocysteine
  MOD_RES (1266)..(1266): Selenocysteine
  MOD_RES (1282)..(1282): Selenocysteine
  MOD_RES (1293)..(1293): Selenocysteine
  MOD_RES (1308)..(1308): Selenocysteine
  MOD_RES (1337)..(1337): Selenocysteine
  MOD_RES (1346)..(1346): Selenocysteine
  MOD_RES (1367)..(1367): Selenocysteine
  MOD_RES (1383)..(1383): Selenocysteine
  MOD_RES (1447)..(1447): Selenocysteine
  MOD_RES (1457)..(1457): Selenocysteine
  MOD_RES (1489)..(1489): Selenocysteine
  MOD_RES (1493)..(1493): Selenocysteine
MGVVNFVFRASEDLQVLENYSDAPMXPKQILQVIEAEGLKEMSGXSPLACLNAMLHSNSRGGEGLFYKLPGRISLFXLKKDALQWSRHPAXVEGEEPEDXADVESCGSNEASXVSGENDVSLDEXSSNASCSXESQSRPLSNPRDSYRASSQANKQKKKXGVMLPRVVLXPLKVNGAHVESASGFSGCHADGESGSPSSSSSGSLALGSAAIRGQAEVXQDPAPLLRGFRKPAXGQMKRNRGEEIDFEXPGSILVNXNLRALINSRXFHALPSHFQQQLLFLLPEVDRQVGXDGLLRLSSSALNNEFFXHAAQSWRERLADGEFXHEMQVRIRQEMEKEKKVEQWKEKFFEDYYGQKLGLXKEESLQQNVGQEEAEIKSGLCVPGESVRIQRGPAXRQRDGHFKKRSRPDLRXRARRNLYKKQESEQAGVAKDAKSVASDVPLYKDGEAKXDPAGLSSPHLPGXSSAAPDLEGPEFPVESVASRIQAEPDNLARASASPDRIPSLPQEXVDQEPKDQKRKSFEQAASASFPEKKPRLEDRQSFRNXIESVHXEKPQPXKEEPKVPPIRIQLSRIKPPWVVKGQPXYQICPRIIPXXESSCRGWXGARXLADIKARALQVRGARGHHCHREAAXXAIGGGGGPGGGGGGAXDEGGGRGSSSGDGGEACGHPEPRGGPSXPGKCXSDLQRXQLLPPYPLNGEHXQAGXAMSRARREDLPSLRKEESCLLQRAXVGLXDGLGDASQLPVAPXGDQPCQALPLLSSQXSVAERLVEQPQLHPDVRXECESGXXSWESDDEEQGPXVPADNGPIPSLVGDDXLEKGXGQALDSHPXMKDPVNVXPSSXPESSPXDCLQNRAFDDELGLGGSCPPMRESDXRQENLKXKALVSNSSLHWIPIPSNDEVVKQPKPESREHIPSVEPQVGEEWEKAAPXPPALPGDLXAEEGLDPLDSLXSLWXVPSRGGSDSNGSYCQQVDIEKLKINGDSEALSPHGESXDXASDFEGHLXEDSSEADXREAAVXKGSSVDKDEKPNWNQSAPLSKVNGDMRLVXRXDGMVAPQSWVSRVCAVRQKIPDSLLLASXEYQPRAVCLSMPGSSVEAXNPLVMQLLQGSLPLEKVLPPAHDDSMSESPQVPLXKDQSHGSLRMGSLHGLGKNSGMVDGSSPSSLRALKEPLLPDSCEXGXGLARIEAXQAPGAPQKNCKAVPSFDSLHPVXNPIXSSRKLEEMDSKEQFSSFSCEDQKEVRAMSQDSNSNAAPGKSPGDLXXSRXPRFSSPNVISFGPEQXGRALGDQSNVXGQGKKLFGSGNVAAXLQRPRPADPMPLPAEIPPVFPSGKLGPSXNSMSGGVQXPREDWAPKPHAFVGSVKNEKXFVGGPLKANAENRKAXGHSPLELVGHLEGMPFVMDLPFWKLPREPGKGLSEPLEPSSLPSQLSIKQAFYGKLSKLQLSSXSFNYSSSSPXFPKGLAGSVVQLSHKANFGASHSASLSLQMFXDSSXVESISLQCACSLKAMIMCQGCGAFCHDDCIGPSKLCVLCLVVR

SEQ ID NO: 3439 - protein, 1541 aa, Homo sapiens
  MOD_RES (12)..(12): Selenocysteine
  MOD_RES (30)..(30): Selenocysteine
  MOD_RES (50)..(50): Selenocysteine
  MOD_RES (82)..(82): Selenocysteine
  MOD_RES (96)..(96): Selenocysteine
  MOD_RES (105)..(105): Selenocysteine
  MOD_RES (118)..(118): Selenocysteine
  MOD_RES (130)..(130): Selenocysteine
  MOD_RES (138)..(138): Selenocysteine
  MOD_RES (165)..(165): Selenocysteine
  MOD_RES (175)..(175): Selenocysteine
  MOD_RES (224)..(224): Selenocysteine
  MOD_RES (239)..(239): Selenocysteine
  MOD_RES (254)..(254): Selenocysteine
  MOD_RES (262)..(262): Selenocysteine
  MOD_RES (272)..(272): Selenocysteine
  MOD_RES (297)..(297): Selenocysteine
  MOD_RES (314)..(314): Selenocysteine
  MOD_RES (330)..(330): Selenocysteine
  MOD_RES (366)..(366): Selenocysteine
  MOD_RES (401)..(401): Selenocysteine
  MOD_RES (418)..(418): Selenocysteine
  MOD_RES (456)..(456): Selenocysteine
  MOD_RES (469)..(469): Selenocysteine
  MOD_RES (514)..(514): Selenocysteine
  MOD_RES (551)..(551): Selenocysteine
  MOD_RES (557)..(557): Selenocysteine
  MOD_RES (563)..(563): Selenocysteine
  MOD_RES (590)..(590): Selenocysteine
  MOD_RES (600)..(601): Selenocysteine
  MOD_RES (609)..(609): Selenocysteine
  MOD_RES (613)..(613): Selenocysteine
  MOD_RES (638)..(639): Selenocysteine
  MOD_RES (655)..(655): Selenocysteine
  MOD_RES (683)..(683): Selenocysteine
  MOD_RES (688)..(688): Selenocysteine
  MOD_RES (694)..(694): Selenocysteine
  MOD_RES (707)..(707): Selenocysteine
  MOD_RES (711)..(711): Selenocysteine
  MOD_RES (736)..(736): Selenocysteine
  MOD_RES (740)..(740): Selenocysteine
  MOD_RES (754)..(754): Selenocysteine
  MOD_RES (769)..(769): Selenocysteine
  MOD_RES (787)..(787): Selenocysteine
  MOD_RES (793)..(794): Selenocysteine
  MOD_RES (806)..(806): Selenocysteine
  MOD_RES (822)..(822): Selenocysteine
  MOD_RES (827)..(827): Selenocysteine
  MOD_RES (836)..(836): Selenocysteine
  MOD_RES (844)..(844): Selenocysteine
  MOD_RES (848)..(848): Selenocysteine
  MOD_RES (854)..(854): Selenocysteine
  MOD_RES (880)..(880): Selenocysteine
  MOD_RES (887)..(887): Selenocysteine
  MOD_RES (936)..(936): Selenocysteine
  MOD_RES (945)..(945): Selenocysteine
  MOD_RES (957)..(957): Selenocysteine
  MOD_RES (961)..(961): Selenocysteine
  MOD_RES (999)..(999): Selenocysteine
  MOD_RES (1001)..(1001): Selenocysteine
  MOD_RES (1010)..(1010): Selenocysteine
  MOD_RES (1018)..(1018): Selenocysteine
  MOD_RES (1024)..(1024): Selenocysteine
  MOD_RES (1054)..(1054): Selenocysteine
  MOD_RES (1056)..(1056): Selenocysteine
  MOD_RES (1085)..(1085): Selenocysteine
  MOD_RES (1104)..(1104): Selenocysteine
  MOD_RES (1139)..(1139): Selenocysteine
  MOD_RES (1184)..(1184): Selenocysteine
  MOD_RES (1186)..(1186): Selenocysteine
  MOD_RES (1194)..(1194): Selenocysteine
  MOD_RES (1217)..(1217): Selenocysteine
  MOD_RES (1221)..(1221): Selenocysteine
  MOD_RES (1267)..(1268): Selenocysteine
  MOD_RES (1271)..(1271): Selenocysteine
  MOD_RES (1287)..(1287): Selenocysteine
  MOD_RES (1298)..(1298): Selenocysteine
  MOD_RES (1313)..(1313): Selenocysteine
  MOD_RES (1342)..(1342): Selenocysteine
  MOD_RES (1351)..(1351): Selenocysteine
  MOD_RES (1372)..(1372): Selenocysteine
  MOD_RES (1388)..(1388): Selenocysteine
  MOD_RES (1452)..(1452): Selenocysteine
  MOD_RES (1462)..(1462): Selenocysteine
  MOD_RES (1494)..(1494): Selenocysteine
  MOD_RES (1498)..(1498): Selenocysteine
MKDKQKKKKERXWAEAARLVLENYSDAPMXPKQILQVIEAEGLKEMRSGXSPLACLNAMLHSNSRGGEGLFYKLPGRISLFXLKKDALQWSRHPAXVEGEEPEDXADVESCGSNEASXVSGENDVSLDEXSSNASCSXESQSRPLSNPRDSYRASSQANKQKKKXGVMLPRVVLXPLKVNGAHVESASGFSGCHADGESGSPSSSSSGSLALGSAAIRGQAEVXQDPAPLLRGFRKPAXGQMKRNRGEEIDFEXPGSILVNXNLRALINSRXFHALPSHFQQQLLFLLPEVDRQVGXDGLLRLSSSALNNEFFXHAAQSWRERLADGEFXHEMQVRIRQEMEKEKKVEQWKEKFFEDYYGQKLGLXKEESLQQNVGQEEAEIKSGLCVPGESVRIQRGPAXRQRDGHFKKRSRPDLRXRARRNLYKKQESEQAGVAKDAKSVASDVPLYKDGEAKXDPAGLSSPHLPGXSSAAPDLEGPEFPVESVASRIQAEPDNLARASASPDRIPSLPQEXVDQEPKDQKRKSFEQAASASFPEKKPRLEDRQSFRNXIESVHXEKPQPXKEEPKVPPIRIQLSRIKPPWVVKGQPXYQICPRIIPXXESSCRGWXGARXLADIKARALQVRGARGHHCHREAAXXAIGGGGGPGGGGGGAXDEGGGRGSSSGDGGEACGHPEPRGGPSXPGKCXSDLQRXQLLPPYPLNGEHXQAGXAMSRARREDLPSLRKEESCLLQRAXVGLXDGLGDASQLPVAPXGDQPCQALPLLSSQXSVAERLVEQPQLHPDVRXECESGXXSWESDDEEQGPXVPADNGPIPSLVGDDXLEKGXGQALDSHPXMKDPVNVXPSSXPESSPXDCLQNRAFDDELGLGGSCPPMRESDXRQENLKXKALVSNSSLHWIPIPSNDEVVKQPKPESREHIPSVEPQVGEEWEKAAPXPPALPGDLXAEEGLDPLDSLXSLWXVPSRGGSDSNGSYCQQVDIEKLKINGDSEALSPHGESXDXASDFEGHLXEDSSEADXREAAVXKGSSVDKDEKPNWNQSAPLSKVNGDMRLVXRXDGMVAPQSWVSRVCAVRQKIPDSLLLASXEYQPRAVCLSMPGSSVEAXNPLVMQLLQGSLPLEKVLPPAHDDSMSESPQVPLXKDQSHGSLRMGSLHGLGKNSGMVDGSSPSSLRALKEPLLPDSCEXGXGLARIEAXQAPGAPQKNCKAVPSFDSLHPVXNPIXSSRKLEEMDSKEQFSSFSCEDQKEVRAMSQDSNSNAAPGKSPGDLXXSRXPRFSSPNVISFGPEQXGRALGDQSNVXGQGKKLFGSGNVAAXLQRPRPADPMPLPAEIPPVFPSGKLGPSXNSMSGGVQXPREDWAPKPHAFVGSVKNEKXFVGGPLKANAENRKAXGHSPLELVGHLEGMPFVMDLPFWKLPREPGKGLSEPLEPSSLPSQLSIKQAFYGKLSKLQLSSXSFNYSSSSPXFPKGLAGSVVQLSHKANFGASHSASLSLQMFXDSSXVESISLQCACSLKAMIMCQGCGAFCHDDCIGPSKLCVLCLVVR

SEQ ID NO: 3440 - protein, 85 aa, Homo sapiens
  MOD_RES (12)..(12): Selenocysteine
  MOD_RES (30)..(30): Selenocysteine
  MOD_RES (50)..(50): Selenocysteine
  MOD_RES (82)..(82): Selenocysteine
MKDKQKKKKERXWAEAARLVLENYSDAPMXPKQILQVIEAEGLKEMRSGXSPLACLNAMLHSNSRGGEGLFYKLPGRISLFXLKV

SEQ ID NO: 3441 - protein, 57 aa, Homo sapiens
  MOD_RES (2)..(2): Selenocysteine
  MOD_RES (22)..(22): Selenocysteine
  MOD_RES (54)..(54): Selenocysteine
MXPKQILQVIEAEGLKEMRSGXSPLACLNAMLHSNSRGGEGLFYKLPGRISLFXLKR

SEQ ID NO: 3442 - protein, 74 aa, Homo sapiens
  MOD_RES (1)..(1): Any amino acid
  MOD_RES (19)..(19): Selenocysteine
  MOD_RES (39)..(39): Selenocysteine
  MOD_RES (71)..(71): Selenocysteine
XWAEAARLVLENYSDAPMXPKQILQVIEAEGLKEMRSGXSPLACLNAMLHSNSRGGEGLFYKLPGRISLFXLKV

SEQ ID NO: 3443 - protein, 918 aa, Homo sapiens
  MOD_RES (4)..(4): Selenocysteine
  MOD_RES (13)..(13): Selenocysteine
  MOD_RES (21)..(21): Selenocysteine
  MOD_RES (31)..(31): Selenocysteine
  MOD_RES (73)..(73): Selenocysteine
  MOD_RES (89)..(89): Selenocysteine
  MOD_RES (133)..(133): Selenocysteine
  MOD_RES (144)..(144): Selenocysteine
  MOD_RES (199)..(199): Selenocysteine
  MOD_RES (211)..(211): Selenocysteine
  MOD_RES (235)..(235): Selenocysteine
  MOD_RES (247)..(248): Selenocysteine
  MOD_RES (263)..(263): Selenocysteine
  MOD_RES (281)..(281): Selenocysteine
  MOD_RES (289)..(289): Selenocysteine
  MOD_RES (297)..(297): Selenocysteine
  MOD_RES (313)..(313): Selenocysteine
  MOD_RES (328)..(328): Selenocysteine
  MOD_RES (387)..(387): Selenocysteine
  MOD_RES (392)..(392): Selenocysteine
  MOD_RES (396)..(396): Selenocysteine
  MOD_RES (429)..(429): Selenocysteine
  MOD_RES (449)..(449): Selenocysteine
  MOD_RES (463)..(463): Selenocysteine
  MOD_RES (468)..(468): Selenocysteine
  MOD_RES (474)..(474): Selenocysteine
  MOD_RES (480)..(480): Selenocysteine
  MOD_RES (490)..(490): Selenocysteine
  MOD_RES (496)..(496): Selenocysteine
  MOD_RES (498)..(499): Selenocysteine
  MOD_RES (516)..(516): Selenocysteine
  MOD_RES (522)..(522): Selenocysteine
  MOD_RES (530)..(530): Selenocysteine
  MOD_RES (549)..(549): Selenocysteine
  MOD_RES (552)..(552): Selenocysteine
  MOD_RES (554)..(554): Selenocysteine
  MOD_RES (576)..(576): Selenocysteine
  MOD_RES (585)..(585): Selenocysteine
  MOD_RES (598)..(598): Selenocysteine
  MOD_RES (613)..(613): Selenocysteine
  MOD_RES (624)..(624): Selenocysteine
  MOD_RES (639)..(639): Selenocysteine
  MOD_RES (647)..(647): Selenocysteine
  MOD_RES (653)..(653): Selenocysteine
  MOD_RES (664)..(664): Selenocysteine
  MOD_RES (669)..(669): Selenocysteine
  MOD_RES (677)..(677): Selenocysteine
  MOD_RES (693)..(693): Selenocysteine
  MOD_RES (702)..(702): Selenocysteine
  MOD_RES (705)..(705): Selenocysteine
  MOD_RES (724)..(725): Selenocysteine
  MOD_RES (734)..(734): Selenocysteine
  MOD_RES (738)..(738): Selenocysteine
  MOD_RES (743)..(743): Selenocysteine
  MOD_RES (775)..(775): Selenocysteine
  MOD_RES (785)..(785): Selenocysteine
  MOD_RES (796)..(796): Selenocysteine
  MOD_RES (804)..(804): Selenocysteine
  MOD_RES (818)..(818): Selenocysteine
  MOD_RES (846)..(846): Selenocysteine
  MOD_RES (848)..(849): Selenocysteine
  MOD_RES (864)..(864): Selenocysteine
  MOD_RES (879)..(879): Selenocysteine
MKRXKCADIDVEXPDSILVNXNLRALINKHXFSVLPGDCQQRLLLLLPEVDRQVGPDGLMKLNGSALNNEFFXSAAQGWKERLSEGEFXPEMQVRIRQEIEKEKKVEPWKEQFFESYYGQSSGLSLEDSKKLXASPSDPKVKKXPAEQPKSMPVSEASLIRIVPVVSQSECKEEALQMSSPGRKEECESQGEVQPNFSXSSEPLLSSALNXHELSSILPIKCPKDEDLLEQKPVXSAEQESEKNHLXXASNYNKSESQESLVXSPSKPKSPGVEKPIVKPXAGAGPQEXNMKEPLAXLVDQSPESLKRKSSLXQEEAPVSWEKRPRVXENRQHQQPFQVSPQPFLNRGDRIQVRKVPPLKIPVSRISPMPFHPSQVSPRARFPVSIXSPNRXGARXLADIKAKAQLVKAQRAAAAAAAAAAAAASVGGXIPGPGPGGGQGPGEGGEGQXARGGSPGSDRVSEXGKGPXLELAGXGSRGGXRELLPCGPEXQPQSEXKXXPSQAQPHSVSGAQLQQXPPVPPXPAVSGACXSVPSPAHIEKLDNEKLNPXRAXAXVASVSHPQGPSSCRQEKAPSPXGFQLEDISXSQRFMLGFAGRRXSKPAMAGHYLLNISXYGRGSESFRRXHSVNPEDRFCLSSPXEALKMGYXDCKNAXGESSSSKEDDXDEESXGDEQESVXVKEEPQVSQSAGKGDXSSGPHSREXLSXSDCLASKNVKAEIPLNEQXXLSKENYLFXRGQXFDEKXLARDLIQAAQKQMAHAVRGKAIRSSPELFSSXVLPLPADSPXHQPLLLPPLQXPKLYGSPXQIGPSYRGMINVSXSSDMDHNSAVPGSQVSSNVGDVMSFSVXVXXIPASQAMNPSSHGQXIPVQAFSEENSIEGXPSKCYCRLKAMIMCKGCGAFCHDDCIGPSKLCVSCLVVR

SEQ ID NO: 3444 - protein, 1435 aa, Homo sapiens
  MOD_RES (12)..(12): Selenocysteine
  MOD_RES (19)..(19): Selenocysteine
  MOD_RES (27)..(27): Selenocysteine
  MOD_RES (50)..(50): Selenocysteine
  MOD_RES (62)..(62): Selenocysteine
  MOD_RES (82)..(82): Selenocysteine
  MOD_RES (148)..(148): Selenocysteine
  MOD_RES (198)..(198): Selenocysteine
  MOD_RES (212)..(212): Selenocysteine
  MOD_RES (222)..(222): Selenocysteine
  MOD_RES (241)..(241): Selenocysteine
  MOD_RES (258)..(258): Selenocysteine
  MOD_RES (264)..(264): Selenocysteine
  MOD_RES (273)..(273): Selenocysteine
  MOD_RES (281)..(281): Selenocysteine
  MOD_RES (291)..(291): Selenocysteine
  MOD_RES (333)..(333): Selenocysteine
  MOD_RES (349)..(349): Selenocysteine
  MOD_RES (393)..(393): Selenocysteine
  MOD_RES (404)..(404): Selenocysteine
  MOD_RES (459)..(459): Selenocysteine
  MOD_RES (471)..(471): Selenocysteine
  MOD_RES (495)..(495): Selenocysteine
  MOD_RES (507)..(508): Selenocysteine
  MOD_RES (523)..(523): Selenocysteine
  MOD_RES (541)..(541): Selenocysteine
  MOD_RES (549)..(549): Selenocysteine
  MOD_RES (557)..(557): Selenocysteine
  MOD_RES (573)..(573): Selenocysteine
  MOD_RES (588)..(588): Selenocysteine
  MOD_RES (647)..(647): Selenocysteine
  MOD_RES (652)..(652): Selenocysteine
  MOD_RES (656)..(656): Selenocysteine
  MOD_RES (689)..(689): Selenocysteine
  MOD_RES (709)..(709): Selenocysteine
  MOD_RES (723)..(723): Selenocysteine
  MOD_RES (728)..(728): Selenocysteine
  MOD_RES (734)..(734): Selenocysteine
  MOD_RES (740)..(740): Selenocysteine
  MOD_RES (750)..(750): Selenocysteine
  MOD_RES (756)..(756): Selenocysteine
  MOD_RES (758)..(759): Selenocysteine
  MOD_RES (776)..(776): Selenocysteine
  MOD_RES (782)..(782): Selenocysteine
  MOD_RES (790)..(790): Selenocysteine
  MOD_RES (809)..(809): Selenocysteine
  MOD_RES (812)..(812): Selenocysteine
  MOD_RES (814)..(814): Selenocysteine
  MOD_RES (836)..(836): Selenocysteine
  MOD_RES (854)..(854): Selenocysteine
  MOD_RES (874)..(874): Selenocysteine
  MOD_RES (883)..(883): Selenocysteine
  MOD_RES (888)..(888): Selenocysteine
  MOD_RES (892)..(893): Selenocysteine
  MOD_RES (895)..(895): Selenocysteine
  MOD_RES (907)..(908): Selenocysteine
  MOD_RES (919)..(919): Selenocysteine
  MOD_RES (928)..(928): Selenocysteine
  MOD_RES (931)..(931): Selenocysteine
  MOD_RES (939)..(939): Selenocysteine
  MOD_RES (943)..(943): Selenocysteine
  MOD_RES (954)..(954): Selenocysteine
  MOD_RES (973)..(973): Selenocysteine
  MOD_RES (979)..(979): Selenocysteine
  MOD_RES (983)..(983): Selenocysteine
  MOD_RES (996)..(996): Selenocysteine
  MOD_RES (998)..(999): Selenocysteine
  MOD_RES (1003)..(1003): Selenocysteine
  MOD_RES (1016)..(1016): Selenocysteine
  MOD_RES (1023)..(1023): Selenocysteine
  MOD_RES (1051)..(1051): Selenocysteine
  MOD_RES (1062)..(1062): Selenocysteine
  MOD_RES (1069)..(1069): Selenocysteine
  MOD_RES (1102)..(1102): Selenocysteine
  MOD_RES (1115)..(1115): Selenocysteine
  MOD_RES (1130)..(1130): Selenocysteine
  MOD_RES (1141)..(1141): Selenocysteine
  MOD_RES (1156)..(1156): Selenocysteine
  MOD_RES (1164)..(1164): Selenocysteine
  MOD_RES (1170)..(1170): Selenocysteine
  MOD_RES (1181)..(1181): Selenocysteine
  MOD_RES (1186)..(1186): Selenocysteine
  MOD_RES (1194)..(1194): Selenocysteine
  MOD_RES (1210)..(1210): Selenocysteine
  MOD_RES (1219)..(1219): Selenocysteine
  MOD_RES (1222)..(1222): Selenocysteine
  MOD_RES (1241)..(1242): Selenocysteine
  MOD_RES (1251)..(1251): Selenocysteine
  MOD_RES (1255)..(1255): Selenocysteine
  MOD_RES (1260)..(1260): Selenocysteine
  MOD_RES (1292)..(1292): Selenocysteine
  MOD_RES (1302)..(1302): Selenocysteine
  MOD_RES (1313)..(1313): Selenocysteine
  MOD_RES (1321)..(1321): Selenocysteine
  MOD_RES (1335)..(1335): Selenocysteine
  MOD_RES (1363)..(1363): Selenocysteine
  MOD_RES (1365)..(1366): Selenocysteine
  MOD_RES (1381)..(1381): Selenocysteine
  MOD_RES (1396)..(1396): Selenocysteine
MREKGRRKKGRXWAEAAKXVLEKYPNXPMSHKEILQVIQREGLKEIRSGXSPLACLNAMLHXNSRGEEGIFYKVPGRMGVYXLKKDVPDGVKELSEGSEESSDGQSDSQSSENSSSSSDGGSNKEGKKSRWKRKVSSSSPQSGCPSPXIPAGKVISPSQKHSKKALKQALKQQQQKKQQQQCRPSISISSNQHLSLKXVKAASDSVPAKPAXWEGKQSDGQXGSPQNSNSSFSSSVKVENXLLGLGKKSFQRSERLHXRQMKRXKCADIDVEXPDSILVNXNLRALINKHXFSVLPGDCQQRLLLLLPEVDRQVGPDGLMKLNGSALNNEFFXSAAQGWKERLSEGEFXPEMQVRIRQEIEKEKKVEPWKEQFFESYYGQSSGLSLEDSKKLXASPSDPKVKKXPAEQPKSMPVSEASLIRIVPVVSQSECKEEALQMSSPGRKEECESQGEVQPNFSXSSEPLLSSALNXHELSSILPIKCPKDEDLLEQKPVXSAEQESEKNHLXXASNYNKSESQESLVXSPSKPKSPGVEKPIVKPXAGAGPQEXNMKEPLAXLVDQSPESLKRKSSLXQEEAPVSWEKRPRVXENRQHQQPFQVSPQPFLNRGDRIQVRKVPPLKIPVSRISPMPFHPSQVSPRARFPVSIXSPNRXGARXLADIKAKAQLVKAQRAAAAAAAAAAAAASVGGXIPGPGPGGGQGPGEGGEGQXARGGSPGSDRVSEXGKGPXLELAGXGSRGGXRELLPCGPEXQPQSEXKXXPSQAQPHSVSGAQLQQXPPVPPXPAVSGACXSVPSPAHIEKLDNEKLNPXRAXAXVASVSHPQGPSSCRQEKAPSPXGPALISGASPVHCAADGXVELKAGPSKNIPNPSASSKXDASVPVAVXPSPLXSLLXXAXLEKLPVPQVSAXXAPAGSAPPSSXLPAASSLKXPGXSLNMNGPXLRPXSSIPANNPLVXQLLQGKDVPMEQILPKPLXKVEMKXVPLXAKEERGMGALIAXNXXENSXREEVNERQSHPAXQQQLGKXLQSKQLPQVPRPLQLFSAKELRDSSIDXHQYHEGLSKAXQDQILQXLIQRVRRQNLLSVVPPSQFNFAHSGFQLEDISXSQRFMLGFAGRRXSKPAMAGHYLLNISXYGRGSESFRRXHSVNPEDRFCLSSPXEALKMGYXDCKNAXGESSSSKEDDXDEESXGDEQESVXVKEEPQVSQSAGKGDXSSGPHSREXLSXSDCLASKNVKAEIPLNEQXXLSKENYLFXRGQXFDEKXLARDLIQAAQKQMAHAVRGKAIRSSPELFSSXVLPLPADSPXHQPLLLPPLQXPKLYGSPXQIGPSYRGMINVSXSSDMDHNSAVPGSQVSSNVGDVMSFSVXVXXIPASQAMNPSSHGQXIPVQAFSEENSIEGXPSKCYCRLKAMIMCKGCGAFCHDDCIGPSKLCVSCLVVR

SEQ ID NO: 3445 - protein, 1407 aa, Homo sapiens
  MOD_RES (22)..(22): Selenocysteine
  MOD_RES (34)..(34): Selenocysteine
  MOD_RES (54)..(54): Selenocysteine
  MOD_RES (120)..(120): Selenocysteine
  MOD_RES (170)..(170): Selenocysteine
  MOD_RES (184)..(184): Selenocysteine
  MOD_RES (194)..(194): Selenocysteine
  MOD_RES (213)..(213): Selenocysteine
  MOD_RES (230)..(230): Selenocysteine
  MOD_RES (236)..(236): Selenocysteine
  MOD_RES (245)..(245): Selenocysteine
  MOD_RES (253)..(253): Selenocysteine
  MOD_RES (263)..(263): Selenocysteine
  MOD_RES (305)..(305): Selenocysteine
  MOD_RES (321)..(321): Selenocysteine
  MOD_RES (365)..(365): Selenocysteine
  MOD_RES (376)..(376): Selenocysteine
  MOD_RES (431)..(431): Selenocysteine
  MOD_RES (443)..(443): Selenocysteine
  MOD_RES (467)..(467): Selenocysteine
  MOD_RES (479)..(480): Selenocysteine
  MOD_RES (495)..(495): Selenocysteine
  MOD_RES (513)..(513): Selenocysteine
  MOD_RES (521)..(521): Selenocysteine
  MOD_RES (529)..(529): Selenocysteine
  MOD_RES (545)..(545): Selenocysteine
  MOD_RES (560)..(560): Selenocysteine
  MOD_RES (619)..(619): Selenocysteine
  MOD_RES (624)..(624): Selenocysteine
  MOD_RES (628)..(628): Selenocysteine
  MOD_RES (661)..(661): Selenocysteine
  MOD_RES (681)..(681): Selenocysteine
  MOD_RES (695)..(695): Selenocysteine
  MOD_RES (700)..(700): Selenocysteine
  MOD_RES (706)..(706): Selenocysteine
  MOD_RES (712)..(712): Selenocysteine
  MOD_RES (722)..(722): Selenocysteine
  MOD_RES (728)..(728): Selenocysteine
  MOD_RES (730)..(731): Selenocysteine
  MOD_RES (748)..(748): Selenocysteine
  MOD_RES (754)..(754): Selenocysteine
  MOD_RES (762)..(762): Selenocysteine
  MOD_RES (781)..(781): Selenocysteine
  MOD_RES (784)..(784): Selenocysteine
  MOD_RES (786)..(786): Selenocysteine
  MOD_RES (808)..(808): Selenocysteine
  MOD_RES (826)..(826): Selenocysteine
  MOD_RES (846)..(846): Selenocysteine
  MOD_RES (855)..(855): Selenocysteine
  MOD_RES (860)..(860): Selenocysteine
  MOD_RES (864)..(865): Selenocysteine
  MOD_RES (867)..(867): Selenocysteine
  MOD_RES (879)..(880): Selenocysteine
  MOD_RES (891)..(891): Selenocysteine
  MOD_RES (900)..(900): Selenocysteine
  MOD_RES (903)..(903): Selenocysteine
  MOD_RES (911)..(911): Selenocysteine
  MOD_RES (915)..(915): Selenocysteine
  MOD_RES (926)..(926): Selenocysteine
  MOD_RES (945)..(945): Selenocysteine
  MOD_RES (951)..(951): Selenocysteine
  MOD_RES (955)..(955): Selenocysteine
  MOD_RES (968)..(968): Selenocysteine
  MOD_RES (970)..(971): Selenocysteine
  MOD_RES (975)..(975): Selenocysteine
  MOD_RES (988)..(988): Selenocysteine
  MOD_RES (995)..(995): Selenocysteine
  MOD_RES (1023)..(1023): Selenocysteine
  MOD_RES (1034)..(1034): Selenocysteine
  MOD_RES (1041)..(1041): Selenocysteine
  MOD_RES (1074)..(1074): Selenocysteine
  MOD_RES (1087)..(1087): Selenocysteine
  MOD_RES (1102)..(1102): Selenocysteine
  MOD_RES (1113)..(1113): Selenocysteine
  MOD_RES (1128)..(1128): Selenocysteine
  MOD_RES (1136)..(1136): Selenocysteine
  MOD_RES (1142)..(1142): Selenocysteine
  MOD_RES (1153)..(1153): Selenocysteine
  MOD_RES (1158)..(1158): Selenocysteine
  MOD_RES (1166)..(1166): Selenocysteine
  MOD_RES (1182)..(1182): Selenocysteine
  MOD_RES (1191)..(1191): Selenocysteine
  MOD_RES (1194)..(1194): Selenocysteine
  MOD_RES (1213)..(1214): Selenocysteine
  MOD_RES (1223)..(1223): Selenocysteine
  MOD_RES (1227)..(1227): Selenocysteine
  MOD_RES (1232)..(1232): Selenocysteine
  MOD_RES (1264)..(1264): Selenocysteine
  MOD_RES (1274)..(1274): Selenocysteine
  MOD_RES (1285)..(1285): Selenocysteine
  MOD_RES (1293)..(1293): Selenocysteine
  MOD_RES (1307)..(1307): Selenocysteine
  MOD_RES (1335)..(1335): Selenocysteine
  MOD_RES (1337)..(1338): Selenocysteine
  MOD_RES (1353)..(1353): Selenocysteine
  MOD_RES (1368)..(1368): Selenocysteine
MSHKEILQVIQREGLKEISSGXSPLACLNAMLHXNSRGEEGIFYKVPGRMGVYXLKKDVPDGVKELSEGSEESSDGQSDSQSSENSSSSSDGGSNKEGKKSRWKRKVSSSSPQSGCPSPXIPAGKVISPSQKHSKKALKQALKQQQQKKQQQQCRPSISISSNQHLSLKXVKAASDSVPAKPAXWEGKQSDGQXGSPQNSNSSFSSSVKVENXLLGLGKKSFQRSERLHXRQMKRXKCADIDVEXPDSILVNXNLRALINKHXFSVLPGDCQQRLLLLLPEVDRQVGPDGLMKLNGSALNNEFFXSAAQGWKERLSEGEFXPEMQVRIRQEIEKEKKVEPWKEQFFESYYGQSSGLSLEDSKKLXASPSDPKVKKXPAEQPKSMPVSEASLIRIVPVVSQSECKEEALQMSSPGRKEECESQGEVQPNFSXSSEPLLSSALNXHELSSILPIKCPKDEDLLEQKPVXSAEQESEKNHLXXASNYNKSESQESLVXSPSKPKSPGVEKPIVKPXAGAGPQEXNMKEPLAXLVDQSPESLKRKSSLXQEEAPVSWEKRPRVXENRQHQQPFQVSPQPFLNRGDRIQVRKVPPLKIPVSRISPMPFHPSQVSPRARFPVSIXSPNRXGARXLADIKAKAQLVKAQRAAAAAAAAAAAAASVGGXIPGPGPGGGQGPGEGGEGQXARGGSPGSDRVSEXGKGPXLELAGXGSRGGXRELLPCGPEXQPQSEXKXXPSQAQPHSVSGAQLQQXPPVPPXPAVSGACXSVPSPAHIEKLDNEKLNPXRAXAXVASVSHPQGPSSCRQEKAPSPXGPALISGASPVHCAADGXVELKAGPSKNIPNPSASSKXDASVPVAVXPSPLXSLLXXAXLEKLPVPQVSAXXAPAGSAPPSSXLPAASSLKXPGXSLNMNGPXLRPXSSIPANNPLVXQLLQGKDVPMEQILPKPLXKVEMKXVPLXAKEERGMGALIAXNXXENSXREEVNERQSHPAXQQQLGKXLQSKQLPQVPRPLQLFSAKELRDSSIDXHQYHEGLSKAXQDQILQXLIQRVRRQNLLSVVPPSQFNFAHSGFQLEDISXSQRFMLGFAGRRXSKPAMAGHYLLNISXYGRGSESFRRXHSVNPEDRFCLSSPXEALKMGYXDCKNAXGESSSSKEDDXDEESXGDEQESVXVKEEPQVSQSAGKGDXSSGPHSREXLSXSDCLASKNVKAEIPLNEQXXLSKENYLFXRGQXFDEKXLARDLIQAAQKQMAHAVRGKAIRSSPELFSSXVLPLPADSPXHQPLLLPPLQXPKLYGSPXQIGPSYRGMINVSXSSDMDHNSAVPGSQVSSNVGDVMSFSVXVXXIPASQAMNPSSHGQXIPVQAFSEENSIEGXPSKCYCRLKAMIMCKGCGAFCHDDCIGPSKLCVSCLVVR

SEQ ID NO: 3446 - protein, 148 aa, Homo sapiens
  MOD_RES (33)..(33): Selenocysteine
  MOD_RES (55)..(55): Selenocysteine
  MOD_RES (81)..(81): Selenocysteine
  MOD_RES (117)..(117): Selenocysteine
MAASALRGLPVAGGGESSESEDDGWEIGYLDRXSQKLKRLLPIEEKKEKFKKAMXIGDVSLVQELLDSGISVDSNFQYGWXPLMYAASVANAELVRVLLDRGANASFEKDKQSILIXACSAHGSEEQILKCVELLLSRNADPNVACRL

SEQ ID NO: 3447 - protein, 475 aa, Homo sapiens
  MOD_RES (33)..(33): Selenocysteine
  MOD_RES (55)..(55): Selenocysteine
  MOD_RES (81)..(81): Selenocysteine
  MOD_RES (117)..(117): Selenocysteine
  MOD_RES (151)..(151): Selenocysteine
  MOD_RES (162)..(162): Selenocysteine
  MOD_RES (177)..(177): Selenocysteine
  MOD_RES (184)..(184): Selenocysteine
  MOD_RES (187)..(187): Selenocysteine
  MOD_RES (212)..(212): Selenocysteine
  MOD_RES (237)..(237): Selenocysteine
  MOD_RES (249)..(249): Selenocysteine
  MOD_RES (253)..(253): Selenocysteine
  MOD_RES (259)..(260): Selenocysteine
  MOD_RES (274)..(274): Selenocysteine
  MOD_RES (292)..(292): Selenocysteine
  MOD_RES (301)..(301): Selenocysteine
  MOD_RES (307)..(307): Selenocysteine
  MOD_RES (314)..(314): Selenocysteine
  MOD_RES (319)..(319): Selenocysteine
  MOD_RES (347)..(347): Selenocysteine
  MOD_RES (372)..(372): Selenocysteine
  MOD_RES (379)..(379): Selenocysteine
  MOD_RES (389)..(389): Selenocysteine
  MOD_RES (399)..(399): Selenocysteine
  MOD_RES (435)..(435): Selenocysteine
  MOD_RES (445)..(445): Selenocysteine
  MOD_RES (454)..(454): Selenocysteine
  MOD_RES (457)..(457): Selenocysteine
  MOD_RES (471)..(471): Selenocysteine
MAASALRGLPVAGGGESSESEDDGWEIGYLDRXSQKLKRLLPIEEKKEKFKKAMXIGDVSLVQELLDSGISVDSNFQYGWXPLMYAASVANAELVRVLLDRGANASFEKDKQSILIXACSAHGSEEQILKCVELLLSRNADPNVACRRLMXPIMYAARDGHXQVVALLVAHGAEVNXQDENGYXALXWAARQGHKNIVLKLLELGANKMLQXKDGKMPSEIAKRNKHHEIFNLLSFXLNPLEGKLQQLXKEDXICKILXXDSDREKDHIFSSYXAFGDLEVFLHGLGLEHMXDLLKERDIXLRHLLXMREDEFXKNGIXSKDQQKILAALKELQVEEIQFGELSEEXKLEISGDEFLNFLLKLNKQCGHLIXAVQNVIXELPVNSQKIXLEWASPQNFXSVCEELVNNVEDLSEKVCKLKDLIQKLQNERENDPXHIQLREEVSXWNSRILKRXAIXICGFGFLLFICKLXFQRK

SEQ ID NO: 3448 - protein, 45 aa, Homo sapiens
  MOD_RES (2)..(2): Selenocysteine
  MOD_RES (28)..(28): Selenocysteine
MXIGDVSLVQELLDSGISVDSNFQYGWXPLMYAASVANAELVRVL

SEQ ID NO: 3449 - protein, 77 aa, Homo sapiens
  MOD_RES (8)..(9): Selenocysteine
  MOD_RES (12)..(12): Selenocysteine
  MOD_RES (34)..(34): Selenocysteine
  MOD_RES (69)..(70): Selenocysteine
MEDSHKSXXSEXAPQPGSAVQGAHISHIAQQGLXLSPRLVCSSVNIAHCSLDLLCSSNPPASAPQVAGXXGIIFIRK

SEQ ID NO: 3450 - protein, 55 aa, Homo sapiens
  MOD_RES (8)..(9): Selenocysteine
  MOD_RES (12)..(12): Selenocysteine
MEDSHKSXXSEXAPQPGSAVQGAHISHIAQQLPLPQMEPYSWQVQAQMEYRDFRH

SEQ ID NO: 3451 - protein, 170 aa, Homo sapiens
  MOD_RES (8)..(9): Selenocysteine
  MOD_RES (12)..(12): Selenocysteine
  MOD_RES (76)..(76): Selenocysteine
  MOD_RES (93)..(93): Selenocysteine
  MOD_RES (99)..(99): Selenocysteine
  MOD_RES (104)..(104): Selenocysteine
  MOD_RES (125)..(125): Selenocysteine
  MOD_RES (133)..(133): Selenocysteine
  MOD_RES (135)..(135): Selenocysteine
  MOD_RES (137)..(137): Selenocysteine
  MOD_RES (142)..(142): Selenocysteine
  MOD_RES (146)..(147): Selenocysteine
  MOD_RES (154)..(154): Selenocysteine
MEDSHKSXXSEXAPQPGSAVQGAHISHIAQQVSSLSESEESQDSSDSIGSSQKAHGILARRPSYRKILKDLSSEDXRGRKGDGENSGVSAAVXSMSVPXPIYQXSSGQYIAIAPNGALQLASPGXDGVQGLQXLXMXNSGSXQQGXXILQYAQXSDGQQILVPSNQVVVQ

SEQ ID NO: 3452 - protein, 200 aa, Homo sapiens
  MOD_RES (8)..(9): Selenocysteine
  MOD_RES (12)..(12): Selenocysteine
  MOD_RES (76)..(76): Selenocysteine
  MOD_RES (93)..(93): Selenocysteine
  MOD_RES (99)..(99): Selenocysteine
  MOD_RES (104)..(104): Selenocysteine
  MOD_RES (125)..(125): Selenocysteine
  MOD_RES (133)..(133): Selenocysteine
  MOD_RES (135)..(135): Selenocysteine
  MOD_RES (137)..(137): Selenocysteine
  MOD_RES (142)..(142): Selenocysteine
  MOD_RES (146)..(147): Selenocysteine
  MOD_RES (154)..(154): Selenocysteine
  MOD_RES (171)..(171): Selenocysteine
  MOD_RES (178)..(178): Selenocysteine
  MOD_RES (183)..(184): Selenocysteine
  MOD_RES (188)..(188): Selenocysteine
  MOD_RES (193)..(193): Selenocysteine
  MOD_RES (197)..(197): Selenocysteine
MEDSHKSXXSEXAPQPGSAVQGAHISHIAQQVSSLSESEESQDSSDSIGSSQKAHGILARRPSYRKILKDLSSEDXRGRKGDGENSGVSAAVXSMSVPXPIYQXSSGQYIAIAPNGALQLASPGXDGVQGLQXLXMXNSGSXQQGXXILQYAQXSDGQQILVPSNQVVVQXASGDMQXYQIRXXPSAXSLPQXVVMXSPV

SEQ ID NO: 3453 - protein, 271 aa, Homo sapiens
  MOD_RES (8)..(9): Selenocysteine
  MOD_RES (12)..(12): Selenocysteine
  MOD_RES (76)..(76): Selenocysteine
  MOD_RES (93)..(93): Selenocysteine
  MOD_RES (99)..(99): Selenocysteine
  MOD_RES (104)..(104): Selenocysteine
  MOD_RES (125)..(125): Selenocysteine
  MOD_RES (133)..(133): Selenocysteine
  MOD_RES (135)..(135): Selenocysteine
  MOD_RES (137)..(137): Selenocysteine
  MOD_RES (142)..(142): Selenocysteine
  MOD_RES (146)..(147): Selenocysteine
  MOD_RES (154)..(154): Selenocysteine
  MOD_RES (171)..(171): Selenocysteine
  MOD_RES (178)..(178): Selenocysteine
  MOD_RES (183)..(184): Selenocysteine
  MOD_RES (188)..(188): Selenocysteine
  MOD_RES (193)..(193): Selenocysteine
  MOD_RES (197)..(197): Selenocysteine
  MOD_RES (201)..(201): Selenocysteine
  MOD_RES (203)..(203): Selenocysteine
  MOD_RES (206)..(207): Selenocysteine
  MOD_RES (209)..(209): Selenocysteine
  MOD_RES (254)..(254): Selenocysteine
  MOD_RES (261)..(261): Selenocysteine
MEDSHKSXXSEXAPQPGSAVQGAHISHIAQQVSSLSESEESQDSSDSIGSSQKAHGILARRPSYRKILKDLSSEDXRGRKGDGENSGVSAAVXSMSVPXPIYQXSSGQYIAIAPNGALQLASPGXDGVQGLQXLXMXNSGSXQQGXXILQYAQXSDGQQILVPSNQVVVQXASGDMQXYQIRXXPSAXSLPQXVVMXSPVXLXSQXXKXDDPQLKREIRLMKNREAARECRRKKKEYVKCLENRVAVLENQNKXLIEELKXLKDLYSNKSV

SEQ ID NO: 3454 - protein, 329 aa, Homo sapiens
  MOD_RES (17)..(17): Selenocysteine
  MOD_RES (20)..(20): Selenocysteine
  MOD_RES (23)..(23): Selenocysteine
  MOD_RES (50)..(50): Selenocysteine
  MOD_RES (60)..(60): Selenocysteine
  MOD_RES (77)..(77): Selenocysteine
  MOD_RES (107)..(107): Selenocysteine
  MOD_RES (114)..(114): Selenocysteine
  MOD_RES (118)..(118): Selenocysteine
  MOD_RES (129)..(129): Selenocysteine
  MOD_RES (144)..(144): Selenocysteine
  MOD_RES (146)..(147): Selenocysteine
  MOD_RES (149)..(149): Selenocysteine
  MOD_RES (156)..(157): Selenocysteine
  MOD_RES (160)..(160): Selenocysteine
  MOD_RES (163)..(163): Selenocysteine
  MOD_RES (223)..(223): Selenocysteine
  MOD_RES (245)..(245): Selenocysteine
  MOD_RES (255)..(255): Selenocysteine
  MOD_RES (273)..(273): Selenocysteine
  MOD_RES (283)..(283): Selenocysteine
  MOD_RES (290)..(290): Selenocysteine
  MOD_RES (298)..(298): Selenocysteine
  MOD_RES (302)..(302): Selenocysteine
  MOD_RES (309)..(309): Selenocysteine
MAAYKFQIIQQAVPSPXSSXVIXQAPSSNRPIVPVPGPFPLLLHLPNGQXMPVAIPASIXSSNVHVPAAVPLVRPVXMVPSVPGIPGPSSPQPVQSEAKMRLKAALXQQHPPVXNGDXVKGHGSGLVRXQSEESRPQSLQQPAXSXXEXPASPAHXXPQXQSXSGRRRRAANEDPDEKRRKFLERNRAAASRCRQKRKVWVQSLEKKAEDLSSLNGQLQSEVXLLRNEVAQLKQLLLAHKDCPVXAMQKKSGYHXADKDDSSEDISVPSSPHXEAIQHSSVSXSNGVSSXSKAEAVAXSVLXQMADQSXEPALSQIVMAPSSQSQPSGS

SEQ ID NO: 3455 - protein, 43 aa, Homo sapiens
  MOD_RES (28)..(28): Selenocysteine
MKFKLHVNSARQYKDLWNMSDDKPFLCXAPGCGQIRPQHQQDS

SEQ ID NO: 3456 - protein, 209 aa, Homo sapiens
  MOD_RES (28)..(28): Selenocysteine
  MOD_RES (37)..(37): Selenocysteine
  MOD_RES (52)..(52): Selenocysteine
  MOD_RES (69)..(69): Selenocysteine
  MOD_RES (71)..(71): Selenocysteine
  MOD_RES (73)..(73): Selenocysteine
  MOD_RES (116)..(116): Selenocysteine
  MOD_RES (131)..(132): Selenocysteine
  MOD_RES (144)..(145): Selenocysteine
  MOD_RES (156)..(156): Selenocysteine
  MOD_RES (160)..(160): Selenocysteine
  MOD_RES (177)..(177): Selenocysteine
  MOD_RES (193)..(193): Selenocysteine
  MOD_RES (196)..(196): Selenocysteine
  MOD_RES (199)..(199): Selenocysteine
MKFKLHVNSARQYKDLWNMSDDKPFLCXAPGCGQRFXNEDHLAVHKHKHEMXLKFGPARNDSVIVADQXPXPXRFLKNCEEVGLFNELASPFENEFKKASEDDIKKMPLDLSPLAXPIIRSKIEEPSVVEXXHQDSPLPHPESXXSDEKEVPLAQXAQPXSAIVRPASLQVPNVLLXSSDSSVIIQQAVPSPXSSXVIXQAPSSNRPIV

SEQ ID NO: 3457 - protein, 395 aa, Homo sapiens
  MOD_RES (28)..(28): Selenocysteine
  MOD_RES (37)..(37): Selenocysteine
  MOD_RES (52)..(52): Selenocysteine
  MOD_RES (69)..(69): Selenocysteine
  MOD_RES (71)..(71): Selenocysteine
  MOD_RES (73)..(73): Selenocysteine
  MOD_RES (116)..(116): Selenocysteine
  MOD_RES (131)..(132): Selenocysteine
  MOD_RES (144)..(145): Selenocysteine
  MOD_RES (156)..(156): Selenocysteine
  MOD_RES (160)..(160): Selenocysteine
  MOD_RES (177)..(177): Selenocysteine
  MOD_RES (193)..(193): Selenocysteine
  MOD_RES (196)..(196): Selenocysteine
  MOD_RES (199)..(199): Selenocysteine
  MOD_RES (226)..(226): Selenocysteine
  MOD_RES (236)..(236): Selenocysteine
  MOD_RES (253)..(253): Selenocysteine
  MOD_RES (283)..(283): Selenocysteine
  MOD_RES (290)..(290): Selenocysteine
  MOD_RES (294)..(294): Selenocysteine
  MOD_RES (305)..(305): Selenocysteine
  MOD_RES (320)..(320): Selenocysteine
  MOD_RES (322)..(323): Selenocysteine
  MOD_RES (325)..(325): Selenocysteine
  MOD_RES (332)..(333): Selenocysteine
  MOD_RES (336)..(336): Selenocysteine
  MOD_RES (339)..(339): Selenocysteine
MKFKLHVNSARQYKDLWNMSDDKPFLCXAPGCGQRFXNEDHLAVHKHKHEMXLKFGPARNDSVIVADQXPXPXRFLKNCEEVGLFNELASPFENEFKKASEDDIKKMPLDLSPLAXPIIRSKIEEPSVVEXXHQDSPLPHPESXXSDEKEVPLAQXAQPXSAIVRPASLQVPNVLLXSSDSSVIIQQAVPSPXSSXVIXQAPSSNRPIVPVPGPFPLLLHLPNGQXMPVAIPASIXSSNVHVPAAVPLVRPVXMVPSVPGIPGPSSPQPVQSEAKMRLKAALXQQHPPVXNGDXVKGHGSGLVRXQSEESRPQSLQQPAXSXXEXPASPAHXXPQXQSXSGRRRRAANEDPDEKRRKFLERNRAAASRCRQKRKVWVQSLEKKAEDLSSLNGQLQ

SEQ ID NO: 3458 - protein, 505 aa, Homo sapiens
  MOD_RES (28)..(28): Selenocysteine
  MOD_RES (37)..(37): Selenocysteine
  MOD_RES (52)..(52): Selenocysteine
  MOD_RES (69)..(69): Selenocysteine
  MOD_RES (71)..(71): Selenocysteine
  MOD_RES (73)..(73): Selenocysteine
  MOD_RES (116)..(116): Selenocysteine
  MOD_RES (131)..(132): Selenocysteine
  MOD_RES (144)..(145): Selenocysteine
  MOD_RES (156)..(156): Selenocysteine
  MOD_RES (160)..(160): Selenocysteine
  MOD_RES (177)..(177): Selenocysteine
  MOD_RES (193)..(193): Selenocysteine
  MOD_RES (196)..(196): Selenocysteine
  MOD_RES (199)..(199): Selenocysteine
  MOD_RES (226)..(226): Selenocysteine
  MOD_RES (236)..(236): Selenocysteine
  MOD_RES (253)..(253): Selenocysteine
  MOD_RES (283)..(283): Selenocysteine
  MOD_RES (290)..(290): Selenocysteine
  MOD_RES (294)..(294): Selenocysteine
  MOD_RES (305)..(305): Selenocysteine
  MOD_RES (320)..(320): Selenocysteine
  MOD_RES (322)..(323): Selenocysteine
  MOD_RES (325)..(325): Selenocysteine
  MOD_RES (332)..(333): Selenocysteine
  MOD_RES (336)..(336): Selenocysteine
  MOD_RES (339)..(339): Selenocysteine
  MOD_RES (399)..(399): Selenocysteine
  MOD_RES (421)..(421): Selenocysteine
  MOD_RES (431)..(431): Selenocysteine
  MOD_RES (449)..(449): Selenocysteine
  MOD_RES (459)..(459): Selenocysteine
  MOD_RES (466)..(466): Selenocysteine
  MOD_RES (474)..(474): Selenocysteine
  MOD_RES (478)..(478): Selenocysteine
  MOD_RES (485)..(485): Selenocysteine
MKFKLHVNSARQYKDLWNMSDDKPFLCXAPGCGQRFXNEDHLAVHKHKHEMXLKFGPARNDSVIVADQXPXPXRFLKNCEEVGLFNELASPFENEFKKASEDDIKKMPLDLSPLAXPIIRSKIEEPSVVEXXHQDSPLPHPESXXSDEKEVPLAQXAQPXSAIVRPASLQVPNVLLXSSDSSVIIQQAVPSPXSSXVIXQAPSSNRPIVPVPGPFPLLLHLPNGQXMPVAIPASIXSSNVHVPAAVPLVRPVXMVPSVPGIPGPSSPQPVQSEAKMRLKAALXQQHPPVXNGDXVKGHGSGLVRXQSEESRPQSLQQPAXSXXEXPASPAHXXPQXQSXSGRRRRAANEDPDEKRRKFLERNRAAASRCRQKRKVWVQSLEKKAEDLSSLNGQLQSEVXLLRNEVAQLKQLLLAHKDCPVXAMQKKSGYHXADKDDSSEDISVPSSPHXEAIQHSSVSXSNGVSSXSKAEAVAXSVLXQMADQSXEPALSQIVMAPSSQSQPSGS

SEQ ID NO: 3459 - protein, 237 aa, Homo sapiens
  MOD_RES (28)..(28): Selenocysteine
  MOD_RES (37)..(37): Selenocysteine
  MOD_RES (52)..(52): Selenocysteine
  MOD_RES (69)..(69): Selenocysteine
  MOD_RES (71)..(71): Selenocysteine
  MOD_RES (73)..(73): Selenocysteine
  MOD_RES (116)..(116): Selenocysteine
  MOD_RES (131)..(132): Selenocysteine
  MOD_RES (144)..(145): Selenocysteine
  MOD_RES (156)..(156): Selenocysteine
  MOD_RES (160)..(160): Selenocysteine
  MOD_RES (177)..(177): Selenocysteine
  MOD_RES (193)..(193): Selenocysteine
  MOD_RES (196)..(196): Selenocysteine
  MOD_RES (199)..(199): Selenocysteine
MKFKLHVNSARQYKDLWNMSDDKPFLCXAPGCGQRFXNEDHLAVHKHKHEMXLKFGPARNDSVIVADQXPXPXRFLKNCEEVGLFNELASPFENEFKKASEDDIKKMPLDLSPLAXPIIRSKIEEPSVVEXXHQDSPLPHPESXXSDEKEVPLAQXAQPXSAIVRPASLQVPNVLLXSSDSSVIIQQAVPSPXSSXVIXQAPSSNRPIVSFDQSPWCLVFQESQVLPLPNQYSQKQK

SEQ ID NO: 3460 - protein, 144 aa, Homo sapiens
  MOD_RES (28)..(28): Selenocysteine
  MOD_RES (38)..(38): Selenocysteine
  MOD_RES (60)..(60): Selenocysteine
  MOD_RES (70)..(70): Selenocysteine
  MOD_RES (88)..(88): Selenocysteine
  MOD_RES (98)..(98): Selenocysteine
  MOD_RES (105)..(105): Selenocysteine
  MOD_RES (113)..(113): Selenocysteine
  MOD_RES (117)..(117): Selenocysteine
  MOD_RES (124)..(124): Selenocysteine
MKFKLHVNSARQYKDLWNMSDDKPFLCXAPGCGQSEVXLLRNEVAQLKQLLLAHKDCPVXAMQKKSGYHXADKDDSSEDISVPSSPHXEAIQHSSVSXSNGVSSXSKAEAVAXSVLXQMADQSXEPALSQIVMAPSSQSQPSGS

SEQ ID NO: 3461 - protein, 487 aa, Homo sapiens
  MOD_RES (10)..(10): Selenocysteine
  MOD_RES (19)..(19): Selenocysteine
  MOD_RES (34)..(34): Selenocysteine
  MOD_RES (51)..(51): Selenocysteine
  MOD_RES (53)..(53): Selenocysteine
  MOD_RES (55)..(55): Selenocysteine
  MOD_RES (98)..(98): Selenocysteine
  MOD_RES (113)..(114): Selenocysteine
  MOD_RES (126)..(127): Selenocysteine
  MOD_RES (138)..(138): Selenocysteine
  MOD_RES (142)..(142): Selenocysteine
  MOD_RES (159)..(159): Selenocysteine
  MOD_RES (175)..(175): Selenocysteine
  MOD_RES (178)..(178): Selenocysteine
  MOD_RES (181)..(181): Selenocysteine
  MOD_RES (208)..(208): Selenocysteine
  MOD_RES (218)..(218): Selenocysteine
  MOD_RES (235)..(235): Selenocysteine
  MOD_RES (265)..(265): Selenocysteine
  MOD_RES (272)..(272): Selenocysteine
  MOD_RES (276)..(276): Selenocysteine
  MOD_RES (287)..(287): Selenocysteine
  MOD_RES (302)..(302): Selenocysteine
  MOD_RES (304)..(305): Selenocysteine
  MOD_RES (307)..(307): Selenocysteine
  MOD_RES (314)..(315): Selenocysteine
  MOD_RES (318)..(318): Selenocysteine
  MOD_RES (321)..(321): Selenocysteine
  MOD_RES (381)..(381): Selenocysteine
  MOD_RES (403)..(403): Selenocysteine
  MOD_RES (413)..(413): Selenocysteine
  MOD_RES (431)..(431): Selenocysteine
  MOD_RES (441)..(441): Selenocysteine
  MOD_RES (448)..(448): Selenocysteine
  MOD_RES (456)..(456): Selenocysteine
  MOD_RES (460)..(460): Selenocysteine
  MOD_RES (467)..(467): Selenocysteine
MSDDKPFLCXAPGCGQRFXNEDHLAVHKHKHEMXLKFGPARNDSVIVADQXPXPXRFLKNCEEVGLFNELASPFENEFKKASEDDIKKMPLDLSPLAXPIIRSKIEEPSVVEXXHQDSPLPHPESXXSDEKEVPLAQXAQPXSAIVRPASLQVPNVLLXSSDSSVIIQQAVPSPXSSXVIXQAPSSNRPIVPVPGPFPLLLHLPNGQXMPVAIPASIXSSNVHVPAAVPLVRPVXMVPSVPGIPGPSSPQPVQSEAKMRLKAALXQQHPPVXNGDXVKGHGSGLVRXQSEESRPQSLQQPAXSXXEXPASPAHXXPQXQSXSGRRRRAANEDPDEKRRKFLERNRAAASRCRQKRKVWVQSLEKKAEDLSSLNGQLQSEVXLLRNEVAQLKQLLLAHKDCPVXAMQKKSGYHXADKDDSSEDISVPSSPHXEAIQHSSVSXSNGVSSXSKAEAVAXSVLXQMADQSXEPALSQIVMAPSSQSQPSGS

SEQ ID NO: 3462 - protein, 389 aa, Homo sapiens
  MOD_RES (10)..(10): Selenocysteine
  MOD_RES (19)..(19): Selenocysteine
  MOD_RES (34)..(34): Selenocysteine
  MOD_RES (51)..(51): Selenocysteine
  MOD_RES (53)..(53): Selenocysteine
  MOD_RES (55)..(55): Selenocysteine
  MOD_RES (98)..(98): Selenocysteine
  MOD_RES (113)..(114): Selenocysteine
  MOD_RES (126)..(127): Selenocysteine
  MOD_RES (137)..(137): Selenocysteine
  MOD_RES (167)..(167): Selenocysteine
  MOD_RES (174)..(174): Selenocysteine
  MOD_RES (178)..(178): Selenocysteine
  MOD_RES (189)..(189): Selenocysteine
  MOD_RES (204)..(204): Selenocysteine
  MOD_RES (206)..(207): Selenocysteine
  MOD_RES (209)..(209): Selenocysteine
  MOD_RES (216)..(217): Selenocysteine
  MOD_RES (220)..(220): Selenocysteine
  MOD_RES (223)..(223): Selenocysteine
  MOD_RES (283)..(283): Selenocysteine
  MOD_RES (305)..(305): Selenocysteine
  MOD_RES (315)..(315): Selenocysteine
  MOD_RES (333)..(333): Selenocysteine
  MOD_RES (343)..(343): Selenocysteine
  MOD_RES (350)..(350): Selenocysteine
  MOD_RES (358)..(358): Selenocysteine
  MOD_RES (362)..(362): Selenocysteine
  MOD_RES (369)..(369): Selenocysteine
MSDDKPFLCXAPGCGQRFXNEDHLAVHKHKHEMXLKFGPARNDSVIVADQXPXPXRFLKNCEEVGLFNELASPFENEFKKASEDDIKKMPLDLSPLAXPIIRSKIEEPSVVEXXHQDSPLPHPESXXSDEKLVRPVXMVPSVPGIPGPSSPQPVQSEAKMRLKAALXQQHPPVXNGDXVKGHGSGLVRXQSEESRPQSLQQPAXSXXEXPASPAHXXPQXQSXSGRRRRAANEDPDEKRRKFLERNRAAASRCRQKRKVWVQSLEKKAEDLSSLNGQLQSEVXLLRNEVAQLKQLLLAHKDCPVXAMQKKSGYHXADKDDSSEDISVPSSPHXEAIQHSSVSXSNGVSSXSKAEAVAXSVLXQMADQSXEPALSQIVMAPSSQSQPSGS

SEQ ID NO: 3463 - protein, 189 aa, Homo sapiens
  MOD_RES (11)..(11): Selenocysteine
  MOD_RES (13)..(13): Selenocysteine
  MOD_RES (15)..(15): Selenocysteine
  MOD_RES (58)..(58): Selenocysteine
  MOD_RES (73)..(74): Selenocysteine
  MOD_RES (86)..(87): Selenocysteine
  MOD_RES (98)..(98): Selenocysteine
  MOD_RES (102)..(102): Selenocysteine
  MOD_RES (119)..(119): Selenocysteine
  MOD_RES (135)..(135): Selenocysteine
  MOD_RES (138)..(138): Selenocysteine
  MOD_RES (141)..(141): Selenocysteine
  MOD_RES (168)..(168): Selenocysteine
  MOD_RES (178)..(178): Selenocysteine
MYCAWMWPDQXPXPXRFLKNCEEVGLFNELASPFENEFKKASEDDIKKMPLDLSPLAXPIIRSKIEEPSVVEXXHQDSPLPHPESXXSDEKEVPLAQXAQPXSAIVRPASLQVPNVLLXSSDSSVIIQQAVPSPXSSXVIXQAPSSNRPIVPVPGPFPLLLHLPNGQXMPVAIPASIXSSNVHVPAAVP

SEQ ID NO: 3464 - protein, 447 aa, Homo sapiens
  MOD_RES (11)..(11): Selenocysteine
  MOD_RES (13)..(13): Selenocysteine
  MOD_RES (15)..(15): Selenocysteine
  MOD_RES (58)..(58): Selenocysteine
  MOD_RES (73)..(74): Selenocysteine
  MOD_RES (86)..(87): Selenocysteine
  MOD_RES (98)..(98): Selenocysteine
  MOD_RES (102)..(102): Selenocysteine
  MOD_RES (119)..(119): Selenocysteine
  MOD_RES (135)..(135): Selenocysteine
  MOD_RES (138)..(138): Selenocysteine
  MOD_RES (141)..(141): Selenocysteine
  MOD_RES (168)..(168): Selenocysteine
  MOD_RES (178)..(178): Selenocysteine
  MOD_RES (195)..(195): Selenocysteine
  MOD_RES (225)..(225): Selenocysteine
  MOD_RES (232)..(232): Selenocysteine
  MOD_RES (236)..(236): Selenocysteine
  MOD_RES (247)..(247): Selenocysteine
  MOD_RES (262)..(262): Selenocysteine
  MOD_RES (264)..(265): Selenocysteine
  MOD_RES (267)..(267): Selenocysteine
  MOD_RES (274)..(275): Selenocysteine
  MOD_RES (278)..(278): Selenocysteine
  MOD_RES (281)..(281): Selenocysteine
  MOD_RES (341)..(341): Selenocysteine
  MOD_RES (363)..(363): Selenocysteine
  MOD_RES (373)..(373): Selenocysteine
  MOD_RES (391)..(391): Selenocysteine
  MOD_RES (401)..(401): Selenocysteine
  MOD_RES (408)..(408): Selenocysteine
  MOD_RES (416)..(416): Selenocysteine
  MOD_RES (420)..(420): Selenocysteine
  MOD_RES (427)..(427): Selenocysteine
MYCAWMWPDQXPXPXRFLKNCEEVGLFNELASPFENEFKKASEDDIKKMPLDLSPLAXPIIRSKIEEPSVVEXXHQDSPLPHPESXXSDEKEVPLAQXAQPXSAIVRPASLQVPNVLLXSSDSSVIIQQAVPSPXSSXVIXQAPSSNRPIVPVPGPFPLLLHLPNGQXMPVAIPASIXSSNVHVPAAVPLVRPVXMVPSVPGIPGPSSPQPVQSEAKMRLKAALXQQHPPVXNGDXVKGHGSGLVRXQSEESRPQSLQQPAXSXXEXPASPAHXXPQXQSXSGRRRRAANEDPDEKRRKFLERNRAAASRCRQKRKVWVQSLEKKAEDLSSLNGQLQSEVXLLRNEVAQLKQLLLAHKDCPVXAMQKKSGYHXADKDDSSEDISVPSSPHXEAIQHSSVSXSNGVSSXSKAEAVAXSVLXQMADQSXEPALSQIVMAPSSQSQPSGS

SEQ ID NO: 3465 - protein, 265 aa, Homo sapiens
  MOD_RES (1)..(1): Any amino acid
  MOD_RES (17)..(17): Selenocysteine
  MOD_RES (26)..(26): Selenocysteine
  MOD_RES (41)..(41): Selenocysteine
  MOD_RES (58)..(58): Selenocysteine
  MOD_RES (60)..(60): Selenocysteine
  MOD_RES (62)..(62): Selenocysteine
  MOD_RES (105)..(105): Selenocysteine
  MOD_RES (120)..(121): Selenocysteine
  MOD_RES (133)..(134): Selenocysteine
  MOD_RES (145)..(145): Selenocysteine
  MOD_RES (149)..(149): Selenocysteine
  MOD_RES (161)..(162): Selenocysteine
  MOD_RES (165)..(165): Selenocysteine
  MOD_RES (168)..(168): Selenocysteine
  MOD_RES (234)..(234): Selenocysteine
XYKDLWNMSDDKPFLCXAPGCGQRFXNEDHLAVHKHKHEMXLKFGPARNDSVIVADQXPXPXRFLKNCEEVGLFNELASPFENEFKKASEDDIKKMPLDLSPLAXPIIRSKIEEPSVVEXXHQDSPLPHPESXXSDEKEVPLAQXAQPXSAIVRPASPAHXXPQXQSXSGRRRRAANEDPDEKRRKFLERNRAAASRCRQKRKVWVQSLEKKAEDLSSLNGQLQLLIKMIVQKXFQCRVVHIQKLYSIVRSAHPMESVQPPRQKL

SEQ ID NO: 3466 - protein, 106 aa, Homo sapiens
  MOD_RES (37)..(37): Selenocysteine
  MOD_RES (48)..(48): Selenocysteine
  MOD_RES (82)..(82): Selenocysteine
  MOD_RES (97)..(97): Selenocysteine
MMLQHPGQVSASEEELRFAIQNKHLCHRMSSALESVXVSDRPLGVSIXKAEVAPEEDERKKRRRERNKIAAAKCRNKKKEKXECLQKLPRPFWVQKXCIWAVDSCK

SEQ ID NO: 3467 - protein, 175 aa, Homo sapiens
  MOD_RES (38)..(38): Selenocysteine
  MOD_RES (66)..(66): Selenocysteine
  MOD_RES (77)..(77): Selenocysteine
  MOD_RES (111)..(111): Selenocysteine
  MOD_RES (152)..(152): Selenocysteine
  MOD_RES (162)..(162): Selenocysteine
MMLQHPGQVSASEVSASAIVPCLSPPGSLVFEDFANLXPFVKEELRFAIQNKHLCHRMSSALESVXVSDRPLGVSIXKAEVAPEEDERKKRRRERNKIAAAKCRNKKKEKXECLQKESEKLESVNAELKAQIEELKNEKQHLIYMLNLHRPXCIVRAQNGRXPEDERNLFIQQIK

SEQ ID NO: 3468 - protein, 181 aa, Homo sapiens
  MOD_RES (38)..(38): Selenocysteine
  MOD_RES (66)..(66): Selenocysteine
  MOD_RES (77)..(77): Selenocysteine
  MOD_RES (111)..(111): Selenocysteine
  MOD_RES (152)..(152): Selenocysteine
  MOD_RES (162)..(162): Selenocysteine
  MOD_RES (178)..(178): Selenocysteine
MMLQHPGQVSASEVSASAIVPCLSPPGSLVFEDFANLXPFVKEELRFAIQNKHLCHRMSSALESVXVSDRPLGVSIXKAEVAPEEDERKKRRRERNKIAAAKCRNKKKEKXECLQKESEKLESVNAELKAQIEELKNEKQHLIYMLNLHRPXCIVRAQNGRXPEDERNLFIQQIKEGXLQS

SEQ ID NO: 3469 - protein, 135 aa, Homo sapiens
  MOD_RES (38)..(38): Selenocysteine
  MOD_RES (66)..(66): Selenocysteine
  MOD_RES (77)..(77): Selenocysteine
  MOD_RES (111)..(111): Selenocysteine
  MOD_RES (126)..(126): Selenocysteine
MMLQHPGQVSASEVSASAIVPCLSPPGSLVFEDFANLXPFVKEELRFAIQNKHLCHRMSSALESVXVSDRPLGVSIXKAEVAPEEDERKKRRRERNKIAAAKCRNKKKEKXECLQKLPRPFWVQKXCIWAVDSCK

SEQ ID NO: 3470 - protein, 124 aa, Homo sapiens
  MOD_RES (9)..(9): Selenocysteine
  MOD_RES (20)..(20): Selenocysteine
  MOD_RES (54)..(54): Selenocysteine
  MOD_RES (95)..(95): Selenocysteine
  MOD_RES (105)..(105): Selenocysteine
  MOD_RES (121)..(121): Selenocysteine
MSSALESVXVSDRPLGVSIXKAEVAPEEDERKKRRRERNKIAAAKCRNKKKEKXECLQKESEKLESVNAELKAQIEELKNEKQHLIYMLNLHRPXCIVRAQNGRXPEDERNLFIQQIKEGXLQS

SEQ ID NO: 3471 - protein, 153 aa, Homo sapiens
  MOD_RES (1)..(1): Any amino acid
  MOD_RES (12)..(12): Selenocysteine
  MOD_RES (38)..(38): Selenocysteine
  MOD_RES (49)..(49): Selenocysteine
  MOD_RES (83)..(83): Selenocysteine
  MOD_RES (124)..(124): Selenocysteine
  MOD_RES (134)..(134): Selenocysteine
  MOD_RES (150)..(150): Selenocysteine
XERSLEQNDASXPRPELRFAIQNKHLCHRMSSALESVXVSDRPLGVSIXKAEVAPEEDERKKRRRERNKIAAAKCRNKKKEKXECLQKESEKLESVNAELKAQIEELKNEKQHLIYMLNLHRPXCIVRAQNGRXPEDERNLFIQQIKEGXLQS

SEQ ID NO: 3472 - protein, 351 aa, Homo sapiens
  MOD_RES (2)..(2): Selenocysteine
  MOD_RES (82)..(82): Selenocysteine
  MOD_RES (107)..(107): Selenocysteine
  MOD_RES (114)..(115): Selenocysteine
  MOD_RES (119)..(119): Selenocysteine
  MOD_RES (130)..(130): Selenocysteine
  MOD_RES (137)..(137): Selenocysteine
  MOD_RES (149)..(149): Selenocysteine
  MOD_RES (158)..(158): Selenocysteine
  MOD_RES (173)..(173): Selenocysteine
  MOD_RES (189)..(189): Selenocysteine
  MOD_RES (198)..(198): Selenocysteine
  MOD_RES (213)..(213): Selenocysteine
  MOD_RES (238)..(238): Selenocysteine
  MOD_RES (290)..(290): Selenocysteine
  MOD_RES (293)..(293): Selenocysteine
  MOD_RES (307)..(307): Selenocysteine
MXEMSFLSSEVLVGDLMSPFDQSGLGAEESLGLLDDYLEVAKHFKPHGFSSDKAKAGSSEWLAVDGLVSPSNNSKEDAFSGXDWMLEKMDLKEFDLDALLGIDDLEXMPDDLLXXLDDXCDLFAPLVQEXNKQPPQXVNPIGHLPESLXKPDQVAPFXFLQPLPLSPGVLSSXPDHSFSLELGSEVDIXEGDRKPDYXAYVAMIPQCIKEEDXPSDNDSGICMSPESYLGSPQHSPSXRGSPNRSLPSPGVLCGSARPKPYDPPGEKMVAAKVKGEKLDKKLKKMEQNKXAAXRYRQKKRAEQEALXGECKELEKKNEALKERADSLAKEIQYLKDLIEEVRKARGKKRVP

SEQ ID NO: 3473 - protein, 122 aa, Homo sapiens
  MOD_RES (6)..(6): Selenocysteine
  MOD_RES (68)..(68): Selenocysteine
  MOD_RES (74)..(74): Selenocysteine
  MOD_RES (87)..(87): Selenocysteine
  MOD_RES (94)..(94): Selenocysteine
MSLLAXLGLELDRALLPASGLGWLVDYGKLPPAPAPLAPYEVLGGALEGGLPVGGEPLAGDGFSDWMXERVDFXALLPLEPPLPPGXLPQPSPXPPDLEAMASLLKKELEQMEDFFLDAPPL

SEQ ID NO: 3474 - protein, 130 aa, Homo sapiens
  MOD_RES (6)..(6): Selenocysteine
  MOD_RES (68)..(68): Selenocysteine
  MOD_RES (74)..(74): Selenocysteine
  MOD_RES (87)..(87): Selenocysteine
  MOD_RES (94)..(94): Selenocysteine
MSLLAXLGLELDRALLPASGLGWLVDYGKLPPAPAPLAPYEVLGGALEGGLPVGGEPLAGDGFSDWMXERVDFXALLPLEPPLPPGXLPQPSPXPPDLEAMASLLKKELEQMEDFFLDAPPLPPPSPPPL

SEQ ID NO: 3475 - protein, 282 aa, Homo sapiens
  MOD_RES (6)..(6): Selenocysteine
  MOD_RES (68)..(68): Selenocysteine
  MOD_RES (74)..(74): Selenocysteine
  MOD_RES (87)..(87): Selenocysteine
  MOD_RES (94)..(94): Selenocysteine
  MOD_RES (158)..(158): Selenocysteine
  MOD_RES (205)..(206): Selenocysteine
  MOD_RES (279)..(279): Selenocysteine
MSLLAXLGLELDRALLPASGLGWLVDYGKLPPAPAPLAPYEVLGGALEGGLPVGGEPLAGDGFSDWMXERVDFXALLPLEPPLPPGXLPQPSPXPPDLEAMASLLKKELEQMEDFFLDAPPLPPPSPPPLPPPPLPPAPSLPLSLPSFDLPQPPVLDXLDLLAIYCRNEAGQEEVGMPPLPPPQQPPPPSPPQPSRLAPYPHPAXXRGDRKQKKRDQNKSAALRYRQRKRAEGEALEGECQGLEARNRELKERAESVEREIQYVKDLLIEVYKARSQRXRSC

SEQ ID NO: 3476 - protein, 88 aa, Homo sapiens
  MOD_RES (6)..(6): Selenocysteine
MSLLAXLGLELDRALLPASGLGWLVDYGKLPPAPAPLAPYEVLGGALEGGLPVGGEPLAGKGRWKVELGSGGQGKMGEEELIHVFNKY

SEQ ID NO: 3477 - protein, 670 aa, Homo sapiens
  MOD_RES (10)..(10): Selenocysteine
  MOD_RES (39)..(39): Selenocysteine
  MOD_RES (41)..(41): Selenocysteine
  MOD_RES (52)..(52): Selenocysteine
  MOD_RES (82)..(82): Selenocysteine
  MOD_RES (114)..(114): Selenocysteine
  MOD_RES (155)..(155): Selenocysteine
  MOD_RES (161)..(161): Selenocysteine
  MOD_RES (166)..(166): Selenocysteine
  MOD_RES (192)..(192): Selenocysteine
  MOD_RES (194)..(194): Selenocysteine
  MOD_RES (202)..(202): Selenocysteine
  MOD_RES (207)..(207): Selenocysteine
  MOD_RES (210)..(210): Selenocysteine
  MOD_RES (228)..(228): Selenocysteine
  MOD_RES (232)..(232): Selenocysteine
  MOD_RES (239)..(239): Selenocysteine
  MOD_RES (263)..(263): Selenocysteine
  MOD_RES (289)..(289): Selenocysteine
  MOD_RES (296)..(296): Selenocysteine
  MOD_RES (354)..(354): Selenocysteine
  MOD_RES (429)..(429): Selenocysteine
  MOD_RES (455)..(455): Selenocysteine
  MOD_RES (473)..(474): Selenocysteine
  MOD_RES (495)..(495): Selenocysteine
  MOD_RES (501)..(501): Selenocysteine
  MOD_RES (507)..(507): Selenocysteine
  MOD_RES (528)..(528): Selenocysteine
  MOD_RES (530)..(531): Selenocysteine
  MOD_RES (565)..(565): Selenocysteine
  MOD_RES (581)..(582): Selenocysteine
  MOD_RES (586)..(587): Selenocysteine
  MOD_RES (623)..(623): Selenocysteine
  MOD_RES (645)..(645): Selenocysteine
  MOD_RES (647)..(647): Selenocysteine
  MOD_RES (656)..(656): Selenocysteine
  MOD_RES (659)..(659): Selenocysteine
  MOD_RES (664)..(664): Selenocysteine
MGEPAGVAGXMESPFSPGLFHRLDEDWDSALFAELGYFXDXDELQLEAANEXYENNFDNLDFDLDLMPWESDIWDINNQICXVKDIKAEPQPLSPASSSYSVSSPRSVDSYSSXQHVPEELDLSSSSQMSPLSLYGENSNSLSSAEPLKEDKPVXGPRNKXENGLXPKKKIQVNSKPSIQPKPLLLPAAPKXQXNSSVPAKXIIIQXVPXLMPLAKQQPIISLQPAPXKGQXVLLSQPXVVQLQAPGVLPSAQPVLAVAGGVXQLPNHVVNVVPAPSANSPVNGKLSVXKPVLQSXMRNVGSDIAVLRRQQRMIKNRESACQSRKKKKEYMLGLEARLKAALSENEQLKKENGXLKRQLDEVVSENQRLKVPSPKRRVVCVMIVLAFIILNYGPMSMLEQDSRRMNPSVSPANQRRHLLGFSAKEAQDXSDGIIQKNSYRYDHSVSNDKALMVLXEEPLLYIPPPPCQPLINXXESLRLNHELRGWVHRHEVERXKSRRMXNNQQKXRILQGALEQGSNSQLMAVQYXEXXSSISRNSGSELQVYYASPRSYQDFFEAIRRRGDXFYVVSFRRDHLLLPAXXHNKXXRPKMSIVLPAININENVINGQDYEVMMQIDCQVMDXRILHIKSSSVPPYLRDQQRNQXNXFFGSPPAAXEAXHVVSXIPESLQ

SEQ ID NO: 3478 - protein, 700 aa, Homo sapiens
  MOD_RES (14)..(14): Selenocysteine
  MOD_RES (18)..(18): Selenocysteine
  MOD_RES (30)..(30): Selenocysteine
  MOD_RES (43)..(43): Selenocysteine
  MOD_RES (106)..(106): Selenocysteine
  MOD_RES (123)..(123): Selenocysteine
  MOD_RES (138)..(138): Selenocysteine
  MOD_RES (143)..(143): Selenocysteine
  MOD_RES (151)..(151): Selenocysteine
  MOD_RES (160)..(160): Selenocysteine
  MOD_RES (197)..(197): Selenocysteine
  MOD_RES (236)..(236): Selenocysteine
  MOD_RES (249)..(250): Selenocysteine
  MOD_RES (262)..(263): Selenocysteine
  MOD_RES (466)..(466): Selenocysteine
  MOD_RES (475)..(475): Selenocysteine
  MOD_RES (504)..(504): Selenocysteine
  MOD_RES (588)..(588): Selenocysteine
  MOD_RES (609)..(609): Selenocysteine
  MOD_RES (626)..(626): Selenocysteine
  MOD_RES (649)..(649): Selenocysteine
  MOD_RES (656)..(656): Selenocysteine
  MOD_RES (658)..(658): Selenocysteine
  MOD_RES (670)..(670): Selenocysteine
  MOD_RES (675)..(675): Selenocysteine
MAELMLLSEIADPXRFFXDNLLSPEDWDSXLYSGLDEVAEEQXQLFRCPEQDVPFDGSSLDVGMDVSPSEPPWELLPIFPDLQVKSEPSSPCSSSSLSSESSRLSXEPSSEALGVGEVLHVKXESLAPPLCLLGDDPXSSFEXVQINVIPXSDDSSDVQXKIEPVSPCSSVNSEASLLSADSSSQAFIGEEVLEVKXESLSPSGCLLWDVPAPSLGAVQISMGPSLDGSSGKALPXRKPPLQPKPVVLXXVPMPSRAVPPSXXVLLQSLVQPPPVSPVVLIQGAIRVQPEGPAPSLPRPERKSIVPAPMPGNSCPPEVDAKLLKRQQRMIKNRESACQSRRKKKEYLQGLEARLQAVLADNQQLRRENAALRRRLEALLAENSELKLGSGNRKVVCIMVFLLFIAFNFGPVSISEPPSAPISPRMNKGEPQPRRHLLGFSEQEPVQGVEPLQGSSQGPKEPQPSPXDQPSFSNLXAFPGGAKELLLRDLDQLFLSSDCRHFNRXESLRLADELSGWVQRHQRGRRKIPQRAQERQKSQPRKKSPPVKAVPIQPPGPPERDSVGQLQLYRHPDRSQPAFLDAIDRREDXFYVVSFRRDHLLLPAISHNKXSRPKMSLVMPAMAPNEXLSGRGAPGDYEEMMQIECEVMDXRVIHIKXSXVPPSLRKQPSPXPGNAXGGPLPVSAASQAHQASHQPLYLNHP

SEQ ID NO: 3479 - protein, 703 aa, Homo sapiens
  MOD_RES (14)..(14): Selenocysteine
  MOD_RES (18)..(18): Selenocysteine
  MOD_RES (33)..(33): Selenocysteine
  MOD_RES (46)..(46): Selenocysteine
  MOD_RES (109)..(109): Selenocysteine
  MOD_RES (126)..(126): Selenocysteine
  MOD_RES (141)..(141): Selenocysteine
  MOD_RES (146)..(146): Selenocysteine
  MOD_RES (154)..(154): Selenocysteine
  MOD_RES (163)..(163): Selenocysteine
  MOD_RES (200)..(200): Selenocysteine
  MOD_RES (239)..(239): Selenocysteine
  MOD_RES (252)..(253): Selenocysteine
  MOD_RES (265)..(266): Selenocysteine
  MOD_RES (469)..(469): Selenocysteine
  MOD_RES (478)..(478): Selenocysteine
  MOD_RES (507)..(507): Selenocysteine
  MOD_RES (591)..(591): Selenocysteine
  MOD_RES (612)..(612): Selenocysteine
  MOD_RES (629)..(629): Selenocysteine
  MOD_RES (652)..(652): Selenocysteine
  MOD_RES (659)..(659): Selenocysteine
  MOD_RES (661)..(661): Selenocysteine
  MOD_RES (673)..(673): Selenocysteine
  MOD_RES (678)..(678): Selenocysteine
MAELMLLSEIADPXRFFXDNLLSPEDWGLQNSXLYSGLDEVAEEQXQLFRCPEQDVPFDGSSLDVGMDVSPSEPPWELLPIFPDLQVKSEPSSPCSSSSLSSESSRLSXEPSSEALGVGEVLHVKXESLAPPLCLLGDDPXSSFEXVQINVIPXSDDSSDVQXKIEPVSPCSSVNSEASLLSADSSSQAFIGEEVLEVKXESLSPSGCLLWDVPAPSLGAVQISMGPSLDGSSGKALPXRKPPLQPKPVVLXXVPMPSRAVPPSXXVLLQSLVQPPPVSPVVLIQGAIRVQPEGPAPSLPRPERKSIVPAPMPGNSCPPEVDAKLLKRQQRMIKNRESACQSRRKKKEYLQGLEARLQAVLADNQQLRRENAALRRRLEALLAENSELKLGSGNRKVVCIMVFLLFIAFNFGPVSISEPPSAPISPRMNKGEPQPRRHLLGFSEQEPVQGVEPLQGSSQGPKEPQPSPXDQPSFSNLXAFPGGAKELLLRDLDQLFLSSDCRHFNRXESLRLADELSGWVQRHQRGRRKIPQRAQERQKSQPRKKSPPVKAVPIQPPGPPERDSVGQLQLYRHPDRSQPAFLDAIDRREDXFYVVSFRRDHLLLPAISHNKXSRPKMSLVMPAMAPNEXLSGRGAPGDYEEMMQIECEVMDXRVIHIKXSXVPPSLRKQPSPXPGNAXGGPLPVSAASQAHQASHQPLYLNHP

SEQ ID NO: 3480 - protein, 142 aa, Homo sapiens
  MOD_RES (1)..(1): Any amino acid
  MOD_RES (6)..(6): Selenocysteine
  MOD_RES (15)..(15): Selenocysteine
  MOD_RES (44)..(44): Selenocysteine
  MOD_RES (79)..(79): Selenocysteine
  MOD_RES (118)..(118): Selenocysteine
  MOD_RES (120)..(120): Selenocysteine
  MOD_RES (131)..(131): Selenocysteine
  MOD_RES (135)..(135): Selenocysteine
XQPSPXDQPSFSNLXAFPGGAKELLLRDLDQLFLSSDCRHFNRXESLRLADELSGWVQRHQRGRRKIPQRAQERQSLDXSPSRSLSHGRSHLQLRQSPSNPLDPQKGILWASCNYIAXQXVRSQHSWMQLXDGKXHFMLSLS

SEQ ID NO: 3481 - protein, 483 aa, Homo sapiens
  MOD_RES (19)..(19): Selenocysteine
  MOD_RES (34)..(34): Selenocysteine
  MOD_RES (42)..(42): Selenocysteine
  MOD_RES (51)..(51): Selenocysteine
  MOD_RES (53)..(53): Selenocysteine
  MOD_RES (55)..(55): Selenocysteine
  MOD_RES (101)..(101): Selenocysteine
  MOD_RES (137)..(137): Selenocysteine
  MOD_RES (145)..(145): Selenocysteine
  MOD_RES (147)..(147): Selenocysteine
  MOD_RES (149)..(149): Selenocysteine
  MOD_RES (168)..(168): Selenocysteine
  MOD_RES (173)..(173): Selenocysteine
  MOD_RES (177)..(177): Selenocysteine
  MOD_RES (190)..(190): Selenocysteine
  MOD_RES (204)..(204): Selenocysteine
  MOD_RES (263)..(263): Selenocysteine
  MOD_RES (265)..(265): Selenocysteine
  MOD_RES (281)..(281): Selenocysteine
  MOD_RES (284)..(284): Selenocysteine
  MOD_RES (287)..(287): Selenocysteine
  MOD_RES (316)..(316): Selenocysteine
  MOD_RES (319)..(319): Selenocysteine
  MOD_RES (326)..(326): Selenocysteine
  MOD_RES (368)..(368): Selenocysteine
  MOD_RES (379)..(379): Selenocysteine
  MOD_RES (401)..(401): Selenocysteine
  MOD_RES (407)..(407): Selenocysteine
  MOD_RES (421)..(421): Selenocysteine
  MOD_RES (434)..(434): Selenocysteine
  MOD_RES (451)..(451): Selenocysteine
  MOD_RES (455)..(455): Selenocysteine
  MOD_RES (462)..(462): Selenocysteine
  MOD_RES (475)..(475): Selenocysteine
MGDDRPFVCNAPGCGQRFXNEDHLAVHKHKHEMXLKFGPARXDSVIIADQXPXPXRFLKNCEEVGLFNELASSFEHEFKKAADEDEKKAAAGPLDMSLPSXPDIKIKEEEPVEVDSSPPDSPASSPCSPPLKEKEVXPKPVLISXPXPXIVRPGSLPLHLGYDPLHPXLPSPXSVIXQAPPSNRQMGSPXGSLPLVMHLANGQXMPVLPGPPVQMPSVISLARPVSMVPNIPGIPGPPVNSSGSISPSGHPIPSEAKMRLKAXLXHQVSSINGGCGMVVGXASXMVXARPEQSQILIQHPDAPSPAQPQVSPAQPXPSXGGRRRRXVDEDPDERRQRFLERNRAAASRCRQKRKLWVSSLEKKAEELXSQNIQLSNEVXLLRNEVAQLKQLLLAHKDCPVXALQKKXQGYLESPKESSEPXGSPAPVIQHSSAXAPSNGLSVRSAAEAVAXSVLXQMASQRXELSMPIQSHVIMXPQSQSAGR

SEQ ID NO: 3482 - protein, 163 aa, Homo sapiens
  MOD_RES (19)..(19): Selenocysteine
  MOD_RES (34)..(34): Selenocysteine
  MOD_RES (42)..(42): Selenocysteine
  MOD_RES (51)..(51): Selenocysteine
  MOD_RES (53)..(53): Selenocysteine
  MOD_RES (55)..(55): Selenocysteine
  MOD_RES (93)..(93): Selenocysteine
  MOD_RES (112)..(112): Selenocysteine
  MOD_RES (148)..(148): Selenocysteine
  MOD_RES (156)..(156): Selenocysteine
  MOD_RES (158)..(158): Selenocysteine
  MOD_RES (160)..(160): Selenocysteine
MGDDRPFVCNAPGCGQRFXNEDHLAVHKHKHEMXLKFGPARXDSVIIADQXPXPXRFLKNCEEVGLFNELASSFEHEFKKAADEDEKKARSRXVAKKLVAAAGPLDMSLPSXPDIKIKEEEPVEVDSSPPDSPASSPCSPPLKEKEVXPKPVLISXPXPXIVR

SEQ ID NO: 3483 - protein, 494 aa, Homo sapiens
  MOD_RES (19)..(19): Selenocysteine
  MOD_RES (34)..(34): Selenocysteine
  MOD_RES (42)..(42): Selenocysteine
  MOD_RES (51)..(51): Selenocysteine
  MOD_RES (53)..(53): Selenocysteine
  MOD_RES (55)..(55): Selenocysteine
  MOD_RES (93)..(93): Selenocysteine
  MOD_RES (112)..(112): Selenocysteine
  MOD_RES (148)..(148): Selenocysteine
  MOD_RES (156)..(156): Selenocysteine
  MOD_RES (158)..(158): Selenocysteine
  MOD_RES (160)..(160): Selenocysteine
  MOD_RES (179)..(179): Selenocysteine
  MOD_RES (184)..(184): Selenocysteine
  MOD_RES (188)..(188): Selenocysteine
  MOD_RES (201)..(201): Selenocysteine
  MOD_RES (215)..(215): Selenocysteine
  MOD_RES (274)..(274): Selenocysteine
  MOD_RES (276)..(276): Selenocysteine
  MOD_RES (292)..(292): Selenocysteine
  MOD_RES (295)..(295): Selenocysteine
  MOD_RES (298)..(298): Selenocysteine
  MOD_RES (327)..(327): Selenocysteine
  MOD_RES (330)..(330): Selenocysteine
  MOD_RES (337)..(337): Selenocysteine
  MOD_RES (379)..(379): Selenocysteine
  MOD_RES (390)..(390): Selenocysteine
  MOD_RES (412)..(412): Selenocysteine
  MOD_RES (418)..(418): Selenocysteine
  MOD_RES (432)..(432): Selenocysteine
  MOD_RES (445)..(445): Selenocysteine
  MOD_RES (462)..(462): Selenocysteine
  MOD_RES (466)..(466): Selenocysteine
  MOD_RES (473)..(473): Selenocysteine
  MOD_RES (486)..(486): Selenocysteine
MGDDRPFVCNAPGCGQRFXNEDHLAVHKHKHEMXLKFGPARXDSVIIADQXPXPXRFLKNCEEVGLFNELASSFEHEFKKAADEDEKKARSRXVAKKLVAAAGPLDMSLPSXPDIKIKEEEPVEVDSSPPDSPASSPCSPPLKEKEVXPKPVLISXPXPXIVRPGSLPLHLGYDPLHPXLPSPXSVIXQAPPSNRQMGSPXGSLPLVMHLANGQXMPVLPGPPVQMPSVISLARPVSMVPNIPGIPGPPVNSSGSISPSGHPIPSEAKMRLKAXLXHQVSSINGGCGMVVGXASXMVXARPEQSQILIQHPDAPSPAQPQVSPAQPXPSXGGRRRRXVDEDPDERRQRFLERNRAAASRCRQKRKLWVSSLEKKAEELXSQNIQLSNEVXLLRNEVAQLKQLLLAHKDCPVXALQKKXQGYLESPKESSEPXGSPAPVIQHSSAXAPSNGLSVRSAAEAVAXSVLXQMASQRXELSMPIQSHVIMXPQSQSAGR

SEQ ID NO: 3484 - protein, 117 aa, Homo sapiens
  MOD_RES (19)..(19): Selenocysteine
  MOD_RES (34)..(34): Selenocysteine
  MOD_RES (42)..(42): Selenocysteine
  MOD_RES (51)..(51): Selenocysteine
  MOD_RES (53)..(53): Selenocysteine
  MOD_RES (55)..(55): Selenocysteine
  MOD_RES (93)..(93): Selenocysteine
MGDDRPFVCNAPGCGQRFXNEDHLAVHKHKHEMXLKFGPARXDSVIIADQXPXPXRFLKNCEEVGLFNELASSFEHEFKKAADEDEKKARSRXVAKKLVVFRPRLFLLCFGIIFLIG

SEQ ID NO: 3485 - protein, 78 aa, Homo sapiens
  MOD_RES (6)..(6): Selenocysteine
  MOD_RES (42)..(42): Selenocysteine
  MOD_RES (50)..(50): Selenocysteine
  MOD_RES (52)..(52): Selenocysteine
  MOD_RES (54)..(54): Selenocysteine
  MOD_RES (73)..(73): Selenocysteine
  MOD_RES (78)..(78): Selenocysteine
MSLPSXPDIKIKEEEPVEVDSSPPDSPASSPCSPPLKEKEVXPKPVLISXPXPXIVRPGSLPLHLGYDPLHPXLPSPX

SEQ ID NO: 3486 - protein, 79 aa, Homo sapiens
  MOD_RES (6)..(6): Selenocysteine
  MOD_RES (42)..(42): Selenocysteine
  MOD_RES (50)..(50): Selenocysteine
  MOD_RES (52)..(52): Selenocysteine
  MOD_RES (54)..(54): Selenocysteine
  MOD_RES (73)..(73): Selenocysteine
  MOD_RES (78)..(78): Selenocysteine
MSLPSXPDIKIKEEEPVEVDSSPPDSPASSPCSPPLKEKEVXPKPVLISXPXPXIVRPGSLPLHLGYDPLHPXLPSPXS

SEQ ID NO: 3487 - protein, 140 aa, Homo sapiens
  MOD_RES (13)..(13): Selenocysteine
  MOD_RES (23)..(23): Selenocysteine
  MOD_RES (29)..(31): Selenocysteine
  MOD_RES (44)..(44): Selenocysteine
  MOD_RES (51)..(51): Selenocysteine
  MOD_RES (65)..(65): Selenocysteine
  MOD_RES (70)..(70): Selenocysteine
  MOD_RES (78)..(78): Selenocysteine
  MOD_RES (80)..(80): Selenocysteine
  MOD_RES (118)..(118): Selenocysteine
MAEEPQSVLQLPXSIAAGGEGLXDVSPEXXXPEPPSSAAVSPGXEEPAGDXKKKIDILLKAVGDXPIMKXKKWAVERXRXIQGLIDFIKKFLKLVASEQLFIYVNQSFAPSPDQEVGXLYECFGSDGKLVLHYCKSQAWG

SEQ ID NO: 3488 - protein, 74 aa, Homo sapiens
  MOD_RES (13)..(13): Selenocysteine
  MOD_RES (23)..(23): Selenocysteine
  MOD_RES (29)..(31): Selenocysteine
  MOD_RES (44)..(44): Selenocysteine
  MOD_RES (51)..(51): Selenocysteine
MAEEPQSVLQLPXSIAAGGEGLXDVSPEXXXPEPPSSAAVSPGXEEPAGDXKKKIYLCESVLCSFPRPRSWNSL

SEQ ID NO: 3489 - protein, 75 aa, Homo sapiens
  MOD_RES (13)..(13): Selenocysteine
  MOD_RES (23)..(23): Selenocysteine
  MOD_RES (29)..(31): Selenocysteine
  MOD_RES (44)..(44): Selenocysteine
  MOD_RES (51)..(51): Selenocysteine
  MOD_RES (72)..(72): Selenocysteine
MAEEPQSVLQLPXSIAAGGEGLXDVSPEXXXPEPPSSAAVSPGXEEPAGDXKKKNDSGLWPGAVAHSCNPSXLVG

SEQ ID NO: 3490 - protein, 56 aa, Homo sapiens
  MOD_RES (13)..(13): Selenocysteine
  MOD_RES (23)..(23): Selenocysteine
  MOD_RES (29)..(31): Selenocysteine
  MOD_RES (44)..(44): Selenocysteine
  MOD_RES (51)..(51): Selenocysteine
MAEEPQSVLQLPXSIAAGGEGLXDVSPEXXXPEPPSSAAVSPGXEEPAGDXKKKSN

SEQ ID NO: 3491 - protein, 59 aa, Homo sapiens
  MOD_RES (1)..(1): Any amino acid
  MOD_RES (11)..(11): Selenocysteine
  MOD_RES (21)..(21): Selenocysteine
  MOD_RES (27)..(29): Selenocysteine
  MOD_RES (42)..(42): Selenocysteine
  MOD_RES (49)..(49): Selenocysteine
  MOD_RES (58)..(58): Selenocysteine
XEPQSVLQLPXSIAAGGEGLXDVSPEXXXPEPPSSAAVSPGXEEPAGDXKKKIGCEFXP

SEQ ID NO: 3492 - protein, 66 aa, Homo sapiens
  MOD_RES (1)..(1): Any amino acid
  MOD_RES (18)..(18): Selenocysteine
  MOD_RES (28)..(28): Selenocysteine
  MOD_RES (34)..(36): Selenocysteine
  MOD_RES (49)..(49): Selenocysteine
  MOD_RES (56)..(56): Selenocysteine
  MOD_RES (65)..(65): Selenocysteine
XSPSKMAEEPQSVLQLPXSIAAGGEGLXDVSPEXXXPEPPSSAAVSPGXEEPAGDXKKKIGCEFXP

SEQ ID NO: 3493 - protein, 153 aa, Homo sapiens
  MOD_RES (23)..(23): Selenocysteine
  MOD_RES (114)..(116): Selenocysteine
  MOD_RES (136)..(136): Selenocysteine
MHYPIGLLFDLLASSSALPWNIXVHFKSFPEKDLLHCPSKDAIEAHFMSCMKEADALKHKSQVINEMQKKDHKQLWMGLQNDRFDQFWAINRKLMEYPAEENGFRYIPFRIYQXXXERPFIQKLFRPVAADGQLHXLGDLLKEVCPSAIDPED

SEQ ID NO: 3494 - protein, 159 aa, Homo sapiens
  MOD_RES (23)..(23): Selenocysteine
  MOD_RES (114)..(116): Selenocysteine
  MOD_RES (136)..(136): Selenocysteine
MHYPIGLLFDLLASSSALPWNIXVHFKSFPEKDLLHCPSKDAIEAHFMSCMKEADALKHKSQVINEMQKKDHKQLWMGLQNDRFDQFWAINRKLMEYPAEENGFRYIPFRIYQXXXERPFIQKLFRPVAADGQLHXLGDLLKEVCPSAIDPEEIPPGED

SEQ ID NO: 3495 - protein, 44 aa, Homo sapiens
  MOD_RES (2)..(2): Selenocysteine
  MOD_RES (18)..(18): Selenocysteine
  MOD_RES (21)..(21): Selenocysteine
  MOD_RES (28)..(28): Selenocysteine
MXDDKDVLRDVWFGRIPXCFXLYQDEIXEREAEPYYALSNWFAI

SEQ ID NO: 3496 - protein, 162 aa, Homo sapiens
  MOD_RES (2)..(2): Selenocysteine
  MOD_RES (18)..(18): Selenocysteine
  MOD_RES (21)..(21): Selenocysteine
  MOD_RES (28)..(28): Selenocysteine
  MOD_RES (46)..(46): Selenocysteine
  MOD_RES (49)..(49): Selenocysteine
  MOD_RES (75)..(75): Selenocysteine
  MOD_RES (101)..(101): Selenocysteine
MXDDKDVLRDVWFGRIPXCFXLYQDEIXEREAEPYYLLLPRVSYLXLVXDKVKKHFQKVMRQEDISEIWFEYEGXPLKWHYPIGLLFDLLASSSALPWNIXVHFKSFPEKDLLHCPSKDAIEAHFMSCMKEADALKHKSQVINEMQKKDHKQLWMGLQNDND

SEQ ID NO: 3497 - protein, 275 aa, Homo sapiens
  MOD_RES (2)..(2): Selenocysteine
  MOD_RES (18)..(18): Selenocysteine
  MOD_RES (21)..(21): Selenocysteine
  MOD_RES (28)..(28): Selenocysteine
  MOD_RES (46)..(46): Selenocysteine
  MOD_RES (49)..(49): Selenocysteine
  MOD_RES (75)..(75): Selenocysteine
  MOD_RES (101)..(101): Selenocysteine
  MOD_RES (192)..(194): Selenocysteine
  MOD_RES (214)..(214): Selenocysteine
  MOD_RES (249)..(249): Selenocysteine
  MOD_RES (274)..(274): Selenocysteine
MXDDKDVLRDVWFGRIPXCFXLYQDEIXEREAEPYYLLLPRVSYLXLVXDKVKKHFQKVMRQEDISEIWFEYEGXPLKWHYPIGLLFDLLASSSALPWNIXVHFKSFPEKDLLHCPSKDAIEAHFMSCMKEADALKHKSQVINEMQKKDHKQLWMGLQNDRFDQFWAINRKLMEYPAEENGFRYIPFRIYQXXXERPFIQKLFRPVAADGQLHXLGDLLKEVCPSAIDPEDGEKKNQVMIHGIEPMLEXPLQWLSEHLSYPDNFLHISIIPQPXD

SEQ ID NO: 3498 - protein, 91 aa, Homo sapiens
  MOD_RES (2)..(2): Selenocysteine
  MOD_RES (18)..(18): Selenocysteine
  MOD_RES (21)..(21): Selenocysteine
  MOD_RES (28)..(28): Selenocysteine
  MOD_RES (37)..(37): Selenocysteine
  MOD_RES (40)..(40): Selenocysteine
  MOD_RES (90)..(90): Selenocysteine
MXDDKDVLRDVWFGRIPXCFXLYQDEIXEREAEPYYXDLXSFGPSIGNSWNILQKKMDFVISPLEYIRQRLKDLSFRSCFVLWLQMDSCXH

SEQ ID NO: 3499 - protein, 155 aa, Homo sapiens
  MOD_RES (19)..(19): Selenocysteine
  MOD_RES (32)..(32): Selenocysteine
  MOD_RES (58)..(58): Selenocysteine
  MOD_RES (68)..(68): Selenocysteine
  MOD_RES (98)..(98): Selenocysteine
  MOD_RES (140)..(140): Selenocysteine
  MOD_RES (151)..(151): Selenocysteine
IDHLFISNLPEIVVELLMXLHEPANSSASQSXDLCDFSGDLDPAPNPPHFPSHVIKAXFAYISNCHKXKLKSILEILSKSPDSYQKILLAICEQAAEXNNVYKKHRILKIYHLFVSLLLKDIKSGLGGAWAFVLRDVIYXLIHYINQRKLXIFSQ

SEQ ID NO: 3500 - protein, 93 aa, Homo sapiens
  MOD_RES (21)..(21): Selenocysteine
  MOD_RES (39)..(39): Selenocysteine
  MOD_RES (72)..(72): Selenocysteine
  MOD_RES (86)..(86): Selenocysteine
MSLVLNDLLICCRQLEHDRAXERKKEVEKFKRLIRDPEXIKHLDRHSDSKQGKYLNWDAVFRFLQKYIQKEXECLRIAKPNVSASXQASRQKK

SEQ ID NO: 3501 - protein, 154 aa, Homo sapiens
  MOD_RES (21)..(21): Selenocysteine
  MOD_RES (39)..(39): Selenocysteine
  MOD_RES (72)..(72): Selenocysteine
  MOD_RES (86)..(86): Selenocysteine
  MOD_RES (140)..(140): Selenocysteine
  MOD_RES (147)..(147): Selenocysteine
MSLVLNDLLICCRQLEHDRAXERKKEVEKFKRLIRDPEXIKHLDRHSDSKQGKYLNWDAVFRFLQKYIQKEXECLRIAKPNVSASXQASRQKKMQEISSLVKYFIKCANRKLFSVYFRLYLKPSQDVHRVLVARIIHAVXKGCCSQXDGLNSKF

SEQ ID NO: 3502 - protein, 135 aa, Homo sapiens
  MOD_RES (21)..(21): Selenocysteine
  MOD_RES (39)..(39): Selenocysteine
  MOD_RES (72)..(72): Selenocysteine
  MOD_RES (86)..(86): Selenocysteine
  MOD_RES (127)..(127): Selenocysteine
MSLVLNDLLICCRQLEHDRAXERKKEVEKFKRLIRDPEXIKHLDRHSDSKQGKYLNWDAVFRFLQKYIQKEXECLRIAKPNVSASXQASRQKKMQEISSLVKYFIKCANRRAPRLKCQELLNYIMDXVKDSSNGA

SEQ ID NO: 3503 - protein, 1369 aa, Homo sapiens
  MOD_RES (21)..(21): Selenocysteine
  MOD_RES (39)..(39): Selenocysteine
  MOD_RES (72)..(72): Selenocysteine
  MOD_RES (86)..(86): Selenocysteine
  MOD_RES (127)..(127): Selenocysteine
  MOD_RES (195)..(195): Selenocysteine
  MOD_RES (202)..(202): Selenocysteine
  MOD_RES (237)..(237): Selenocysteine
  MOD_RES (242)..(242): Selenocysteine
  MOD_RES (261)..(261): Selenocysteine
  MOD_RES (267)..(267): Selenocysteine
  MOD_RES (297)..(297): Selenocysteine
  MOD_RES (306)..(306): Selenocysteine
  MOD_RES (361)..(361): Selenocysteine
  MOD_RES (371)..(373): Selenocysteine
  MOD_RES (417)..(417): Selenocysteine
  MOD_RES (452)..(452): Selenocysteine
  MOD_RES (460)..(460): Selenocysteine
  MOD_RES (491)..(491): Selenocysteine
  MOD_RES (528)..(528): Selenocysteine
  MOD_RES (543)..(543): Selenocysteine
  MOD_RES (547)..(548): Selenocysteine
  MOD_RES (554)..(554): Selenocysteine
  MOD_RES (593)..(593): Selenocysteine
  MOD_RES (616)..(616): Selenocysteine
  MOD_RES (655)..(656): Selenocysteine
  MOD_RES (664)..(664): Selenocysteine
  MOD_RES (710)..(710): Selenocysteine
  MOD_RES (714)..(714): Selenocysteine
  MOD_RES (761)..(761): Selenocysteine
  MOD_RES (767)..(767): Selenocysteine
  MOD_RES (784)..(784): Selenocysteine
  MOD_RES (791)..(791): Selenocysteine
  MOD_RES (808)..(808): Selenocysteine
  MOD_RES (842)..(842): Selenocysteine
  MOD_RES (878)..(878): Selenocysteine
  MOD_RES (909)..(910): Selenocysteine
  MOD_RES (913)..(913): Selenocysteine
  MOD_RES (915)..(915): Selenocysteine
  MOD_RES (935)..(935): Selenocysteine
  MOD_RES (939)..(939): Selenocysteine
  MOD_RES (989)..(989): Selenocysteine
  MOD_RES (1011)..(1011): Selenocysteine
  MOD_RES (1020)..(1020): Selenocysteine
  MOD_RES (1029)..(1029): Selenocysteine
  MOD_RES (1048)..(1048): Selenocysteine
  MOD_RES (1075)..(1075): Selenocysteine
  MOD_RES (1100)..(1100): Selenocysteine
  MOD_RES (1118)..(1118): Selenocysteine
  MOD_RES (1143)..(1143): Selenocysteine
  MOD_RES (1156)..(1156): Selenocysteine
  MOD_RES (1200)..(1200): Selenocysteine
  MOD_RES (1227)..(1227): Selenocysteine
  MOD_RES (1242)..(1242): Selenocysteine
  MOD_RES (1284)..(1284): Selenocysteine
  MOD_RES (1303)..(1303): Selenocysteine
  MOD_RES (1314)..(1314): Selenocysteine
  MOD_RES (1316)..(1316): Selenocysteine
  MOD_RES (1350)..(1350): Selenocysteine
  MOD_RES (1363)..(1363): Selenocysteine
MSLVLNDLLICCRQLEHDRAXERKKEVEKFKRLIRDPEXIKHLDRHSDSKQGKYLNWDAVFRFLQKYIQKEXECLRIAKPNVSASXQASRQKKMQEISSLVKYFIKCANRRAPRLKCQELLNYIMDXVKDSSNGAIYGADCSNILLKDILSVRKYWCEISQQQWLELFSVYFRLYLKPSQDVHRVLVARIIHAVXKGCCSQXDGLNSKFLDFFSKAIQCARQEKSSSGLNHILAALXIFLKXLAVNFRIRVCELGDEILPXLLYIWXQHRLNDSLKEVIIELFQLQIYIHHPKGAKXQEKGAYESXKWRSILYNLYDLLVNEISHIGSRGKYSSGFRNIAVKENLIELMADICHQVFNEDXRSLEISQSYXXXQRESSDYSVPCKRKKIELGWEVIKDHLQKSQNDFDLVPWLQIAXQLISKYPASLPNCELSPLLMILSQLLPQQRHGERXPYVLRCLXEVALCQDKRSNLESSQKSDLLKLWNKIWCIXFRGISSEQIQAENFGLLGAIIQGSLVEVDREFWKLFXGSACRPSCPAVCCLXLALXXSIVPGXVKMGIEQNMCEVNRSFSLKESIMKWLLFYQLEGDLENSXEVPPILHSNFPHLVLEKILVSLXMKNCKAAMNFFQSVPECEHHQKDKEELSFSEVEELFLQXXFDKMDFLXIVRECGIEKHQSSIGFSVHQNLKESLDRCLLGLSEQLLNNYSSEIXNSEXLVRCSRLLVGVLGCYCYMGVIAEEEAYKSELFQKAKSLMQCAGESIXLFKNKXNEEFRIGSLRNMMQLCXRCLSNCXKKSPNKIASGFFLRLLXSKLMNDIADICKSLASFIKKPFDRGEVESMEDDXNGNLMEVEDQSSMNLFNDYPDSSVSDANEPGESQSXIGAINPLAEEYLSKQDLLFLDMLKFLCLCVXXAQXNXVSFRAADIRRKLLMLIDSSXLEPXKSLHLHMYLMLLKELPGEEYPLPMEDVLELLKPLSNVCSLYRRDQDVCKXILNHVLHVVKNLGQSNMDSENXRDAQGQFLXVIGAFWHLXKERKYIFSVRMALVNCLKXLLEADPYSKWAILNVMGKDFPVNEVFXQFLADNHHQVRMLAAESINRLFQDXKGDSSRLLKALPLKLQQXAFENAYLKAQEGMREMSHSAENPEXLDEIYNRKSVLLXLIAVVLSCSPICEKQALFALCKSVKENGLEPHLVKKVLEKVSEXFGYRRLEDFMASHLDYLVLEWLNLQDXEYNLSSFPFILLNYXNIEDFYRSCYKVLIPHLVIRSHFDEVKSIANQIQEDWKSLLXDCFPKILVNILPYFAYEGXRDSGMAQQREXAXKVYDMLKSENLLGKQIDHLFISNLPEIVVELLMXLHEPANSSASQSXDLCDFS

SEQ ID NO: 3504 - protein, 3056 aa, Homo sapiens
  MOD_RES (21)..(21): Selenocysteine
  MOD_RES (39)..(39): Selenocysteine
  MOD_RES (72)..(72): Selenocysteine
  MOD_RES (86)..(86): Selenocysteine
  MOD_RES (127)..(127): Selenocysteine
  MOD_RES (195)..(195): Selenocysteine
  MOD_RES (202)..(202): Selenocysteine
  MOD_RES (237)..(237): Selenocysteine
  MOD_RES (242)..(242): Selenocysteine
  MOD_RES (261)..(261): Selenocysteine
  MOD_RES (267)..(267): Selenocysteine
  MOD_RES (297)..(297): Selenocysteine
  MOD_RES (306)..(306): Selenocysteine
  MOD_RES (361)..(361): Selenocysteine
  MOD_RES (371)..(373): Selenocysteine
  MOD_RES (417)..(417): Selenocysteine
  MOD_RES (452)..(452): Selenocysteine
  MOD_RES (460)..(460): Selenocysteine
  MOD_RES (491)..(491): Selenocysteine
  MOD_RES (528)..(528): Selenocysteine
  MOD_RES (543)..(543): Selenocysteine
  MOD_RES (547)..(548): Selenocysteine
  MOD_RES (554)..(554): Selenocysteine
  MOD_RES (593)..(593): Selenocysteine
  MOD_RES (616)..(616): Selenocysteine
  MOD_RES (655)..(656): Selenocysteine
  MOD_RES (664)..(664): Selenocysteine
  MOD_RES (710)..(710): Selenocysteine
  MOD_RES (714)..(714): Selenocysteine
  MOD_RES (761)..(761): Selenocysteine
  MOD_RES (767)..(767): Selenocysteine
  MOD_RES (784)..(784): Selenocysteine
  MOD_RES (791)..(791): Selenocysteine
  MOD_RES (808)..(808): Selenocysteine
  MOD_RES (842)..(842): Selenocysteine
  MOD_RES (878)..(878): Selenocysteine
  MOD_RES (909)..(910): Selenocysteine
  MOD_RES (913)..(913): Selenocysteine
  MOD_RES (915)..(915): Selenocysteine
  MOD_RES (935)..(935): Selenocysteine
  MOD_RES (939)..(939): Selenocysteine
  MOD_RES (989)..(989): Selenocysteine
  MOD_RES (1011)..(1011): Selenocysteine
  MOD_RES (1020)..(1020): Selenocysteine
  MOD_RES (1029)..(1029): Selenocysteine
  MOD_RES (1048)..(1048): Selenocysteine
  MOD_RES (1075)..(1075): Selenocysteine
  MOD_RES (1100)..(1100): Selenocysteine
  MOD_RES (1118)..(1118): Selenocysteine
  MOD_RES (1143)..(1143): Selenocysteine
  MOD_RES (1156)..(1156): Selenocysteine
  MOD_RES (1200)..(1200): Selenocysteine
  MOD_RES (1227)..(1227): Selenocysteine
  MOD_RES (1242)..(1242): Selenocysteine
  MOD_RES (1284)..(1284): Selenocysteine
  MOD_RES (1303)..(1303): Selenocysteine
  MOD_RES (1314)..(1314): Selenocysteine
  MOD_RES (1316)..(1316): Selenocysteine
  MOD_RES (1350)..(1350): Selenocysteine
  MOD_RES (1363)..(1363): Selenocysteine
  MOD_RES (1389)..(1389): Selenocysteine
  MOD_RES (1399)..(1399): Selenocysteine
  MOD_RES (1429)..(1429): Selenocysteine
  MOD_RES (1471)..(1471): Selenocysteine
  MOD_RES (1504)..(1504): Selenocysteine
  MOD_RES (1507)..(1507): Selenocysteine
  MOD_RES (1523)..(1523): Selenocysteine
  MOD_RES (1558)..(1558): Selenocysteine
  MOD_RES (1577)..(1577): Selenocysteine
  MOD_RES (1609)..(1609): Selenocysteine
  MOD_RES (1662)..(1662): Selenocysteine
  MOD_RES (1685)..(1685): Selenocysteine
  MOD_RES (1697)..(1697): Selenocysteine
  MOD_RES (1711)..(1711): Selenocysteine
  MOD_RES (1716)..(1716): Selenocysteine
  MOD_RES (1721)..(1721): Selenocysteine
  MOD_RES (1735)..(1735): Selenocysteine
  MOD_RES (1743)..(1743): Selenocysteine
  MOD_RES (1745)..(1745): Selenocysteine
  MOD_RES (1756)..(1757): Selenocysteine
  MOD_RES (1769)..(1769): Selenocysteine
  MOD_RES (1808)..(1808): Selenocysteine
  MOD_RES (1810)..(1810): Selenocysteine
  MOD_RES (1819)..(1819): Selenocysteine
  MOD_RES (1835)..(1835): Selenocysteine
  MOD_RES (1840)..(1840): Selenocysteine
  MOD_RES (1854)..(1854): Selenocysteine
  MOD_RES (1864)..(1864): Selenocysteine
  MOD_RES (1871)..(1871): Selenocysteine
  MOD_RES (1880)..(1880): Selenocysteine
  MOD_RES (1884)..(1885): Selenocysteine
  MOD_RES (1908)..(1908): Selenocysteine
  MOD_RES (1926)..(1926): Selenocysteine
  MOD_RES (1953)..(1953): Selenocysteine
  MOD_RES (1984)..(1985): Selenocysteine
  MOD_RES (1997)..(1997): Selenocysteine
  MOD_RES (2031)..(2031): Selenocysteine
  MOD_RES (2035)..(2035): Selenocysteine
  MOD_RES (2048)..(2048): Selenocysteine
  MOD_RES (2053)..(2053): Selenocysteine
  MOD_RES (2059)..(2059): Selenocysteine
  MOD_RES (2113)..(2113): Selenocysteine
  MOD_RES (2122)..(2122): Selenocysteine
  MOD_RES (2142)..(2142): Selenocysteine
  MOD_RES (2172)..(2172): Selenocysteine
  MOD_RES (2194)..(2194): Selenocysteine
  MOD_RES (2228)..(2228): Selenocysteine
  MOD_RES (2252)..(2252): Selenocysteine
  MOD_RES (2264)..(2264): Selenocysteine
  MOD_RES (2268)..(2268): Selenocysteine
  MOD_RES (2333)..(2333): Selenocysteine
  MOD_RES (2335)..(2335): Selenocysteine
  MOD_RES (2348)..(2348): Selenocysteine
  MOD_RES (2359)..(2359): Selenocysteine
  MOD_RES (2396)..(2396): Selenocysteine
  MOD_RES (2434)..(2434): Selenocysteine
  MOD_RES (2438)..(2438): Selenocysteine
  MOD_RES (2513)..(2513): Selenocysteine
  MOD_RES (2529)..(2529): Selenocysteine
  MOD_RES (2556)..(2556): Selenocysteine
  MOD_RES (2573)..(2573): Selenocysteine
  MOD_RES (2584)..(2584): Selenocysteine
  MOD_RES (2599)..(2599): Selenocysteine
  MOD_RES (2608)..(2608): Selenocysteine
  MOD_RES (2636)..(2636): Selenocysteine
  MOD_RES (2640)..(2640): Selenocysteine
  MOD_RES (2654)..(2654): Selenocysteine
  MOD_RES (2666)..(2666): Selenocysteine
  MOD_RES (2674)..(2674): Selenocysteine
  MOD_RES (2682)..(2682): Selenocysteine
  MOD_RES (2737)..(2737): Selenocysteine
  MOD_RES (2743)..(2743): Selenocysteine
  MOD_RES (2745)..(2745): Selenocysteine
  MOD_RES (2751)..(2751): Selenocysteine
  MOD_RES (2754)..(2754): Selenocysteine
  MOD_RES (2771)..(2771): Selenocysteine
  MOD_RES (2773)..(2773): Selenocysteine
  MOD_RES (2853)..(2853): Selenocysteine
  MOD_RES (2858)..(2858): Selenocysteine
  MOD_RES (2902)..(2902): Selenocysteine
  MOD_RES (2905)..(2905): Selenocysteine
  MOD_RES (2911)..(2911): Selenocysteine
  MOD_RES (2921)..(2921): Selenocysteine
  MOD_RES (2934)..(2934): Selenocysteine
  MOD_RES (2944)..(2944): Selenocysteine
  MOD_RES (2947)..(2947): Selenocysteine
  MOD_RES (2961)..(2961): Selenocysteine
  MOD_RES (2978)..(2978): Selenocysteine
  MOD_RES (2983)..(2983): Selenocysteine
  MOD_RES (3024)..(3024): Selenocysteine
MSLVLNDLLICCRQLEHDRAXERKKEVEKFKRLIRDPEXIKHLDRHSDSKQGKYLNWDAVFRFLQKYIQKEXECLRIAKPNVSASXQASRQKKMQEISSLVKYFIKCANRRAPRLKCQELLNYIMDXVKDSSNGAIYGADCSNILLKDILSVRKYWCEISQQQWLELFSVYFRLYLKPSQDVHRVLVARIIHAVXKGCCSQXDGLNSKFLDFFSKAIQCARQEKSSSGLNHILAALXIFLKXLAVNFRIRVCELGDEILPXLLYIWXQHRLNDSLKEVIIELFQLQIYIHHPKGAKXQEKGAYESXKWRSILYNLYDLLVNEISHIGSRGKYSSGFRNIAVKENLIELMADICHQVFNEDXRSLEISQSYXXXQRESSDYSVPCKRKKIELGWEVIKDHLQKSQNDFDLVPWLQIAXQLISKYPASLPNCELSPLLMILSQLLPQQRHGERXPYVLRCLXEVALCQDKRSNLESSQKSDLLKLWNKIWCIXFRGISSEQIQAENFGLLGAIIQGSLVEVDREFWKLFXGSACRPSCPAVCCLXLALXXSIVPGXVKMGIEQNMCEVNRSFSLKESIMKWLLFYQLEGDLENSXEVPPILHSNFPHLVLEKILVSLXMKNCKAAMNFFQSVPECEHHQKDKEELSFSEVEELFLQXXFDKMDFLXIVRECGIEKHQSSIGFSVHQNLKESLDRCLLGLSEQLLNNYSSEIXNSEXLVRCSRLLVGVLGCYCYMGVIAEEEAYKSELFQKAKSLMQCAGESIXLFKNKXNEEFRIGSLRNMMQLCXRCLSNCXKKSPNKIASGFFLRLLXSKLMNDIADICKSLASFIKKPFDRGEVESMEDDXNGNLMEVEDQSSMNLFNDYPDSSVSDANEPGESQSXIGAINPLAEEYLSKQDLLFLDMLKFLCLCVXXAQXNXVSFRAADIRRKLLMLIDSSXLEPXKSLHLHMYLMLLKELPGEEYPLPMEDVLELLKPLSNVCSLYRRDQDVCKXILNHVLHVVKNLGQSNMDSENXRDAQGQFLXVIGAFWHLXKERKYIFSVRMALVNCLKXLLEADPYSKWAILNVMGKDFPVNEVFXQFLADNHHQVRMLAAESINRLFQDXKGDSSRLLKALPLKLQQXAFENAYLKAQEGMREMSHSAENPEXLDEIYNRKSVLLXLIAVVLSCSPICEKQALFALCKSVKENGLEPHLVKKVLEKVSEXFGYRRLEDFMASHLDYLVLEWLNLQDXEYNLSSFPFILLNYXNIEDFYRSCYKVLIPHLVIRSHFDEVKSIANQIQEDWKSLLXDCFPKILVNILPYFAYEGXRDSGMAQQREXAXKVYDMLKSENLLGKQIDHLFISNLPEIVVELLMXLHEPANSSASQSXDLCDFSGDLDPAPNPPHFPSHVIKAXFAYISNCHKXKLKSILEILSKSPDSYQKILLAICEQAAEXNNVYKKHRILKIYHLFVSLLLKDIKSGLGGAWAFVLRDVIYXLIHYINQRPSCIMDVSLRSFSLCCDLLSQVCQXAVXYCKDALENHLHVIVGXLIPLVYEQVEVQKQVLDLLKYLVIDNKDNENLYIXIKLLDPFPDHVVFKDLRIXQQKIKYSRGPFSLLEEINHFLSVSVYDALPLXRLEGLKDLRRQLELHKDQMVDIMRASQDNPQDGIMVKLVVNLLQLSKMAINHXGEKEVLEAVGSCLGEVGPIDFSXIAIQHSKDASYXKALKLFEDKELQWXFIMLXYLNNXLVEDCVKVRSAAVXCLKNILAXKXGHSFWEIYKMXXDPMLAYLQPFRXSRKKFLEVPRFDKENPFEGLDDINLWIPLSENHDIWIKXLXCAFLDSGGXKCEILQLLKPMCEVKXDFCQXVLPYLIHDILLQDXNESWRNLLSXHVQGFFXSCLRHFSQXSRSXXPANLDSESEHFFRCCLDKKSQRXMLAVVDYMRRQKRPSSGXIFNDAFWLDLNYLEVAKVAQSCAAHFXALLYAEIYADKKSMDDQEKRSLAFEEGSQSXXISSLSEKSKEEXGISLQDLLLEIYRSIGEPDSLYGCGGGKMLQPIXRLRXYEHEAMWGKALVXYDLEXAIPSSXRQAGIIQALQNLGLCHILSVYLKGLDYENKDWCPELEELHYQAAWRNMQWDHCXSVSKEVEGXSYHESLYNALQSLRDREFSXFYESLKYARVKEVEEMCKRSLESVYSLYPXLSRLQAIGELESIGELFSRSVXHRQLSEVYIKWQKHSQLLKDSDFSFQEPIMALRXVILEILMEKEMDNSQRECIKDILXKHLVELSILARXFKNXQLPERAIFQIKQYNSVSCGVSEWQLEEAQVFWAKKEQSLALSILKQMIKKLDASCAANNPSLKLXYXECLRVCGNWLAEXCLENPAVIMQXYLEKAVEVAGNYDGESSDELRNGKMKAFLSLARFSDXQYQRIENYMKSSEFENKQALLKRAKEEVGLLREHKIQXNRYXVKVQRELELDELALRALKEDRKRFLCKAVENYINCLLSGEEHDMWVFRLCSLWLENSGVSEVNGMMKRDGMKIPXYKFLPLMYQLAARMGXKMMGGLGFHEVLNNLISRISMDHPHHXLFIILALANANRDEFLXKPEVARRSRIXKNVPKQSSQLDEDRXEAANRIICXIRSRRPQMVRSVEALCDAYIILANLDAXQWKXQRKGINIPADQPIXKLKNLEDVVVPXMEIKVDHXGEYGNLVXIQSFKAEFRLAGGVNLPKIIDCVGSDGKERRQLVKGRDDLRQDAVMQQVFQMCNXLLQRNXEXRKRKLXICXYKVVPLSQRSGVLEWCXGXVPIGEFLVNNEDGAHKRYRPNDFSAFQCQKKMMEVQKKSFEEKYEVFMDVCQNFQPVFRYFCMEKFLDPAIWFEKRLAYXRSVAXSSIVGYILGLGDRHVQNILINEQSAELVHIDLGVAFEQGKILPXPEXVPFRLXRDIVDGMGIXGVEGVFRRCCEKXMEVMRNSQEXLLXIVEVLLYDPLFDWXMNPLKALYLQQRPEDEXELHPXLNADDQECKRNLSDIDQSFNKVAERVLMRLQEKLKGVEEGXVLSVGGQVNLLIQQAIDPKNLSRLFPGWKAWV

SEQ ID NO: 3505 - protein, 168 aa, Homo sapiens
  MOD_RES (21)..(21): Selenocysteine
  MOD_RES (39)..(39): Selenocysteine
  MOD_RES (72)..(72): Selenocysteine
  MOD_RES (86)..(86): Selenocysteine
  MOD_RES (127)..(127): Selenocysteine
MSLVLNDLLICCRQLEHDRAXERKKEVEKFKRLIRDPEXIKHLDRHSDSKQGKYLNWDAVFRFLQKYIQKEXECLRIAKPNVSASXQASRQKKMQEISSLVKYFIKCANRRAPRLKCQELLNYIMDXVKDSSNGAIYGADCSNILLKDILSVRKYWCEISQQQWLGMF

SEQ ID NO: 3506 - protein, 112 aa, Homo sapiens
  MOD_RES (21)..(21): Selenocysteine
  MOD_RES (39)..(39): Selenocysteine
  MOD_RES (72)..(72): Selenocysteine
  MOD_RES (86)..(86): Selenocysteine
MSLVLNDLLICCRQLEHDRAXERKKEVEKFKRLIRDPEXIKHLDRHSDSKQGKYLNWDAVFRFLQKYIQKEXECLRIAKPNVSASXQASRQKKMQEISSLVKYFIKCANRSK

SEQ ID NO: 3507 - protein, 77 aa, Homo sapiens
  MOD_RES (1)..(1): Any amino acid
  MOD_RES (6)..(6): Selenocysteine
  MOD_RES (11)..(11): Selenocysteine
  MOD_RES (25)..(25): Selenocysteine
  MOD_RES (35)..(35): Selenocysteine
  MOD_RES (42)..(42): Selenocysteine
  MOD_RES (51)..(51): Selenocysteine
  MOD_RES (55)..(56): Selenocysteine
XCEVKXDFCQXVLPYLIHDILLQDXNESWRNLLSXHVQGFFXSCLRHFSQXSRSXXPANLDSDLLQEQFLMMLSGWI

SEQ ID NO: 3508 - protein, 354 aa, Homo sapiens
  MOD_RES (40)..(40): Selenocysteine
  MOD_RES (59)..(59): Selenocysteine
  MOD_RES (68)..(68): Selenocysteine
  MOD_RES (74)..(74): Selenocysteine
  MOD_RES (200)..(200): Selenocysteine
  MOD_RES (217)..(217): Selenocysteine
  MOD_RES (240)..(240): Selenocysteine
  MOD_RES (252)..(252): Selenocysteine
  MOD_RES (267)..(267): Selenocysteine
  MOD_RES (274)..(274): Selenocysteine
  MOD_RES (296)..(296): Selenocysteine
  MOD_RES (303)..(303): Selenocysteine
  MOD_RES (330)..(330): Selenocysteine
MSRLLHAEEWAEVKELGDHHRQPQPHHLPQPPPPPQPPAXLQAREHPVYPPELSLLDSXDPRAWLAPXLQGICXARAAQYLLHSPELGASEAAAPRDEVDGRGELVRRSSGGASSSKSPGPVKVREQLCKLKGGVVVDELGCSRQRAPSSKQVNGVQKQRRLAANARERRRMHGLNHAFDQLRNVIPSFNNDKKLSKYEXLQMAQIYINALSELLQXPSGGEQPPPPPASCKSDHHHLRXAASYEGGAGNAXAAGAQQASGGSQRPXPPGSCRXRFSAPASAGGYSVQLDALHFSXFEDSALXAMMAQKNLSPSLPGSILQPVQEENSKXSPRSHRSDGEFSPHSHYSDSDEAS

SEQ ID NO: 3509 - protein, 152 aa, Homo sapiens
  MOD_RES (23)..(23): Selenocysteine
  MOD_RES (28)..(28): Selenocysteine
  MOD_RES (58)..(58): Selenocysteine
  MOD_RES (81)..(81): Selenocysteine
  MOD_RES (93)..(93): Selenocysteine
  MOD_RES (152)..(152): Selenocysteine
MKSCKPSGPPAGARVAPPCAGGXECAGXCAGAGRLESAARRRLAANARERRRMQGLNXAFDRLRRVVPQWGQDKKLSKYEXLQMALSYIMALXRILAEAERFGSERDWVGLHCEHFGRDHYLPFPGAKLPGESELYSQRLFGFQPEPFQMAX

SEQ ID NO: 3510 - protein, 321 aa, Homo sapiens
  MOD_RES (14)..(14): Selenocysteine
  MOD_RES (42)..(42): Selenocysteine
  MOD_RES (57)..(57): Selenocysteine
  MOD_RES (64)..(64): Selenocysteine
  MOD_RES (90)..(90): Selenocysteine
  MOD_RES (92)..(92): Selenocysteine
  MOD_RES (123)..(123): Selenocysteine
  MOD_RES (178)..(178): Selenocysteine
  MOD_RES (185)..(185): Selenocysteine
  MOD_RES (218)..(218): Selenocysteine
  MOD_RES (230)..(230): Selenocysteine
  MOD_RES (241)..(241): Selenocysteine
  MOD_RES (245)..(245): Selenocysteine
  MOD_RES (307)..(307): Selenocysteine
  MOD_RES (309)..(309): Selenocysteine
MKHIPVLEDGPWKXVCVKELNGLKKLKRKGKEPARRANGYKXFRLDLEAPEPRAVAXNGLRDRXHRLQPVPVPVPVPVPVAPAVPPRGGXDXAGERGGSRAPEVSDARKRCFALGAVGPGLPXPPPPPPPAPQSQAPGGPEAQPFREPGLRPRILLCAPPARPAPSAPPAPPAPPESXVRPAPPXRPGESSYSSISHVIYNNHQDSSASPRKRPGEAXAASSEIKALQQXRRLLANARERXRVHXISAAFEALRKQVPCYSYGQKLSKLAILRIACNYILSLARLADLDYSADHSNLSFSECVQRCXRXLQAEGRAKKRKE

SEQ ID NO: 3511 - protein, 1013 aa, Homo sapiens
  MOD_RES (32)..(32): Selenocysteine
  MOD_RES (47)..(47): Selenocysteine
  MOD_RES (54)..(54): Selenocysteine
  MOD_RES (71)..(71): Selenocysteine
  MOD_RES (75)..(76): Selenocysteine
  MOD_RES (111)..(111): Selenocysteine
  MOD_RES (133)..(133): Selenocysteine
  MOD_RES (209)..(209): Selenocysteine
  MOD_RES (216)..(216): Selenocysteine
  MOD_RES (222)..(222): Selenocysteine
  MOD_RES (229)..(229): Selenocysteine
  MOD_RES (233)..(233): Selenocysteine
  MOD_RES (237)..(237): Selenocysteine
  MOD_RES (243)..(243): Selenocysteine
  MOD_RES (251)..(251): Selenocysteine
  MOD_RES (255)..(255): Selenocysteine
  MOD_RES (262)..(262): Selenocysteine
  MOD_RES (272)..(272): Selenocysteine
  MOD_RES (286)..(286): Selenocysteine
  MOD_RES (306)..(306): Selenocysteine
  MOD_RES (329)..(329): Selenocysteine
  MOD_RES (331)..(331): Selenocysteine
  MOD_RES (335)..(335): Selenocysteine
  MOD_RES (337)..(337): Selenocysteine
  MOD_RES (356)..(356): Selenocysteine
  MOD_RES (360)..(360): Selenocysteine
  MOD_RES (362)..(362): Selenocysteine
  MOD_RES (368)..(368): Selenocysteine
  MOD_RES (370)..(370): Selenocysteine
  MOD_RES (372)..(372): Selenocysteine
  MOD_RES (377)..(377): Selenocysteine
  MOD_RES (392)..(393): Selenocysteine
  MOD_RES (399)..(399): Selenocysteine
  MOD_RES (407)..(407): Selenocysteine
  MOD_RES (475)..(475): Selenocysteine
  MOD_RES (485)..(485): Selenocysteine
  MOD_RES (510)..(510): Selenocysteine
  MOD_RES (569)..(570): Selenocysteine
  MOD_RES (607)..(607): Selenocysteine
  MOD_RES (613)..(613): Selenocysteine
  MOD_RES (630)..(630): Selenocysteine
  MOD_RES (658)..(658): Selenocysteine
  MOD_RES (664)..(664): Selenocysteine
  MOD_RES (676)..(676): Selenocysteine
  MOD_RES (683)..(683): Selenocysteine
  MOD_RES (705)..(705): Selenocysteine
  MOD_RES (750)..(750): Selenocysteine
  MOD_RES (769)..(769): Selenocysteine
  MOD_RES (771)..(771): Selenocysteine
  MOD_RES (778)..(778): Selenocysteine
  MOD_RES (794)..(794): Selenocysteine
  MOD_RES (796)..(796): Selenocysteine
  MOD_RES (804)..(804): Selenocysteine
  MOD_RES (831)..(831): Selenocysteine
  MOD_RES (884)..(884): Selenocysteine
  MOD_RES (897)..(897): Selenocysteine
  MOD_RES (907)..(907): Selenocysteine
  MOD_RES (910)..(910): Selenocysteine
  MOD_RES (929)..(929): Selenocysteine
  MOD_RES (952)..(952): Selenocysteine
  MOD_RES (1011)..(1011): Selenocysteine
MGDKKDDKDSPKKNKGKERRDLDDLKKEVAMXEHKMSVEEVCRKYNXDCVQGLXHSKAQEILARDGPNALXPPPXXPEWVKFCRQLFGGFSILLWIGAILCFLAYGIQAGXEDDPSGDNLYLGIVLAAVVIIXGCFSYYQEAKSSKIMESFKNMVPQQALVIREGEKMQVNAEEVVVGDLVEIKGGDRVPADLRIISAHGCKVDNSSLXGESEPQXRSPDCXHDNPLEXRNIXFFSXNCVEGXARGVVVAXGDRXVMGRIAXLASGLEVGKXPIAIEIEHFIQLIXGVAVFLGVSFFILSLILGYXWLEAVIFLIGIIVANVPEGLLAXVXVCLXLXAKRMARKNCLVKNLEAVEXLGSXSXICSDKXGXLXQNRMXVAHMWFDNQIHEADXXEDQSGXSFDKSSHXWVALSHIAGLCNRAVFKGGQDNIPVLKRDVAGDASESALLKCIELSSGSVKLMRERNKKVAEIPFNSXNKYQLSIHEXEDPNDNRYLLVMKGAPERILDRCSXILLQGKEQPLDEEMKEAFQNAYLELGGLGERVLGFCHYYLPEEQFPKGFAFDCDDVNFXXDNLCFVGLMSMIDPPRAAVPDAVGKCRSAGIKVIMVXGDHPIXAKAIAKGVGIISEGNEXVEDIAARLNIPVSQVNPRDAKACVIHGXDLKDFXSEQIDEILQNHXEIVFARXSPQQKLIIVEGCQRQGAIVAVXGDGVNDSPALKKADIGVAMGIAGSDVSKQAADMILLDDNFASIVXGVEEGRLIFDNLKKSIAYXLXSNIPEIXPFLLFIMANIPLPLGXIXILCIDLGXDMVPAISLAYEAAESDIMKRQPRNPRXDKLVNERLISMAYGQIGMIQALGGFFSYFVILAENGFLPGNLVGIRLNWDDRXVNDLEDSYGQQWXYEQRKVVEFXCHXAFFVSIVVVQWADLIICKXRRNSVFQQGMKNKILIFGLFEEXALAAFLSYCPGMDVALRMYPLKPSWWFCAFPYSFLIFVYDEIRKLILRRNPGGWVEKEXYY

SEQ ID NO: 3512 - protein, 1226 aa, Homo sapiens
  MOD_RES (32)..(32): Selenocysteine
  MOD_RES (47)..(47): Selenocysteine
  MOD_RES (54)..(54): Selenocysteine
  MOD_RES (71)..(71): Selenocysteine
  MOD_RES (75)..(76): Selenocysteine
  MOD_RES (111)..(111): Selenocysteine
  MOD_RES (133)..(133): Selenocysteine
  MOD_RES (209)..(209): Selenocysteine
  MOD_RES (216)..(216): Selenocysteine
  MOD_RES (222)..(222): Selenocysteine
  MOD_RES (229)..(229): Selenocysteine
  MOD_RES (233)..(233): Selenocysteine
  MOD_RES (237)..(237): Selenocysteine
  MOD_RES (243)..(243): Selenocysteine
  MOD_RES (251)..(251): Selenocysteine
  MOD_RES (255)..(255): Selenocysteine
  MOD_RES (262)..(262): Selenocysteine
  MOD_RES (272)..(272): Selenocysteine
  MOD_RES (286)..(286): Selenocysteine
  MOD_RES (306)..(306): Selenocysteine
  MOD_RES (329)..(329): Selenocysteine
  MOD_RES (331)..(331): Selenocysteine
  MOD_RES (335)..(335): Selenocysteine
  MOD_RES (337)..(337): Selenocysteine
  MOD_RES (356)..(356): Selenocysteine
  MOD_RES (360)..(360): Selenocysteine
  MOD_RES (362)..(362): Selenocysteine
  MOD_RES (368)..(368): Selenocysteine
  MOD_RES (370)..(370): Selenocysteine
  MOD_RES (372)..(372): Selenocysteine
  MOD_RES (377)..(377): Selenocysteine
  MOD_RES (392)..(393): Selenocysteine
  MOD_RES (399)..(399): Selenocysteine
  MOD_RES (407)..(407): Selenocysteine
  MOD_RES (475)..(475): Selenocysteine
  MOD_RES (485)..(485): Selenocysteine
  MOD_RES (510)..(510): Selenocysteine
  MOD_RES (569)..(570): Selenocysteine
  MOD_RES (607)..(607): Selenocysteine
  MOD_RES (613)..(613): Selenocysteine
  MOD_RES (630)..(630): Selenocysteine
  MOD_RES (658)..(658): Selenocysteine
  MOD_RES (664)..(664): Selenocysteine
  MOD_RES (676)..(676): Selenocysteine
  MOD_RES (683)..(683): Selenocysteine
  MOD_RES (705)..(705): Selenocysteine
  MOD_RES (750)..(750): Selenocysteine
  MOD_RES (769)..(769): Selenocysteine
  MOD_RES (771)..(771): Selenocysteine
  MOD_RES (778)..(778): Selenocysteine
  MOD_RES (794)..(794): Selenocysteine
  MOD_RES (796)..(796): Selenocysteine
  MOD_RES (804)..(804): Selenocysteine
  MOD_RES (831)..(831): Selenocysteine
  MOD_RES (884)..(884): Selenocysteine
  MOD_RES (897)..(897): Selenocysteine
  MOD_RES (907)..(907): Selenocysteine
  MOD_RES (910)..(910): Selenocysteine
  MOD_RES (929)..(929): Selenocysteine
  MOD_RES (952)..(952): Selenocysteine
  MOD_RES (1057)..(1057): Selenocysteine
  MOD_RES (1088)..(1088): Selenocysteine
  MOD_RES (1109)..(1109): Selenocysteine
  MOD_RES (1186)..(1186): Selenocysteine
  MOD_RES (1196)..(1196): Selenocysteine
MGDKKDDKDSPKKNKGKERRDLDDLKKEVAMXEHKMSVEEVCRKYNXDCVQGLXHSKAQEILARDGPNALXPPPXXPEWVKFCRQLFGGFSILLWIGAILCFLAYGIQAGXEDDPSGDNLYLGIVLAAVVIIXGCFSYYQEAKSSKIMESFKNMVPQQALVIREGEKMQVNAEEVVVGDLVEIKGGDRVPADLRIISAHGCKVDNSSLXGESEPQXRSPDCXHDNPLEXRNIXFFSXNCVEGXARGVVVAXGDRXVMGRIAXLASGLEVGKXPIAIEIEHFIQLIXGVAVFLGVSFFILSLILGYXWLEAVIFLIGIIVANVPEGLLAXVXVCLXLXAKRMARKNCLVKNLEAVEXLGSXSXICSDKXGXLXQNRMXVAHMWFDNQIHEADXXEDQSGXSFDKSSHXWVALSHIAGLCNRAVFKGGQDNIPVLKRDVAGDASESALLKCIELSSGSVKLMRERNKKVAEIPFNSXNKYQLSIHEXEDPNDNRYLLVMKGAPERILDRCSXILLQGKEQPLDEEMKEAFQNAYLELGGLGERVLGFCHYYLPEEQFPKGFAFDCDDVNFXXDNLCFVGLMSMIDPPRAAVPDAVGKCRSAGIKVIMVXGDHPIXAKAIAKGVGIISEGNEXVEDIAARLNIPVSQVNPRDAKACVIHGXDLKDFXSEQIDEILQNHXEIVFARXSPQQKLIIVEGCQRQGAIVAVXGDGVNDSPALKKADIGVAMGIAGSDVSKQAADMILLDDNFASIVXGVEEGRLIFDNLKKSIAYXLXSNIPEIXPFLLFIMANIPLPLGXIXILCIDLGXDMVPAISLAYEAAESDIMKRQPRNPRXDKLVNERLISMAYGQIGMIQALGGFFSYFVILAENGFLPGNLVGIRLNWDDRXVNDLEDSYGQQWXYEQRKVVEFXCHXAFFVSIVVVQWADLIICKXRRNSVFQQGMKNKILIFGLFEEXALAAFLSYCPGMDVALRMYPLKPSWWFCAFPYSFLIFVYDEIRKLILRRNPGGEGARQGSRGGRGAAGSQAAGPRLPSPCWMALPPGSHSSLSSHLSGHPLCLLXGLCLCGFLVSLPLCPSLCWAARLACLSPSLXLSLSFLLCLSRLGGEGNLLLXSAPPHRPSLPRPPGPGPPLSVPPILYSGGRSPLFLWPHLGPHPLHYLLPPPLWLASLPCPKPLSSLFSVSVSLPLLXPLSIPPAPAXSLGSFLLPFSPPADAISGSGQLSNISVGRE

SEQ ID NO: 3513 - protein, 1024 aa, Homo sapiens
  MOD_RES (13)..(13): Selenocysteine
  MOD_RES (43)..(43): Selenocysteine
  MOD_RES (58)..(58): Selenocysteine
  MOD_RES (65)..(65): Selenocysteine
  MOD_RES (82)..(82): Selenocysteine
  MOD_RES (86)..(87): Selenocysteine
  MOD_RES (122)..(122): Selenocysteine
  MOD_RES (144)..(144): Selenocysteine
  MOD_RES (220)..(220): Selenocysteine
  MOD_RES (227)..(227): Selenocysteine
  MOD_RES (233)..(233): Selenocysteine
  MOD_RES (240)..(240): Selenocysteine
  MOD_RES (244)..(244): Selenocysteine
  MOD_RES (248)..(248): Selenocysteine
  MOD_RES (254)..(254): Selenocysteine
  MOD_RES (262)..(262): Selenocysteine
  MOD_RES (266)..(266): Selenocysteine
  MOD_RES (273)..(273): Selenocysteine
  MOD_RES (283)..(283): Selenocysteine
  MOD_RES (297)..(297): Selenocysteine
  MOD_RES (317)..(317): Selenocysteine
  MOD_RES (340)..(340): Selenocysteine
  MOD_RES (342)..(342): Selenocysteine
  MOD_RES (346)..(346): Selenocysteine
  MOD_RES (348)..(348): Selenocysteine
  MOD_RES (367)..(367): Selenocysteine
  MOD_RES (371)..(371): Selenocysteine
  MOD_RES (373)..(373): Selenocysteine
  MOD_RES (379)..(379): Selenocysteine
  MOD_RES (381)..(381): Selenocysteine
  MOD_RES (383)..(383): Selenocysteine
  MOD_RES (388)..(388): Selenocysteine
  MOD_RES (403)..(404): Selenocysteine
  MOD_RES (410)..(410): Selenocysteine
  MOD_RES (418)..(418): Selenocysteine
  MOD_RES (486)..(486): Selenocysteine
  MOD_RES (496)..(496): Selenocysteine
  MOD_RES (521)..(521): Selenocysteine
  MOD_RES (580)..(581): Selenocysteine
  MOD_RES (618)..(618): Selenocysteine
  MOD_RES (624)..(624): Selenocysteine
  MOD_RES (641)..(641): Selenocysteine
  MOD_RES (669)..(669): Selenocysteine
  MOD_RES (675)..(675): Selenocysteine
  MOD_RES (687)..(687): Selenocysteine
  MOD_RES (694)..(694): Selenocysteine
  MOD_RES (716)..(716): Selenocysteine
  MOD_RES (761)..(761): Selenocysteine
  MOD_RES (780)..(780): Selenocysteine
  MOD_RES (782)..(782): Selenocysteine
  MOD_RES (789)..(789): Selenocysteine
  MOD_RES (805)..(805): Selenocysteine
  MOD_RES (807)..(807): Selenocysteine
  MOD_RES (815)..(815): Selenocysteine
  MOD_RES (842)..(842): Selenocysteine
  MOD_RES (895)..(895): Selenocysteine
  MOD_RES (908)..(908): Selenocysteine
  MOD_RES (918)..(918): Selenocysteine
  MOD_RES (921)..(921): Selenocysteine
  MOD_RES (940)..(940): Selenocysteine
  MOD_RES (963)..(963): Selenocysteine
  MOD_RES (1022)..(1022): Selenocysteine
MGGWEEERNRRAXDKKDDKDSPKKNKGKERRDLDDLKKEVAMXEHKMSVEEVCRKYNXDCVQGLXHSKAQEILARDGPNALXPPPXXPEWVKFCRQLFGGFSILLWIGAILCFLAYGIQAGXEDDPSGDNLYLGIVLAAVVIIXGCFSYYQEAKSSKIMESFKNMVPQQALVIREGEKMQVNAEEVVVGDLVEIKGGDRVPADLRIISAHGCKVDNSSLXGESEPQXRSPDCXHDNPLEXRNIXFFSXNCVEGXARGVVVAXGDRXVMGRIAXLASGLEVGKXPIAIEIEHFIQLIXGVAVFLGVSFFILSLILGYXWLEAVIFLIGIIVANVPEGLLAXVXVCLXLXAKRMARKNCLVKNLEAVEXLGSXSXICSDKXGXLXQNRMXVAHMWFDNQIHEADXXEDQSGXSFDKSSHXWVALSHIAGLCNRAVFKGGQDNIPVLKRDVAGDASESALLKCIELSSGSVKLMRERNKKVAEIPFNSXNKYQLSIHEXEDPNDNRYLLVMKGAPERILDRCSXILLQGKEQPLDEEMKEAFQNAYLELGGLGERVLGFCHYYLPEEQFPKGFAFDCDDVNFXXDNLCFVGLMSMIDPPRAAVPDAVGKCRSAGIKVIMVXGDHPIXAKAIAKGVGIISEGNEXVEDIAARLNIPVSQVNPRDAKACVIHGXDLKDFXSEQIDEILQNHXEIVFARXSPQQKLIIVEGCQRQGAIVAVXGDGVNDSPALKKADIGVAMGIAGSDVSKQAADMILLDDNFASIVXGVEEGRLIFDNLKKSIAYXLXSNIPEIXPFLLFIMANIPLPLGXIXILCIDLGXDMVPAISLAYEAAESDIMKRQPRNPRXDKLVNERLISMAYGQIGMIQALGGFFSYFVILAENGFLPGNLVGIRLNWDDRXVNDLEDSYGQQWXYEQRKVVEFXCHXAFFVSIVVVQWADLIICKXRRNSVFQQGMKNKILIFGLFEEXALAAFLSYCPGMDVALRMYPLKPSWWFCAFPYSFLIFVYDEIRKLILRRNPGGWVEKEXYY

SEQ ID NO: 3514 - protein, 1026 aa, Homo sapiens
  MOD_RES (13)..(13): Selenocysteine
  MOD_RES (45)..(45): Selenocysteine
  MOD_RES (60)..(60): Selenocysteine
  MOD_RES (67)..(67): Selenocysteine
  MOD_RES (84)..(84): Selenocysteine
  MOD_RES (88)..(89): Selenocysteine
  MOD_RES (124)..(124): Selenocysteine
  MOD_RES (146)..(146): Selenocysteine
  MOD_RES (222)..(222): Selenocysteine
  MOD_RES (229)..(229): Selenocysteine
  MOD_RES (235)..(235): Selenocysteine
  MOD_RES (242)..(242): Selenocysteine
  MOD_RES (246)..(246): Selenocysteine
  MOD_RES (250)..(250): Selenocysteine
  MOD_RES (256)..(256): Selenocysteine
  MOD_RES (264)..(264): Selenocysteine
  MOD_RES (268)..(268): Selenocysteine
  MOD_RES (275)..(275): Selenocysteine
  MOD_RES (285)..(285): Selenocysteine
  MOD_RES (299)..(299): Selenocysteine
  MOD_RES (319)..(319): Selenocysteine
  MOD_RES (342)..(342): Selenocysteine
  MOD_RES (344)..(344): Selenocysteine
  MOD_RES (348)..(348): Selenocysteine
  MOD_RES (350)..(350): Selenocysteine
  MOD_RES (369)..(369): Selenocysteine
  MOD_RES (373)..(373): Selenocysteine
  MOD_RES (375)..(375): Selenocysteine
  MOD_RES (381)..(381): Selenocysteine
  MOD_RES (383)..(383): Selenocysteine
  MOD_RES (385)..(385): Selenocysteine
  MOD_RES (390)..(390): Selenocysteine
  MOD_RES (405)..(406): Selenocysteine
  MOD_RES (412)..(412): Selenocysteine
  MOD_RES (420)..(420): Selenocysteine
  MOD_RES (488)..(488): Selenocysteine
  MOD_RES (498)..(498): Selenocysteine
  MOD_RES (523)..(523): Selenocysteine
  MOD_RES (582)..(583): Selenocysteine
  MOD_RES (620)..(620): Selenocysteine
  MOD_RES (626)..(626): Selenocysteine
  MOD_RES (643)..(643): Selenocysteine
  MOD_RES (671)..(671): Selenocysteine
  MOD_RES (677)..(677): Selenocysteine
  MOD_RES (689)..(689): Selenocysteine
  MOD_RES (696)..(696): Selenocysteine
  MOD_RES (718)..(718): Selenocysteine
  MOD_RES (763)..(763): Selenocysteine
  MOD_RES (782)..(782): Selenocysteine
  MOD_RES (784)..(784): Selenocysteine
  MOD_RES (791)..(791): Selenocysteine
  MOD_RES (807)..(807): Selenocysteine
  MOD_RES (809)..(809): Selenocysteine
  MOD_RES (817)..(817): Selenocysteine
  MOD_RES (844)..(844): Selenocysteine
  MOD_RES (897)..(897): Selenocysteine
  MOD_RES (910)..(910): Selenocysteine
  MOD_RES (920)..(920): Selenocysteine
  MOD_RES (923)..(923): Selenocysteine
  MOD_RES (942)..(942): Selenocysteine
  MOD_RES (965)..(965): Selenocysteine
  MOD_RES (1024)..(1024): Selenocysteine
MGSGGSDSYRIAXSQDKKDDKDSPKKNKGKERRDLDDLKKEVAMXEHKMSVEEVCRKYNXDCVQGLXHSKAQEILARDGPNALXPPPXXPEWVKFCRQLFGGFSILLWIGAILCFLAYGIQAGXEDDPSGDNLYLGIVLAAVVIIXGCFSYYQEAKSSKIMESFKNMVPQQALVIREGEKMQVNAEEVVVGDLVEIKGGDRVPADLRIISAHGCKVDNSSLXGESEPQXRSPDCXHDNPLEXRNIXFFSXNCVEGXARGVVVAXGDRXVMGRIAXLASGLEVGKXPIAIEIEHFIQLIXGVAVFLGVSFFILSLILGYXWLEAVIFLIGIIVANVPEGLLAXVXVCLXLXAKRMARKNCLVKNLEAVEXLGSXSXICSDKXGXLXQNRMXVAHMWFDNQIHEADXXEDQSGXSFDKSSHXWVALSHIAGLCNRAVFKGGQDNIPVLKRDVAGDASESALLKCIELSSGSVKLMRERNKKVAEIPFNSXNKYQLSIHEXEDPNDNRYLLVMKGAPERILDRCSXILLQGKEQPLDEEMKEAFQNAYLELGGLGERVLGFCHYYLPEEQFPKGFAFDCDDVNFXXDNLCFVGLMSMIDPPRAAVPDAVGKCRSAGIKVIMVXGDHPIXAKAIAKGVGIISEGNEXVEDIAARLNIPVSQVNPRDAKACVIHGXDLKDFXSEQIDEILQNHXEIVFARXSPQQKLIIVEGCQRQGAIVAVXGDGVNDSPALKKADIGVAMGIAGSDVSKQAADMILLDDNFASIVXGVEEGRLIFDNLKKSIAYXLXSNIPEIXPFLLFIMANIPLPLGXIXILCIDLGXDMVPAISLAYEAAESDIMKRQPRNPRXDKLVNERLISMAYGQIGMIQALGGFFSYFVILAENGFLPGNLVGIRLNWDDRXVNDLEDSYGQQWXYEQRKVVEFXCHXAFFVSIVVVQWADLIICKXRRNSVFQQGMKNKILIFGLFEEXALAAFLSYCPGMDVALRMYPLKPSWWFCAFPYSFLIFVYDEIRKLILRRNPGGWVEKEXYY

SEQ ID NO: 3515 - protein, 251 aa, Homo sapiens
  MOD_RES (2)..(2): Selenocysteine
  MOD_RES (17)..(17): Selenocysteine
  MOD_RES (24)..(24): Selenocysteine
  MOD_RES (41)..(41): Selenocysteine
  MOD_RES (45)..(46): Selenocysteine
  MOD_RES (81)..(81): Selenocysteine
  MOD_RES (103)..(103): Selenocysteine
  MOD_RES (179)..(179): Selenocysteine
  MOD_RES (186)..(186): Selenocysteine
  MOD_RES (192)..(192): Selenocysteine
  MOD_RES (199)..(199): Selenocysteine
  MOD_RES (203)..(203): Selenocysteine
  MOD_RES (207)..(207): Selenocysteine
  MOD_RES (213)..(213): Selenocysteine
  MOD_RES (221)..(221): Selenocysteine
  MOD_RES (225)..(225): Selenocysteine
  MOD_RES (232)..(232): Selenocysteine
  MOD_RES (242)..(242): Selenocysteine
MXEHKMSVEEVCRKYNXDCVQGLXHSKAQEILARDGPNALXPPPXXPEWVKFCRQLFGGFSILLWIGAILCFLAYGIQAGXEDDPSGDNLYLGIVLAAVVIIXGCFSYYQEAKSSKIMESFKNMVPQQALVIREGEKMQVNAEEVVVGDLVEIKGGDRVPADLRIISAHGCKVDNSSLXGESEPQXRSPDCXHDNPLEXRNIXFFSXNCVEGXARGVVVAXGDRXVMGRIAXLASGLEVGKXPIAIEIEHF

SEQ ID NO: 3516 - protein, 983 aa, Homo sapiens
  MOD_RES (2)..(2): Selenocysteine
  MOD_RES (17)..(17): Selenocysteine
  MOD_RES (24)..(24): Selenocysteine
  MOD_RES (41)..(41): Selenocysteine
  MOD_RES (45)..(46): Selenocysteine
  MOD_RES (81)..(81): Selenocysteine
  MOD_RES (103)..(103): Selenocysteine
  MOD_RES (179)..(179): Selenocysteine
  MOD_RES (186)..(186): Selenocysteine
  MOD_RES (192)..(192): Selenocysteine
  MOD_RES (199)..(199): Selenocysteine
  MOD_RES (203)..(203): Selenocysteine
  MOD_RES (207)..(207): Selenocysteine
  MOD_RES (213)..(213): Selenocysteine
  MOD_RES (221)..(221): Selenocysteine
  MOD_RES (225)..(225): Selenocysteine
  MOD_RES (232)..(232): Selenocysteine
  MOD_RES (242)..(242): Selenocysteine
  MOD_RES (256)..(256): Selenocysteine
  MOD_RES (276)..(276): Selenocysteine
  MOD_RES (299)..(299): Selenocysteine
  MOD_RES (301)..(301): Selenocysteine
  MOD_RES (305)..(305): Selenocysteine
  MOD_RES (307)..(307): Selenocysteine
  MOD_RES (326)..(326): Selenocysteine
  MOD_RES (330)..(330): Selenocysteine
  MOD_RES (332)..(332): Selenocysteine
  MOD_RES (338)..(338): Selenocysteine
  MOD_RES (340)..(340): Selenocysteine
  MOD_RES (342)..(342): Selenocysteine
  MOD_RES (347)..(347): Selenocysteine
  MOD_RES (362)..(363): Selenocysteine
  MOD_RES (369)..(369): Selenocysteine
  MOD_RES (377)..(377): Selenocysteine
  MOD_RES (445)..(445): Selenocysteine
  MOD_RES (455)..(455): Selenocysteine
  MOD_RES (480)..(480): Selenocysteine
  MOD_RES (539)..(540): Selenocysteine
  MOD_RES (577)..(577): Selenocysteine
  MOD_RES (583)..(583): Selenocysteine
  MOD_RES (600)..(600): Selenocysteine
  MOD_RES (628)..(628): Selenocysteine
  MOD_RES (634)..(634): Selenocysteine
  MOD_RES (646)..(646): Selenocysteine
  MOD_RES (653)..(653): Selenocysteine
  MOD_RES (675)..(675): Selenocysteine
  MOD_RES (720)..(720): Selenocysteine
  MOD_RES (739)..(739): Selenocysteine
  MOD_RES (741)..(741): Selenocysteine
  MOD_RES (748)..(748): Selenocysteine
  MOD_RES (764)..(764): Selenocysteine
  MOD_RES (766)..(766): Selenocysteine
  MOD_RES (774)..(774): Selenocysteine
  MOD_RES (801)..(801): Selenocysteine
  MOD_RES (854)..(854): Selenocysteine
  MOD_RES (867)..(867): Selenocysteine
  MOD_RES (877)..(877): Selenocysteine
  MOD_RES (880)..(880): Selenocysteine
  MOD_RES (899)..(899): Selenocysteine
  MOD_RES (922)..(922): Selenocysteine
  MOD_RES (981)..(981): Selenocysteine
MXEHKMSVEEVCRKYNXDCVQGLXHSKAQEILARDGPNALXPPPXXPEWVKFCRQLFGGFSILLWIGAILCFLAYGIQAGXEDDPSGDNLYLGIVLAAVVIIXGCFSYYQEAKSSKIMESFKNMVPQQALVIREGEKMQVNAEEVVVGDLVEIKGGDRVPADLRIISAHGCKVDNSSLXGESEPQXRSPDCXHDNPLEXRNIXFFSXNCVEGXARGVVVAXGDRXVMGRIAXLASGLEVGKXPIAIEIEHFIQLIXGVAVFLGVSFFILSLILGYXWLEAVIFLIGIIVANVPEGLLAXVXVCLXLXAKRMARKNCLVKNLEAVEXLGSXSXICSDKXGXLXQNRMXVAHMWFDNQIHEADXXEDQSGXSFDKSSHXWVALSHIAGLCNRAVFKGGQDNIPVLKRDVAGDASESALLKCIELSSGSVKLMRERNKKVAEIPFNSXNKYQLSIHEXEDPNDNRYLLVMKGAPERILDRCSXILLQGKEQPLDEEMKEAFQNAYLELGGLGERVLGFCHYYLPEEQFPKGFAFDCDDVNFXXDNLCFVGLMSMIDPPRAAVPDAVGKCRSAGIKVIMVXGDHPIXAKAIAKGVGIISEGNEXVEDIAARLNIPVSQVNPRDAKACVIHGXDLKDFXSEQIDEILQNHXEIVFARXSPQQKLIIVEGCQRQGAIVAVXGDGVNDSPALKKADIGVAMGIAGSDVSKQAADMILLDDNFASIVXGVEEGRLIFDNLKKSIAYXLXSNIPEIXPFLLFIMANIPLPLGXIXILCIDLGXDMVPAISLAYEAAESDIMKRQPRNPRXDKLVNERLISMAYGQIGMIQALGGFFSYFVILAENGFLPGNLVGIRLNWDDRXVNDLEDSYGQQWXYEQRKVVEFXCHXAFFVSIVVVQWADLIICKXRRNSVFQQGMKNKILIFGLFEEXALAAFLSYCPGMDVALRMYPLKPSWWFCAFPYSFLIFVYDEIRKLILRRNPGGWVEKEXYY

SEQ ID NO: 3517 - protein, 303 aa, Homo sapiens
  MOD_RES (28)..(28): Selenocysteine
  MOD_RES (53)..(53): Selenocysteine
  MOD_RES (60)..(60): Selenocysteine
  MOD_RES (67)..(67): Selenocysteine
  MOD_RES (78)..(78): Selenocysteine
  MOD_RES (86)..(86): Selenocysteine
  MOD_RES (166)..(166): Selenocysteine
  MOD_RES (198)..(198): Selenocysteine
  MOD_RES (214)..(214): Selenocysteine
  MOD_RES (264)..(264): Selenocysteine
  MOD_RES (267)..(267): Selenocysteine
  MOD_RES (270)..(270): Selenocysteine
MARGKAKEEGSWKKFIWNSEKKEFLGRXGGSWFKILLFYVIFYGCLAGIFIGXIQVMLLXISEFKPXYQDRVAPPGLXQIPQIQKXEISFRPNDPKSYEAYVLNIVRFLEKYKDSAQRDDMIFEDCGDVPSEPKERGDFNHERGERKVCRFKLEWLGNCSGLNDEXYGYKEGKPCIIIKLNRVLGFKPKPPKNESLEXYPVMKYNPNVLPVQCXGKRDEDKDKVGNVEYFGLGNSPGFPLQYYPYYGKLLQPKYLQPLLAVQFXNLXMDXEIRIECKAYGENIGYSEKDRFQGRFDVKIEVKS

SEQ ID NO: 3518 - protein, 130 aa, Homo sapiens
  MOD_RES (4)..(4): Selenocysteine
  MOD_RES (11)..(11): Selenocysteine
  MOD_RES (22)..(22): Selenocysteine
  MOD_RES (30)..(30): Selenocysteine
  MOD_RES (110)..(110): Selenocysteine
MLLXISEFKPXYQDRVAPPGLXQIPQIQKXEISFRPNDPKSYEAYVLNIVRFLEKYKDSAQRDDMIFEDCGDVPSEPKERGDFNHERGERKVCRFKLEWLGNCSGLNDEXYGYKEGKPCIIIKLNRVLGF

SEQ ID NO: 3519 - protein, 994 aa, Homo sapiens
  MOD_RES (8)..(9): Selenocysteine
  MOD_RES (21)..(22): Selenocysteine
  MOD_RES (25)..(25): Selenocysteine
  MOD_RES (48)..(48): Selenocysteine
  MOD_RES (84)..(84): Selenocysteine
  MOD_RES (86)..(86): Selenocysteine
  MOD_RES (171)..(172): Selenocysteine
  MOD_RES (181)..(181): Selenocysteine
  MOD_RES (191)..(191): Selenocysteine
  MOD_RES (212)..(212): Selenocysteine
  MOD_RES (225)..(226): Selenocysteine
  MOD_RES (230)..(230): Selenocysteine
  MOD_RES (242)..(242): Selenocysteine
  MOD_RES (247)..(247): Selenocysteine
  MOD_RES (316)..(317): Selenocysteine
  MOD_RES (323)..(323): Selenocysteine
  MOD_RES (341)..(341): Selenocysteine
  MOD_RES (345)..(345): Selenocysteine
  MOD_RES (353)..(353): Selenocysteine
  MOD_RES (355)..(355): Selenocysteine
  MOD_RES (357)..(358): Selenocysteine
  MOD_RES (385)..(385): Selenocysteine
  MOD_RES (388)..(388): Selenocysteine
  MOD_RES (415)..(415): Selenocysteine
  MOD_RES (441)..(441): Selenocysteine
  MOD_RES (443)..(443): Selenocysteine
  MOD_RES (446)..(447): Selenocysteine
  MOD_RES (457)..(457): Selenocysteine
  MOD_RES (484)..(484): Selenocysteine
  MOD_RES (532)..(533): Selenocysteine
  MOD_RES (538)..(538): Selenocysteine
  MOD_RES (554)..(554): Selenocysteine
  MOD_RES (558)..(558): Selenocysteine
  MOD_RES (566)..(566): Selenocysteine
  MOD_RES (569)..(569): Selenocysteine
  MOD_RES (589)..(589): Selenocysteine
  MOD_RES (592)..(592): Selenocysteine
  MOD_RES (608)..(608): Selenocysteine
  MOD_RES (625)..(625): Selenocysteine
  MOD_RES (631)..(631): Selenocysteine
  MOD_RES (654)..(654): Selenocysteine
  MOD_RES (698)..(698): Selenocysteine
  MOD_RES (701)..(701): Selenocysteine
  MOD_RES (724)..(724): Selenocysteine
  MOD_RES (729)..(729): Selenocysteine
  MOD_RES (742)..(742): Selenocysteine
  MOD_RES (778)..(778): Selenocysteine
  MOD_RES (799)..(799): Selenocysteine
  MOD_RES (805)..(805): Selenocysteine
  MOD_RES (848)..(848): Selenocysteine
  MOD_RES (871)..(871): Selenocysteine
  MOD_RES (877)..(877): Selenocysteine
  MOD_RES (881)..(881): Selenocysteine
  MOD_RES (898)..(898): Selenocysteine
  MOD_RES (906)..(906): Selenocysteine
  MOD_RES (965)..(965): Selenocysteine
MEAAHAKXXEECLAYFGVSEXXGLXPDQVKRNLEKYGLNELPAEEGKXLWELVIEQFEDLLVRILLLAACISFVLAWFEEGEEXIXAFVEPFVILLILIANAIVGVWQERNAENAIEALKEYEPEMGKVYRADRKSVQRIKARDIVPGDIVEVAVGDKVPADIRILAIKSXXLRVDQSILXGESVSVIKHXEPVPDPRAVNQDKKNMLFSGXNIAAGKALGIVAXXGVGXEIGKIRDQMAAXEQDKXPLQQKLDEFGEQLSKVISLICVAVWLINIGHFNDPVHGGSWFRGAIYYFKIAVALAVAAIPEGLPAVIXXCLALGXRRMAKKNAIVRSLPSVEXLGCXSVICSDKXGXLXXNQMSVCKMFIIDKVDGDICLLNEFSIXGSXYAPEGEVLKNDKPVRPGQYDGLVELAXICALCNDSSLDFNEAKGVYEKVGEAXEXALXXLVEKMNVFNXDVRSLSKVERANACNSVIRQLMKKEFXLEFSRDRKSMSVYCSPAKSSRAAVGNKMFVKGAPEGVIDRCNYVRVGXXRVPLXGPVKEKIMAVIKEWGXGRDXLRCLALAXRDXPPKREEMVLDDSARFLEYEXDLXFVGVVGMLDPPRKEVXGSIQLCRDAGIRVIMIXGDNKGXAIAICRRIGIFGENEEVADRAYXGREFDDLPLAEQREACRRACCFARVEPSHKSKIVEYLQSYDEIXAMXGDGVNDAPALKKAEIGIAMGSGXAVAKXASEMVLADDNFSXIVAAVEEGRAIYNNMKQFIRYLISSNVGEVVCIFLXAALGLPEALIPVQLLWVNLVXDGLPAXALGFNPPDLDIMDRPPRSPKEPLISGWLFFRYMAIGGYVGAAXVGAAAWWFLYAEDGPHVNYSQLXHFMQCXEDNXHFEGIDCEVFEAPEPMXMALSVLVXIEMCNALNSLSENQSLLRMPPWVNIWLLGSICLSMSLHFLILYVDPLPMIFKLRALDLXQWLMVLKISLPVIGLDEILKFVARNYLEG

SEQ ID NO: 3520 - protein, 1001 aa, Homo sapiens
  MOD_RES (8)..(9): Selenocysteine
  MOD_RES (21)..(22): Selenocysteine
  MOD_RES (25)..(25): Selenocysteine
  MOD_RES (48)..(48): Selenocysteine
  MOD_RES (84)..(84): Selenocysteine
  MOD_RES (86)..(86): Selenocysteine
  MOD_RES (171)..(172): Selenocysteine
  MOD_RES (181)..(181): Selenocysteine
  MOD_RES (191)..(191): Selenocysteine
  MOD_RES (212)..(212): Selenocysteine
  MOD_RES (225)..(226): Selenocysteine
  MOD_RES (230)..(230): Selenocysteine
  MOD_RES (242)..(242): Selenocysteine
  MOD_RES (247)..(247): Selenocysteine
  MOD_RES (316)..(317): Selenocysteine
  MOD_RES (323)..(323): Selenocysteine
  MOD_RES (341)..(341): Selenocysteine
  MOD_RES (345)..(345): Selenocysteine
  MOD_RES (353)..(353): Selenocysteine
  MOD_RES (355)..(355): Selenocysteine
  MOD_RES (357)..(358): Selenocysteine
  MOD_RES (385)..(385): Selenocysteine
  MOD_RES (388)..(388): Selenocysteine
  MOD_RES (415)..(415): Selenocysteine
  MOD_RES (441)..(441): Selenocysteine
  MOD_RES (443)..(443): Selenocysteine
  MOD_RES (446)..(447): Selenocysteine
  MOD_RES (457)..(457): Selenocysteine
  MOD_RES (484)..(484): Selenocysteine
  MOD_RES (532)..(533): Selenocysteine
  MOD_RES (538)..(538): Selenocysteine
  MOD_RES (554)..(554): Selenocysteine
  MOD_RES (558)..(558): Selenocysteine
  MOD_RES (566)..(566): Selenocysteine
  MOD_RES (569)..(569): Selenocysteine
  MOD_RES (589)..(589): Selenocysteine
  MOD_RES (592)..(592): Selenocysteine
  MOD_RES (608)..(608): Selenocysteine
  MOD_RES (625)..(625): Selenocysteine
  MOD_RES (631)..(631): Selenocysteine
  MOD_RES (654)..(654): Selenocysteine
  MOD_RES (698)..(698): Selenocysteine
  MOD_RES (701)..(701): Selenocysteine
  MOD_RES (724)..(724): Selenocysteine
  MOD_RES (729)..(729): Selenocysteine
  MOD_RES (742)..(742): Selenocysteine
  MOD_RES (778)..(778): Selenocysteine
  MOD_RES (799)..(799): Selenocysteine
  MOD_RES (805)..(805): Selenocysteine
  MOD_RES (848)..(848): Selenocysteine
  MOD_RES (871)..(871): Selenocysteine
  MOD_RES (877)..(877): Selenocysteine
  MOD_RES (881)..(881): Selenocysteine
  MOD_RES (898)..(898): Selenocysteine
  MOD_RES (906)..(906): Selenocysteine
  MOD_RES (965)..(965): Selenocysteine
MEAAHAKXXEECLAYFGVSEXXGLXPDQVKRNLEKYGLNELPAEEGKXLWELVIEQFEDLLVRILLLAACISFVLAWFEEGEEXIXAFVEPFVILLILIANAIVGVWQERNAENAIEALKEYEPEMGKVYRADRKSVQRIKARDIVPGDIVEVAVGDKVPADIRILAIKSXXLRVDQSILXGESVSVIKHXEPVPDPRAVNQDKKNMLFSGXNIAAGKALGIVAXXGVGXEIGKIRDQMAAXEQDKXPLQQKLDEFGEQLSKVISLICVAVWLINIGHFNDPVHGGSWFRGAIYYFKIAVALAVAAIPEGLPAVIXXCLALGXRRMAKKNAIVRSLPSVEXLGCXSVICSDKXGXLXXNQMSVCKMFIIDKVDGDICLLNEFSIXGSXYAPEGEVLKNDKPVRPGQYDGLVELAXICALCNDSSLDFNEAKGVYEKVGEAXEXALXXLVEKMNVFNXDVRSLSKVERANACNSVIRQLMKKEFXLEFSRDRKSMSVYCSPAKSSRAAVGNKMFVKGAPEGVIDRCNYVRVGXXRVPLXGPVKEKIMAVIKEWGXGRDXLRCLALAXRDXPPKREEMVLDDSARFLEYEXDLXFVGVVGMLDPPRKEVXGSIQLCRDAGIRVIMIXGDNKGXAIAICRRIGIFGENEEVADRAYXGREFDDLPLAEQREACRRACCFARVEPSHKSKIVEYLQSYDEIXAMXGDGVNDAPALKKAEIGIAMGSGXAVAKXASEMVLADDNFSXIVAAVEEGRAIYNNMKQFIRYLISSNVGEVVCIFLXAALGLPEALIPVQLLWVNLVXDGLPAXALGFNPPDLDIMDRPPRSPKEPLISGWLFFRYMAIGGYVGAAXVGAAAWWFLYAEDGPHVNYSQLXHFMQCXEDNXHFEGIDCEVFEAPEPMXMALSVLVXIEMCNALNSLSENQSLLRMPPWVNIWLLGSICLSMSLHFLILYVDPLPMIFKLRALDLXQWLMVLKISLPVIGLDEILKFVARNYLEDPEDERRK

SEQ ID NO: 3521 - protein, 26 aa, Homo sapiens
MGKVYRADRKSVQRIKARDIVPGDIV

SEQ ID NO: 3522 - protein, 869 aa, Homo sapiens
  MOD_RES (46)..(47): Selenocysteine
  MOD_RES (56)..(56): Selenocysteine
  MOD_RES (66)..(66): Selenocysteine
  MOD_RES (87)..(87): Selenocysteine
  MOD_RES (100)..(101): Selenocysteine
  MOD_RES (105)..(105): Selenocysteine
  MOD_RES (117)..(117): Selenocysteine
  MOD_RES (122)..(122): Selenocysteine
  MOD_RES (191)..(192): Selenocysteine
  MOD_RES (198)..(198): Selenocysteine
  MOD_RES (216)..(216): Selenocysteine
  MOD_RES (220)..(220): Selenocysteine
  MOD_RES (228)..(228): Selenocysteine
  MOD_RES (230)..(230): Selenocysteine
  MOD_RES (232)..(233): Selenocysteine
  MOD_RES (260)..(260): Selenocysteine
  MOD_RES (263)..(263): Selenocysteine
  MOD_RES (290)..(290): Selenocysteine
  MOD_RES (316)..(316): Selenocysteine
  MOD_RES (318)..(318): Selenocysteine
  MOD_RES (321)..(322): Selenocysteine
  MOD_RES (332)..(332): Selenocysteine
  MOD_RES (359)..(359): Selenocysteine
  MOD_RES (407)..(408): Selenocysteine
  MOD_RES (413)..(413): Selenocysteine
  MOD_RES (429)..(429): Selenocysteine
  MOD_RES (433)..(433): Selenocysteine
  MOD_RES (441)..(441): Selenocysteine
  MOD_RES (444)..(444): Selenocysteine
  MOD_RES (464)..(464): Selenocysteine
  MOD_RES (467)..(467): Selenocysteine
  MOD_RES (483)..(483): Selenocysteine
  MOD_RES (500)..(500): Selenocysteine
  MOD_RES (506)..(506): Selenocysteine
  MOD_RES (529)..(529): Selenocysteine
  MOD_RES (573)..(573): Selenocysteine
  MOD_RES (576)..(576): Selenocysteine
  MOD_RES (599)..(599): Selenocysteine
  MOD_RES (604)..(604): Selenocysteine
  MOD_RES (617)..(617): Selenocysteine
  MOD_RES (653)..(653): Selenocysteine
  MOD_RES (674)..(674): Selenocysteine
  MOD_RES (680)..(680): Selenocysteine
  MOD_RES (723)..(723): Selenocysteine
  MOD_RES (746)..(746): Selenocysteine
  MOD_RES (752)..(752): Selenocysteine
  MOD_RES (756)..(756): Selenocysteine
  MOD_RES (773)..(773): Selenocysteine
  MOD_RES (781)..(781): Selenocysteine
  MOD_RES (840)..(840): Selenocysteine
MGKVYRADRKSVQRIKARDIVPGDIVEVAVGDKVPADIRILAIKSXXLRVDQSILXGESVSVIKHXEPVPDPRAVNQDKKNMLFSGXNIAAGKALGIVAXXGVGXEIGKIRDQMAAXEQDKXPLQQKLDEFGEQLSKVISLICVAVWLINIGHFNDPVHGGSWFRGAIYYFKIAVALAVAAIPEGLPAVIXXCLALGXRRMAKKNAIVRSLPSVEXLGCXSVICSDKXGXLXXNQMSVCKMFIIDKVDGDICLLNEFSIXGSXYAPEGEVLKNDKPVRPGQYDGLVELAXICALCNDSSLDFNEAKGVYEKVGEAXEXALXXLVEKMNVFNXDVRSLSKVERANACNSVIRQLMKKEFXLEFSRDRKSMSVYCSPAKSSRAAVGNKMFVKGAPEGVIDRCNYVRVGXXRVPLXGPVKEKIMAVIKEWGXGRDXLRCLALAXRDXPPKREEMVLDDSARFLEYEXDLXFVGVVGMLDPPRKEVXGSIQLCRDAGIRVIMIXGDNKGXAIAICRRIGIFGENEEVADRAYXGREFDDLPLAEQREACRRACCFARVEPSHKSKIVEYLQSYDEIXAMXGDGVNDAPALKKAEIGIAMGSGXAVAKXASEMVLADDNFSXIVAAVEEGRAIYNNMKQFIRYLISSNVGEVVCIFLXAALGLPEALIPVQLLWVNLVXDGLPAXALGFNPPDLDIMDRPPRSPKEPLISGWLFFRYMAIGGYVGAAXVGAAAWWFLYAEDGPHVNYSQLXHFMQCXEDNXHFEGIDCEVFEAPEPMXMALSVLVXIEMCNALNSLSENQSLLRMPPWVNIWLLGSICLSMSLHFLILYVDPLPMIFKLRALDLXQWLMVLKISLPVIGLDEILKFVARNYLEG

SEQ ID NO: 3523 - protein, 114 aa, Homo sapiens
  MOD_RES (20)..(20): Selenocysteine
  MOD_RES (56)..(56): Selenocysteine
  MOD_RES (58)..(58): Selenocysteine
MNLSFSSFSWVELPAEEGKXLWELVIEQFEDLLVRILLLAACISFVLAWFEEGEEXIXAFVEPFVILLILIANAIVGVWQERNAENAIEALKEYEPEMGKVYRADRKSVQRIKA

SEQ ID NO: 3524 - protein, 41 aa, Homo sapiens
  MOD_RES (7)..(7): Selenocysteine
  MOD_RES (9)..(9): Selenocysteine
  MOD_RES (11)..(12): Selenocysteine
  MOD_RES (24)..(24): Selenocysteine
  MOD_RES (33)..(33): Selenocysteine
VICSDKXGXLXXNQMSVCKGLPLXSGQEPLPFXEFCGRLHP

SEQ ID NO: 3525 - protein, 128 aa, Homo sapiens
  MOD_RES (1)..(1): Any amino acid
  MOD_RES (27)..(28): Selenocysteine
  MOD_RES (34)..(34): Selenocysteine
  MOD_RES (52)..(52): Selenocysteine
  MOD_RES (56)..(56): Selenocysteine
  MOD_RES (64)..(64): Selenocysteine
  MOD_RES (66)..(66): Selenocysteine
  MOD_RES (68)..(69): Selenocysteine
  MOD_RES (96)..(96): Selenocysteine
  MOD_RES (99)..(99): Selenocysteine
XGAIYYFKIAVALAVAAIPEGLPAVIXXCLALGXRRMAKKNAIVRSLPSVEXLGCXSVICSDKXGXLXXNQMSVCKMFIIDKVDGDICLLNEFSIXGSXYAPEGEVPKVSMRRSARPPRQHSPPWWRR

SEQ ID NO: 3526 - protein, 24 aa, Homo sapiens
  MOD_RES (1)..(1): Any amino acid
XKISLPVIGLDEILKFVARNYLEG

SEQ ID NO: 3527 - protein, 46 aa, Homo sapiens
  MOD_RES (6)..(6): Selenocysteine
  MOD_RES (11)..(11): Selenocysteine
  MOD_RES (29)..(29): Selenocysteine
LIFQIXPLNVXQWLMVLKISLPVILMDEXLKFVARNYLEPVLSSEL

SEQ ID NO: 3528 - protein, 997 aa, Homo sapiens
  MOD_RES (6)..(6): Selenocysteine
  MOD_RES (8)..(8): Selenocysteine
  MOD_RES (22)..(22): Selenocysteine
  MOD_RES (48)..(48): Selenocysteine
  MOD_RES (84)..(84): Selenocysteine
  MOD_RES (86)..(86): Selenocysteine
  MOD_RES (166)..(166): Selenocysteine
  MOD_RES (171)..(172): Selenocysteine
  MOD_RES (181)..(181): Selenocysteine
  MOD_RES (191)..(191): Selenocysteine
  MOD_RES (212)..(212): Selenocysteine
  MOD_RES (226)..(226): Selenocysteine
  MOD_RES (230)..(230): Selenocysteine
  MOD_RES (242)..(242): Selenocysteine
  MOD_RES (247)..(247): Selenocysteine
  MOD_RES (316)..(317): Selenocysteine
  MOD_RES (323)..(323): Selenocysteine
  MOD_RES (341)..(341): Selenocysteine
  MOD_RES (345)..(345): Selenocysteine
  MOD_RES (353)..(353): Selenocysteine
  MOD_RES (355)..(355): Selenocysteine
  MOD_RES (357)..(358): Selenocysteine
  MOD_RES (376)..(376): Selenocysteine
  MOD_RES (383)..(383): Selenocysteine
  MOD_RES (385)..(385): Selenocysteine
  MOD_RES (388)..(388): Selenocysteine
  MOD_RES (415)..(415): Selenocysteine
  MOD_RES (441)..(441): Selenocysteine
  MOD_RES (443)..(443): Selenocysteine
  MOD_RES (446)..(446): Selenocysteine
  MOD_RES (457)..(457): Selenocysteine
  MOD_RES (484)..(484): Selenocysteine
  MOD_RES (499)..(499): Selenocysteine
  MOD_RES (506)..(506): Selenocysteine
  MOD_RES (525)..(525): Selenocysteine
  MOD_RES (532)..(532): Selenocysteine
  MOD_RES (537)..(537): Selenocysteine
  MOD_RES (557)..(557): Selenocysteine
  MOD_RES (565)..(565): Selenocysteine
  MOD_RES (588)..(588): Selenocysteine
  MOD_RES (591)..(591): Selenocysteine
  MOD_RES (624)..(624): Selenocysteine
  MOD_RES (630)..(630): Selenocysteine
  MOD_RES (648)..(648): Selenocysteine
  MOD_RES (653)..(653): Selenocysteine
  MOD_RES (697)..(697): Selenocysteine
  MOD_RES (700)..(700): Selenocysteine
  MOD_RES (723)..(723): Selenocysteine
  MOD_RES (728)..(728): Selenocysteine
  MOD_RES (741)..(741): Selenocysteine
  MOD_RES (777)..(777): Selenocysteine
  MOD_RES (798)..(798): Selenocysteine
  MOD_RES (804)..(804): Selenocysteine
  MOD_RES (847)..(847): Selenocysteine
  MOD_RES (897)..(897): Selenocysteine
  MOD_RES (905)..(905): Selenocysteine
  MOD_RES (959)..(959): Selenocysteine
  MOD_RES (964)..(964): Selenocysteine
  MOD_RES (982)..(982): Selenocysteine
MENAHXKXVEEVLGHFGVNESXGLSLEQVKKLKERWGSNELPAEEGKXLLELVIEQFEDLLVRILLLAACISFVLAWFEEGEEXIXAFVEPFVILLILVANAIVGVWQERNAENAIEALKEYEPEMGKVYRQDRKSVQRIKAKDIVPGDIVEIAVGDKVPADIRLXSIKSXXLRVDQSILXGESVSVIKHXDPVPDPRAVNQDKKNMLFSGXNIAAGKAMGVVVAXGVNXEIGKIRDEMVAXEQERXPLQQKLDEFGEQLSKVISLICIAVWIINIGHFNDPVHGGSWIRGAIYYFKIAVALAVAAIPEGLPAVIXXCLALGXRRMAKKNAIVRSLPSVEXLGCXSVICSDKXGXLXXNQMSVCRMFILDRVEGDXCSLNEFXIXGSXYAPIGEVHKDDKPVNCHQYDGLVELAXICALCNDSALDYNEAKGVYEKVGEAXEXALXCLVEKMNVFDXELKGLSKIERANACNSVIKQLMKKEFXLEFSRDRKSMSVYCXPNKPSRXSMSKMFVKGAPEGVIDRCXHIRVGSXKVPMXSGVKQKIMSVIREWGSGSDXLRCLALAXHDNPLRREEMHLEDSANFIKYEXNLXFVGCVGMLDPPRIEVASSVKLCRQAGIRVIMIXGDNKGXAVAICRRIGIFGQDEDVXSKAFXGREFDELNPSAQRDACLNARCFARVEPSHKSKIVEFLQSFDEIXAMXGDGVNDAPALKKAEIGIAMGSGXAVAKXASEMVLADDNFSXIVAAVEEGRAIYNNMKQFIRYLISSNVGEVVCIFLXAALGFPEALIPVQLLWVNLVXDGLPAXALGFNPPDLDIMNKPPRNPKEPLISGWLFFRYLAIGCYVGAAXVGAAAWWFIAADGGPRVSFYQLSHFLQCKEDNPDFEGVDCAIFESPYPMXMALSVLVXIEMCNALNSLSENQSLLRMPPWENIWLVGSICLSMSLHFLILYVEPLPLIFQIXPLNVXQWLMVLKISLPVILMDEXLKFVARNYLEPAILE

SEQ ID NO: 3529 - protein, 1042 aa, Homo sapiens
  MOD_RES (6)..(6): Selenocysteine
  MOD_RES (8)..(8): Selenocysteine
  MOD_RES (22)..(22): Selenocysteine
  MOD_RES (48)..(48): Selenocysteine
  MOD_RES (84)..(84): Selenocysteine
  MOD_RES (86)..(86): Selenocysteine
  MOD_RES (166)..(166): Selenocysteine
  MOD_RES (171)..(172): Selenocysteine
  MOD_RES (181)..(181): Selenocysteine
  MOD_RES (191)..(191): Selenocysteine
  MOD_RES (212)..(212): Selenocysteine
  MOD_RES (226)..(226): Selenocysteine
  MOD_RES (230)..(230): Selenocysteine
  MOD_RES (242)..(242): Selenocysteine
  MOD_RES (247)..(247): Selenocysteine
  MOD_RES (316)..(317): Selenocysteine
  MOD_RES (323)..(323): Selenocysteine
  MOD_RES (341)..(341): Selenocysteine
  MOD_RES (345)..(345): Selenocysteine
  MOD_RES (353)..(353): Selenocysteine
  MOD_RES (355)..(355): Selenocysteine
  MOD_RES (357)..(358): Selenocysteine
  MOD_RES (376)..(376): Selenocysteine
  MOD_RES (383)..(383): Selenocysteine
  MOD_RES (385)..(385): Selenocysteine
  MOD_RES (388)..(388): Selenocysteine
  MOD_RES (415)..(415): Selenocysteine
  MOD_RES (441)..(441): Selenocysteine
  MOD_RES (443)..(443): Selenocysteine
  MOD_RES (446)..(446): Selenocysteine
  MOD_RES (457)..(457): Selenocysteine
  MOD_RES (484)..(484): Selenocysteine
  MOD_RES (499)..(499): Selenocysteine
  MOD_RES (506)..(506): Selenocysteine
  MOD_RES (525)..(525): Selenocysteine
  MOD_RES (532)..(532): Selenocysteine
  MOD_RES (537)..(537): Selenocysteine
  MOD_RES (557)..(557): Selenocysteine
  MOD_RES (565)..(565): Selenocysteine
  MOD_RES (588)..(588): Selenocysteine
  MOD_RES (591)..(591): Selenocysteine
  MOD_RES (624)..(624): Selenocysteine
  MOD_RES (630)..(630): Selenocysteine
  MOD_RES (648)..(648): Selenocysteine
  MOD_RES (653)..(653): Selenocysteine
  MOD_RES (697)..(697): Selenocysteine
  MOD_RES (700)..(700): Selenocysteine
  MOD_RES (723)..(723): Selenocysteine
  MOD_RES (728)..(728): Selenocysteine
  MOD_RES (741)..(741): Selenocysteine
  MOD_RES (777)..(777): Selenocysteine
  MOD_RES (798)..(798): Selenocysteine
  MOD_RES (804)..(804): Selenocysteine
  MOD_RES (847)..(847): Selenocysteine
  MOD_RES (897)..(897): Selenocysteine
  MOD_RES (905)..(905): Selenocysteine
  MOD_RES (959)..(959): Selenocysteine
  MOD_RES (964)..(964): Selenocysteine
  MOD_RES (982)..(982): Selenocysteine
  MOD_RES (1002)..(1002): Selenocysteine
  MOD_RES (1011)..(1011): Selenocysteine
  MOD_RES (1032)..(1032): Selenocysteine
  MOD_RES (1034)..(1034): Selenocysteine
MENAHXKXVEEVLGHFGVNESXGLSLEQVKKLKERWGSNELPAEEGKXLLELVIEQFEDLLVRILLLAACISFVLAWFEEGEEXIXAFVEPFVILLILVANAIVGVWQERNAENAIEALKEYEPEMGKVYRQDRKSVQRIKAKDIVPGDIVEIAVGDKVPADIRLXSIKSXXLRVDQSILXGESVSVIKHXDPVPDPRAVNQDKKNMLFSGXNIAAGKAMGVVVAXGVNXEIGKIRDEMVAXEQERXPLQQKLDEFGEQLSKVISLICIAVWIINIGHFNDPVHGGSWIRGAIYYFKIAVALAVAAIPEGLPAVIXXCLALGXRRMAKKNAIVRSLPSVEXLGCXSVICSDKXGXLXXNQMSVCRMFILDRVEGDXCSLNEFXIXGSXYAPIGEVHKDDKPVNCHQYDGLVELAXICALCNDSALDYNEAKGVYEKVGEAXEXALXCLVEKMNVFDXELKGLSKIERANACNSVIKQLMKKEFXLEFSRDRKSMSVYCXPNKPSRXSMSKMFVKGAPEGVIDRCXHIRVGSXKVPMXSGVKQKIMSVIREWGSGSDXLRCLALAXHDNPLRREEMHLEDSANFIKYEXNLXFVGCVGMLDPPRIEVASSVKLCRQAGIRVIMIXGDNKGXAVAICRRIGIFGQDEDVXSKAFXGREFDELNPSAQRDACLNARCFARVEPSHKSKIVEFLQSFDEIXAMXGDGVNDAPALKKAEIGIAMGSGXAVAKXASEMVLADDNFSXIVAAVEEGRAIYNNMKQFIRYLISSNVGEVVCIFLXAALGFPEALIPVQLLWVNLVXDGLPAXALGFNPPDLDIMNKPPRNPKEPLISGWLFFRYLAIGCYVGAAXVGAAAWWFIAADGGPRVSFYQLSHFLQCKEDNPDFEGVDCAIFESPYPMXMALSVLVXIEMCNALNSLSENQSLLRMPPWENIWLVGSICLSMSLHFLILYVEPLPLIFQIXPLNVXQWLMVLKISLPVILMDEXLKFVARNYLEPGKECVQPAXKSCSFSACXDGISWPFVLLIMPLVIWVYSXDXNFSDMFWS

SEQ ID NO: 3530 - protein, 50 aa, Homo sapiens
  MOD_RES (6)..(6): Selenocysteine
  MOD_RES (8)..(8): Selenocysteine
  MOD_RES (22)..(22): Selenocysteine
MENAHXKXVEEVLGHFGVNESXGLSLEQVKKLKERWGSNGRCREKPCWNL

SEQ ID NO: 3531 - protein, 44 aa, Homo sapiens
  MOD_RES (33)..(33): Selenocysteine
  MOD_RES (44)..(44): Selenocysteine
MQLWVYGRKEMLKMPSKPLRNMSLKWAKCIDRXERVCSGLKLKX

SEQ ID NO: 3532 - protein, 933 aa, Homo sapiens
  MOD_RES (1)..(1): Any amino acid
  MOD_RES (2)..(2): Selenocysteine
  MOD_RES (4)..(4): Selenocysteine
  MOD_RES (82)..(82): Selenocysteine
  MOD_RES (103)..(103): Selenocysteine
  MOD_RES (117)..(117): Selenocysteine
  MOD_RES (121)..(121): Selenocysteine
  MOD_RES (133)..(133): Selenocysteine
  MOD_RES (138)..(138): Selenocysteine
  MOD_RES (207)..(208): Selenocysteine
  MOD_RES (214)..(214): Selenocysteine
  MOD_RES (232)..(232): Selenocysteine
  MOD_RES (236)..(236): Selenocysteine
  MOD_RES (244)..(244): Selenocysteine
  MOD_RES (246)..(246): Selenocysteine
  MOD_RES (248)..(249): Selenocysteine
  MOD_RES (267)..(267): Selenocysteine
  MOD_RES (274)..(274): Selenocysteine
  MOD_RES (276)..(276): Selenocysteine
  MOD_RES (279)..(279): Selenocysteine
  MOD_RES (306)..(306): Selenocysteine
  MOD_RES (332)..(332): Selenocysteine
  MOD_RES (334)..(334): Selenocysteine
  MOD_RES (337)..(337): Selenocysteine
  MOD_RES (348)..(348): Selenocysteine
  MOD_RES (375)..(375): Selenocysteine
  MOD_RES (390)..(390): Selenocysteine
  MOD_RES (397)..(397): Selenocysteine
  MOD_RES (416)..(416): Selenocysteine
  MOD_RES (423)..(423): Selenocysteine
  MOD_RES (428)..(428): Selenocysteine
  MOD_RES (448)..(448): Selenocysteine
  MOD_RES (456)..(456): Selenocysteine
  MOD_RES (479)..(479): Selenocysteine
  MOD_RES (482)..(482): Selenocysteine
  MOD_RES (515)..(515): Selenocysteine
  MOD_RES (521)..(521): Selenocysteine
  MOD_RES (539)..(539): Selenocysteine
  MOD_RES (544)..(544): Selenocysteine
  MOD_RES (588)..(588): Selenocysteine
  MOD_RES (591)..(591): Selenocysteine
  MOD_RES (614)..(614): Selenocysteine
  MOD_RES (619)..(619): Selenocysteine
  MOD_RES (632)..(632): Selenocysteine
  MOD_RES (668)..(668): Selenocysteine
  MOD_RES (689)..(689): Selenocysteine
  MOD_RES (695)..(695): Selenocysteine
  MOD_RES (738)..(738): Selenocysteine
  MOD_RES (788)..(788): Selenocysteine
  MOD_RES (796)..(796): Selenocysteine
  MOD_RES (850)..(850): Selenocysteine
  MOD_RES (855)..(855): Selenocysteine
  MOD_RES (873)..(873): Selenocysteine
  MOD_RES (893)..(893): Selenocysteine
  MOD_RES (902)..(902): Selenocysteine
  MOD_RES (923)..(923): Selenocysteine
  MOD_RES (925)..(925): Selenocysteine
XXIXAFVEPFVILLILVANAIVGVWQERNAENAIEALKEYEPEMGKVYRQDRKSVQRIKAKDIVPGDIVEIAGESVSVIKHXDPVPDPRAVNQDKKNMLFSGXNIAAGKAMGVVVAXGVNXEIGKIRDEMVAXEQERXPLQQKLDEFGEQLSKVISLICIAVWIINIGHFNDPVHGGSWIRGAIYYFKIAVALAVAAIPEGLPAVIXXCLALGXRRMAKKNAIVRSLPSVEXLGCXSVICSDKXGXLXXNQMSVCRMFILDRVEGDXCSLNEFXIXGSXYAPIGEVHKDDKPVNCHQYDGLVELAXICALCNDSALDYNEAKGVYEKVGEAXEXALXCLVEKMNVFDXELKGLSKIERANACNSVIKQLMKKEFXLEFSRDRKSMSVYCXPNKPSRXSMSKMFVKGAPEGVIDRCXHIRVGSXKVPMXSGVKQKIMSVIREWGSGSDXLRCLALAXHDNPLRREEMHLEDSANFIKYEXNLXFVGCVGMLDPPRIEVASSVKLCRQAGIRVIMIXGDNKGXAVAICRRIGIFGQDEDVXSKAFXGREFDELNPSAQRDACLNARCFARVEPSHKSKIVEFLQSFDEIXAMXGDGVNDAPALKKAEIGIAMGSGXAVAKXASEMVLADDNFSXIVAAVEEGRAIYNNMKQFIRYLISSNVGEVVCIFLXAALGFPEALIPVQLLWVNLVXDGLPAXALGFNPPDLDIMNKPPRNPKEPLISGWLFFRYLAIGCYVGAAXVGAAAWWFIAADGGPRVSFYQLSHFLQCKEDNPDFEGVDCAIFESPYPMXMALSVLVXIEMCNALNSLSENQSLLRMPPWENIWLVGSICLSMSLHFLILYVEPLPLIFQIXPLNVXQWLMVLKISLPVILMDEXLKFVARNYLEPGKECVQPAXKSCSFSACXDGISWPFVLLIMPLVIWVYSXDXNFSDMFWS

SEQ ID NO: 3533 - protein, 1170 aa, Homo sapiens
  MOD_RES (2)..(2): Selenocysteine
  MOD_RES (25)..(25): Selenocysteine
  MOD_RES (42)..(42): Selenocysteine
  MOD_RES (60)..(60): Selenocysteine
  MOD_RES (92)..(92): Selenocysteine
  MOD_RES (105)..(105): Selenocysteine
  MOD_RES (137)..(138): Selenocysteine
  MOD_RES (166)..(166): Selenocysteine
  MOD_RES (240)..(240): Selenocysteine
  MOD_RES (260)..(260): Selenocysteine
  MOD_RES (272)..(272): Selenocysteine
  MOD_RES (280)..(280): Selenocysteine
  MOD_RES (285)..(285): Selenocysteine
  MOD_RES (315)..(315): Selenocysteine
  MOD_RES (357)..(357): Selenocysteine
  MOD_RES (374)..(374): Selenocysteine
  MOD_RES (399)..(399): Selenocysteine
  MOD_RES (415)..(415): Selenocysteine
  MOD_RES (430)..(430): Selenocysteine
  MOD_RES (455)..(455): Selenocysteine
  MOD_RES (460)..(460): Selenocysteine
  MOD_RES (467)..(467): Selenocysteine
  MOD_RES (469)..(469): Selenocysteine
  MOD_RES (471)..(471): Selenocysteine
  MOD_RES (476)..(476): Selenocysteine
  MOD_RES (515)..(515): Selenocysteine
  MOD_RES (535)..(535): Selenocysteine
  MOD_RES (544)..(544): Selenocysteine
  MOD_RES (567)..(567): Selenocysteine
  MOD_RES (577)..(577): Selenocysteine
  MOD_RES (625)..(625): Selenocysteine
  MOD_RES (637)..(637): Selenocysteine
  MOD_RES (648)..(648): Selenocysteine
  MOD_RES (660)..(660): Selenocysteine
  MOD_RES (663)..(663): Selenocysteine
  MOD_RES (691)..(691): Selenocysteine
  MOD_RES (696)..(696): Selenocysteine
  MOD_RES (702)..(702): Selenocysteine
  MOD_RES (708)..(708): Selenocysteine
  MOD_RES (714)..(714): Selenocysteine
  MOD_RES (759)..(759): Selenocysteine
  MOD_RES (763)..(763): Selenocysteine
  MOD_RES (772)..(772): Selenocysteine
  MOD_RES (783)..(783): Selenocysteine
  MOD_RES (787)..(787): Selenocysteine
  MOD_RES (807)..(807): Selenocysteine
  MOD_RES (819)..(819): Selenocysteine
  MOD_RES (824)..(824): Selenocysteine
  MOD_RES (849)..(849): Selenocysteine
  MOD_RES (860)..(860): Selenocysteine
  MOD_RES (865)..(865): Selenocysteine
  MOD_RES (884)..(884): Selenocysteine
  MOD_RES (892)..(892): Selenocysteine
  MOD_RES (896)..(896): Selenocysteine
  MOD_RES (915)..(915): Selenocysteine
  MOD_RES (961)..(961): Selenocysteine
  MOD_RES (966)..(966): Selenocysteine
  MOD_RES (1004)..(1004): Selenocysteine
  MOD_RES (1022)..(1022): Selenocysteine
  MOD_RES (1051)..(1051): Selenocysteine
  MOD_RES (1064)..(1065): Selenocysteine
  MOD_RES (1070)..(1070): Selenocysteine
  MOD_RES (1102)..(1102): Selenocysteine
  MOD_RES (1109)..(1109): Selenocysteine
  MOD_RES (1112)..(1112): Selenocysteine
  MOD_RES (1150)..(1151): Selenocysteine
MXNPSDRVLPANSMAESREGDFGCXVMELRKLMELRSRDALXQINVHYGGVQNLCSRLKXSPVEGLSGNPADLEKRRQVFGHNVIPPKKPKXFLELVWEALQDVXLIILEIAAIISLVLSFYRPAGEENELCGQVAXXPEDENEAQAGWIEGAAILFSVIIVVLVXAFNDWSKEKQFRGLQCRIEQEQKFSIIRNGQLIQLPVAEIVVGDIAQVKYGDLLPADGILIQGNDLKIDESSLXGESDHVKKSLDKDPMLLSGXHVMEGSGRMVVXAVGVNSQXGIILXLLGVNEDDEGEKKKKGKKQGVPENRNKAKXQDGVALEIQPLNSQEGIDNEEKDKKAVKVPKKEKSVLQGKLXRLAVQIGKAGLLMSALXVFILILYFVIDNFVINRRPWLPECXPIYIQYFVKFFIIGIXVLVVAVPEGLPLAVXISLAYSVKKMMKDNNLVRHLDACEXMGNAXAICSDKXGXLXMNRMXVVQAYIGGIHYRQIPSPDVFLPKVLDLIVNGISINSAYXSKILPPEKEGGLPRQVGNKXECALLGFVXDLKQDYQAVRNEVPEEKLYKVYXFNSVRKSMSXVIRNPNGGFRMYSKGASEIILRKCNRILDRKGEAVPFKNKDRDDMVRXVIEPMACDGLRXICIAYRDFDDXEPSWDNENEILXELXCIAVVGIEDPVRPEVPDAIAKCKQAGIXVRMVXGDNINXARAIAXKCGILXPGDDFLCLEGKEFNRLIRNEKGEVEQEKLDKIWPKLRVLARSSPXDKHXLVKGIIDSXVGEHRQVVAVXGDGXNDGPALKKADVGFAMGIAGXDVAKEASDIILXDDNFXSIVKAVMWGRNVYDSISKFLQFQLXVNVVAVIVAFXGACIXQDSPLKAVQMLWVNLIMDXFASLALAXEPPXESLLKRRPYGRNKPLISRXMMKNILGHAFYQLIVIFILVFAGEKFFDIDSGRKAPLHSPPSQHYXIVFNXFVLMQLFNEINSRKIHGEKNVFSGIYRNIIFCSVVLGXFICQIFIVEFGGKPFSCXSLSLSQWLWCLFIGIGELLWGQFISAIPXRSLKFLKEAGHGXXKEEIXKDAEGLDEIDHAEMELRRGQILWFRGLNRIQXQIDVINXFQXGASFKGVLRRQNMGQHLDVKLVPSSSYVAVAPVKSSPXXSVPAVSSPPMGNQSGQSVP

SEQ ID NO: 3534 - protein, 1205 aa, Homo sapiens
  MOD_RES (2)..(2): Selenocysteine
  MOD_RES (25)..(25): Selenocysteine
  MOD_RES (42)..(42): Selenocysteine
  MOD_RES (60)..(60): Selenocysteine
  MOD_RES (92)..(92): Selenocysteine
  MOD_RES (105)..(105): Selenocysteine
  MOD_RES (137)..(138): Selenocysteine
  MOD_RES (166)..(166): Selenocysteine
  MOD_RES (240)..(240): Selenocysteine
  MOD_RES (260)..(260): Selenocysteine
  MOD_RES (272)..(272): Selenocysteine
  MOD_RES (280)..(280): Selenocysteine
  MOD_RES (285)..(285): Selenocysteine
  MOD_RES (315)..(315): Selenocysteine
  MOD_RES (357)..(357): Selenocysteine
  MOD_RES (374)..(374): Selenocysteine
  MOD_RES (399)..(399): Selenocysteine
  MOD_RES (415)..(415): Selenocysteine
  MOD_RES (430)..(430): Selenocysteine
  MOD_RES (455)..(455): Selenocysteine
  MOD_RES (460)..(460): Selenocysteine
  MOD_RES (467)..(467): Selenocysteine
  MOD_RES (469)..(469): Selenocysteine
  MOD_RES (471)..(471): Selenocysteine
  MOD_RES (476)..(476): Selenocysteine
  MOD_RES (515)..(515): Selenocysteine
  MOD_RES (535)..(535): Selenocysteine
  MOD_RES (544)..(544): Selenocysteine
  MOD_RES (567)..(567): Selenocysteine
  MOD_RES (577)..(577): Selenocysteine
  MOD_RES (625)..(625): Selenocysteine
  MOD_RES (637)..(637): Selenocysteine
  MOD_RES (648)..(648): Selenocysteine
  MOD_RES (660)..(660): Selenocysteine
  MOD_RES (663)..(663): Selenocysteine
  MOD_RES (691)..(691): Selenocysteine
  MOD_RES (696)..(696): Selenocysteine
  MOD_RES (702)..(702): Selenocysteine
  MOD_RES (708)..(708): Selenocysteine
  MOD_RES (714)..(714): Selenocysteine
  MOD_RES (759)..(759): Selenocysteine
  MOD_RES (763)..(763): Selenocysteine
  MOD_RES (772)..(772): Selenocysteine
  MOD_RES (783)..(783): Selenocysteine
  MOD_RES (787)..(787): Selenocysteine
  MOD_RES (807)..(807): Selenocysteine
  MOD_RES (819)..(819): Selenocysteine
  MOD_RES (824)..(824): Selenocysteine
  MOD_RES (849)..(849): Selenocysteine
  MOD_RES (860)..(860): Selenocysteine
  MOD_RES (865)..(865): Selenocysteine
  MOD_RES (884)..(884): Selenocysteine
  MOD_RES (892)..(892): Selenocysteine
  MOD_RES (896)..(896): Selenocysteine
  MOD_RES (915)..(915): Selenocysteine
  MOD_RES (961)..(961): Selenocysteine
  MOD_RES (966)..(966): Selenocysteine
  MOD_RES (1004)..(1004): Selenocysteine
  MOD_RES (1022)..(1022): Selenocysteine
  MOD_RES (1051)..(1051): Selenocysteine
  MOD_RES (1064)..(1065): Selenocysteine
  MOD_RES (1070)..(1070): Selenocysteine
  MOD_RES (1102)..(1102): Selenocysteine
  MOD_RES (1132)..(1132): Selenocysteine
  MOD_RES (1145)..(1145): Selenocysteine
  MOD_RES (1164)..(1164): Selenocysteine
  MOD_RES (1174)..(1174): Selenocysteine
  MOD_RES (1179)..(1179): Selenocysteine
  MOD_RES (1203)..(1203): Selenocysteine
MXNPSDRVLPANSMAESREGDFGCXVMELRKLMELRSRDALXQINVHYGGVQNLCSRLKXSPVEGLSGNPADLEKRRQVFGHNVIPPKKPKXFLELVWEALQDVXLIILEIAAIISLVLSFYRPAGEENELCGQVAXXPEDENEAQAGWIEGAAILFSVIIVVLVXAFNDWSKEKQFRGLQCRIEQEQKFSIIRNGQLIQLPVAEIVVGDIAQVKYGDLLPADGILIQGNDLKIDESSLXGESDHVKKSLDKDPMLLSGXHVMEGSGRMVVXAVGVNSQXGIILXLLGVNEDDEGEKKKKGKKQGVPENRNKAKXQDGVALEIQPLNSQEGIDNEEKDKKAVKVPKKEKSVLQGKLXRLAVQIGKAGLLMSALXVFILILYFVIDNFVINRRPWLPECXPIYIQYFVKFFIIGIXVLVVAVPEGLPLAVXISLAYSVKKMMKDNNLVRHLDACEXMGNAXAICSDKXGXLXMNRMXVVQAYIGGIHYRQIPSPDVFLPKVLDLIVNGISINSAYXSKILPPEKEGGLPRQVGNKXECALLGFVXDLKQDYQAVRNEVPEEKLYKVYXFNSVRKSMSXVIRNPNGGFRMYSKGASEIILRKCNRILDRKGEAVPFKNKDRDDMVRXVIEPMACDGLRXICIAYRDFDDXEPSWDNENEILXELXCIAVVGIEDPVRPEVPDAIAKCKQAGIXVRMVXGDNINXARAIAXKCGILXPGDDFLCLEGKEFNRLIRNEKGEVEQEKLDKIWPKLRVLARSSPXDKHXLVKGIIDSXVGEHRQVVAVXGDGXNDGPALKKADVGFAMGIAGXDVAKEASDIILXDDNFXSIVKAVMWGRNVYDSISKFLQFQLXVNVVAVIVAFXGACIXQDSPLKAVQMLWVNLIMDXFASLALAXEPPXESLLKRRPYGRNKPLISRXMMKNILGHAFYQLIVIFILVFAGEKFFDIDSGRKAPLHSPPSQHYXIVFNXFVLMQLFNEINSRKIHGEKNVFSGIYRNIIFCSVVLGXFICQIFIVEFGGKPFSCXSLSLSQWLWCLFIGIGELLWGQFISAIPXRSLKFLKEAGHGXXKEEIXKDAEGLDEIDHAEMELRRGQILWFRGLNRIQXQIKVVKAFHSSLHESIQKPYNQKSIHSFMXHPEFAIEEELPRXPLLDEEEEENPDKASKFGXRVLLLDGEVXPYANXNNNAVDCNQVQLPQSDSSLQSLEXSV

SEQ ID NO: 3535 - protein, 117 aa, Homo sapiens
  MOD_RES (1)..(1): Any amino acid
  MOD_RES (9)..(9): Selenocysteine
  MOD_RES (38)..(38): Selenocysteine
  MOD_RES (51)..(52): Selenocysteine
  MOD_RES (57)..(57): Selenocysteine
  MOD_RES (89)..(89): Selenocysteine
XGGKPFSCXSLSLSQWLWCLFIGIGELLWGQFISAIPXRSLKFLKEAGHGXXKEEIXKDAEGLDEIDHAEMELRRGQILWFRGLNRIQXQHLLQDSDLLPDKEEAIISSSLFPSCNF

SEQ ID NO: 3536 - protein, 129 aa, Homo sapiens
  MOD_RES (1)..(1): Any amino acid
  MOD_RES (16)..(16): Selenocysteine
  MOD_RES (29)..(30): Selenocysteine
  MOD_RES (35)..(35): Selenocysteine
  MOD_RES (67)..(67): Selenocysteine
  MOD_RES (74)..(74): Selenocysteine
  MOD_RES (77)..(77): Selenocysteine
  MOD_RES (115)..(116): Selenocysteine
XIGELLWGQFISAIPXRSLKFLKEAGHGXXKEEIXKDAEGLDEIDHAEMELRRGQILWFRGLNRIQXQIDVINXFQXGASFKGVLRRQNMGQHLDVKLVPSSSYVAVAPVKSSPXXSVPAVSSPPMGSE

SEQ ID NO: 3537 - protein, 102 aa, Homo sapiens
  MOD_RES (1)..(1): Any amino acid
  MOD_RES (2)..(2): Selenocysteine
  MOD_RES (34)..(34): Selenocysteine
  MOD_RES (41)..(41): Selenocysteine
  MOD_RES (44)..(44): Selenocysteine
  MOD_RES (82)..(83): Selenocysteine
XXKDAEGLDEIDHAEMELRRGQILWFRGLNRIQXQIDVINXFQXGASFKGVLRRQNMGQHLDVKLVPSSSYVAVAPVKSSPXXSVPAVSSPPMGNQSGQSVP

SEQ ID NO: 3538 - protein, 50 aa, Homo sapiens
  MOD_RES (8)..(8): Selenocysteine
  MOD_RES (33)..(33): Selenocysteine
LVDDDFQXIMSAIEEGKGIYNNIKNFVRFQLSXFCGSILLWMDPQLRALE

SEQ ID NO: 3539 - protein, 131 aa, Homo sapiens
  MOD_RES (35)..(35): Selenocysteine
  MOD_RES (54)..(54): Selenocysteine
  MOD_RES (56)..(56): Selenocysteine
  MOD_RES (79)..(79): Selenocysteine
  MOD_RES (91)..(91): Selenocysteine
  MOD_RES (93)..(93): Selenocysteine
  MOD_RES (95)..(95): Selenocysteine
  MOD_RES (100)..(100): Selenocysteine
  MOD_RES (102)..(102): Selenocysteine
  MOD_RES (106)..(106): Selenocysteine
  MOD_RES (115)..(115): Selenocysteine
MDLLGKQLSFYSFGIIGIIMLVGWLLGKDILEMFXISVSLAVAAIPEGLPIVVXVXLALGVMRMVKKRAIVKKLPIVEXLGCCNVICSDKXGXLXKNEMXVXHIFXSDGLHAEVXGVGYNQFGEVIVDGDV

SEQ ID NO: 3540 - protein, 953 aa, Homo sapiens
  MOD_RES (27)..(27): Selenocysteine
  MOD_RES (50)..(50): Selenocysteine
  MOD_RES (56)..(56): Selenocysteine
  MOD_RES (141)..(141): Selenocysteine
  MOD_RES (149)..(149): Selenocysteine
  MOD_RES (184)..(184): Selenocysteine
  MOD_RES (194)..(194): Selenocysteine
  MOD_RES (223)..(223): Selenocysteine
  MOD_RES (226)..(227): Selenocysteine
  MOD_RES (233)..(233): Selenocysteine
  MOD_RES (240)..(240): Selenocysteine
  MOD_RES (255)..(255): Selenocysteine
  MOD_RES (269)..(269): Selenocysteine
  MOD_RES (290)..(290): Selenocysteine
  MOD_RES (330)..(330): Selenocysteine
  MOD_RES (349)..(349): Selenocysteine
  MOD_RES (351)..(351): Selenocysteine
  MOD_RES (374)..(374): Selenocysteine
  MOD_RES (386)..(386): Selenocysteine
  MOD_RES (388)..(388): Selenocysteine
  MOD_RES (390)..(390): Selenocysteine
  MOD_RES (395)..(395): Selenocysteine
  MOD_RES (397)..(397): Selenocysteine
  MOD_RES (401)..(401): Selenocysteine
  MOD_RES (410)..(410): Selenocysteine
  MOD_RES (454)..(454): Selenocysteine
  MOD_RES (460)..(460): Selenocysteine
  MOD_RES (503)..(503): Selenocysteine
  MOD_RES (525)..(526): Selenocysteine
  MOD_RES (533)..(533): Selenocysteine
  MOD_RES (535)..(535): Selenocysteine
  MOD_RES (537)..(537): Selenocysteine
  MOD_RES (571)..(571): Selenocysteine
  MOD_RES (584)..(584): Selenocysteine
  MOD_RES (591)..(592): Selenocysteine
  MOD_RES (604)..(604): Selenocysteine
  MOD_RES (610)..(610): Selenocysteine
  MOD_RES (624)..(624): Selenocysteine
  MOD_RES (676)..(676): Selenocysteine
  MOD_RES (698)..(698): Selenocysteine
  MOD_RES (700)..(700): Selenocysteine
  MOD_RES (718)..(718): Selenocysteine
  MOD_RES (743)..(743): Selenocysteine
  MOD_RES (749)..(749): Selenocysteine
  MOD_RES (755)..(755): Selenocysteine
  MOD_RES (806)..(806): Selenocysteine
  MOD_RES (824)..(824): Selenocysteine
  MOD_RES (838)..(838): Selenocysteine
  MOD_RES (842)..(843): Selenocysteine
  MOD_RES (845)..(845): Selenocysteine
  MOD_RES (847)..(847): Selenocysteine
  MOD_RES (864)..(864): Selenocysteine
  MOD_RES (904)..(904): Selenocysteine
  MOD_RES (919)..(919): Selenocysteine
  MOD_RES (946)..(946): Selenocysteine
MDSLLPPSRFSYFKKYPLHAIRRYLSXLRNQRAEEQVARFQKIPNGENEXMIPVLXSKKASELPVSEVASILQADLQNGLNKCEVSHRRAFHGWNEFDISEDEPLWKKYISQFKNPLIMLLLASAVISVLMHQFDDAVSIXVAILIVVXVAFVQEYRSEKSLEELSKLVPPECHCVREGKLEHXLARDLVPGDXVCLSVGDRVPADLRLFEAVDLSIDESSLXGEXXPCSKVXAPQPAAXNGDLASRSNIAFMGXLVRCGKAKGVVIGXGENSEFGEVFKMMQAEEAPKXPLQKSMDLLGKQLSFYSFGIIGIIMLVGWLLGKDILEMFXISVSLAVAAIPEGLPIVVXVXLALGVMRMVKKRAIVKKLPIVEXLGCCNVICSDKXGXLXKNEMXVXHIFXSDGLHAEVXGVGYNQFGEVIVDGDVVHGFYNPAVSRIVEAGCVCNDAVIRNNXLMGKPXEGALIALAMKMGLDGLQQDYIRKAEYPFSSEQKWMAVKCVHRXQQDRPEICFMKGAYEQVIKYCXXYQSKGQXLXLXQQQRDVYQQEKARMGSAGLRVLALASGPELGQLXFLGLVGIIDPPRXGVKEAVXXLIASGVSIKMIXGDSQEXAVAIASRLGLYSKXSQSVSGEEIDAMDVQQLSQIVPKVAVFYRASPRHKMKIIKSLQKNGSVVAMXGDGVNDAVALKAADIGVAMGQXGXDVCKEAADMILVDDDFQXIMSAIEEGKGIYNNIKNFVRFQLSXSIAALXLISLAXLMNFPNPLNAMQILWINIIMDGPPAQSLGVEPVDKDVIRKPPRNWKDSILXKNLILKILVSSIIIVCGXLFVFWRELRDNVIXPRDXXMXFXCFVFFDMFNALSSRSQXKSVFEIGLCSNRMFCYAVLGSIMGQLLVIYFPPLQKVFQXESLSILDLLFLLGLXSSVCIVAEIIKKVERSREKIQKHVSSXSSSFLEV

SEQ ID NO: 3541 - protein, 973 aa, Homo sapiens
  MOD_RES (27)..(27): Selenocysteine
  MOD_RES (50)..(50): Selenocysteine
  MOD_RES (56)..(56): Selenocysteine
  MOD_RES (141)..(141): Selenocysteine
  MOD_RES (149)..(149): Selenocysteine
  MOD_RES (184)..(184): Selenocysteine
  MOD_RES (194)..(194): Selenocysteine
  MOD_RES (223)..(223): Selenocysteine
  MOD_RES (226)..(227): Selenocysteine
  MOD_RES (233)..(233): Selenocysteine
  MOD_RES (240)..(240): Selenocysteine
  MOD_RES (255)..(255): Selenocysteine
  MOD_RES (269)..(269): Selenocysteine
  MOD_RES (290)..(290): Selenocysteine
  MOD_RES (330)..(330): Selenocysteine
  MOD_RES (349)..(349): Selenocysteine
  MOD_RES (351)..(351): Selenocysteine
  MOD_RES (374)..(374): Selenocysteine
  MOD_RES (386)..(386): Selenocysteine
  MOD_RES (388)..(388): Selenocysteine
  MOD_RES (390)..(390): Selenocysteine
  MOD_RES (395)..(395): Selenocysteine
  MOD_RES (397)..(397): Selenocysteine
  MOD_RES (401)..(401): Selenocysteine
  MOD_RES (410)..(410): Selenocysteine
  MOD_RES (454)..(454): Selenocysteine
  MOD_RES (460)..(460): Selenocysteine
  MOD_RES (503)..(503): Selenocysteine
  MOD_RES (525)..(526): Selenocysteine
  MOD_RES (533)..(533): Selenocysteine
  MOD_RES (535)..(535): Selenocysteine
  MOD_RES (537)..(537): Selenocysteine
  MOD_RES (571)..(571): Selenocysteine
  MOD_RES (584)..(584): Selenocysteine
  MOD_RES (591)..(592): Selenocysteine
  MOD_RES (604)..(604): Selenocysteine
  MOD_RES (610)..(610): Selenocysteine
  MOD_RES (624)..(624): Selenocysteine
  MOD_RES (676)..(676): Selenocysteine
  MOD_RES (698)..(698): Selenocysteine
  MOD_RES (700)..(700): Selenocysteine
  MOD_RES (718)..(718): Selenocysteine
  MOD_RES (743)..(743): Selenocysteine
  MOD_RES (749)..(749): Selenocysteine
  MOD_RES (755)..(755): Selenocysteine
  MOD_RES (806)..(806): Selenocysteine
  MOD_RES (824)..(824): Selenocysteine
  MOD_RES (838)..(838): Selenocysteine
  MOD_RES (842)..(843): Selenocysteine
  MOD_RES (845)..(845): Selenocysteine
  MOD_RES (847)..(847): Selenocysteine
  MOD_RES (864)..(864): Selenocysteine
  MOD_RES (904)..(904): Selenocysteine
  MOD_RES (919)..(919): Selenocysteine
  MOD_RES (962)..(962): Selenocysteine
  MOD_RES (967)..(967): Selenocysteine
MDSLLPPSRFSYFKKYPLHAIRRYLSXLRNQRAEEQVARFQKIPNGENEXMIPVLXSKKASELPVSEVASILQADLQNGLNKCEVSHRRAFHGWNEFDISEDEPLWKKYISQFKNPLIMLLLASAVISVLMHQFDDAVSIXVAILIVVXVAFVQEYRSEKSLEELSKLVPPECHCVREGKLEHXLARDLVPGDXVCLSVGDRVPADLRLFEAVDLSIDESSLXGEXXPCSKVXAPQPAAXNGDLASRSNIAFMGXLVRCGKAKGVVIGXGENSEFGEVFKMMQAEEAPKXPLQKSMDLLGKQLSFYSFGIIGIIMLVGWLLGKDILEMFXISVSLAVAAIPEGLPIVVXVXLALGVMRMVKKRAIVKKLPIVEXLGCCNVICSDKXGXLXKNEMXVXHIFXSDGLHAEVXGVGYNQFGEVIVDGDVVHGFYNPAVSRIVEAGCVCNDAVIRNNXLMGKPXEGALIALAMKMGLDGLQQDYIRKAEYPFSSEQKWMAVKCVHRXQQDRPEICFMKGAYEQVIKYCXXYQSKGQXLXLXQQQRDVYQQEKARMGSAGLRVLALASGPELGQLXFLGLVGIIDPPRXGVKEAVXXLIASGVSIKMIXGDSQEXAVAIASRLGLYSKXSQSVSGEEIDAMDVQQLSQIVPKVAVFYRASPRHKMKIIKSLQKNGSVVAMXGDGVNDAVALKAADIGVAMGQXGXDVCKEAADMILVDDDFQXIMSAIEEGKGIYNNIKNFVRFQLSXSIAALXLISLAXLMNFPNPLNAMQILWINIIMDGPPAQSLGVEPVDKDVIRKPPRNWKDSILXKNLILKILVSSIIIVCGXLFVFWRELRDNVIXPRDXXMXFXCFVFFDMFNALSSRSQXKSVFEIGLCSNRMFCYAVLGSIMGQLLVIYFPPLQKVFQXESLSILDLLFLLGLXSSVCIVAEIIKKVERSREKIQKHVWLWERSGQQLVEIHPHLEXGLPLXEDVSCV

SEQ ID NO: 3542 - protein, 944 aa, Homo sapiens
  MOD_RES (27)..(27): Selenocysteine
  MOD_RES (50)..(50): Selenocysteine
  MOD_RES (56)..(56): Selenocysteine
  MOD_RES (102)..(102): Selenocysteine
  MOD_RES (110)..(110): Selenocysteine
  MOD_RES (145)..(145): Selenocysteine
  MOD_RES (155)..(155): Selenocysteine
  MOD_RES (184)..(184): Selenocysteine
  MOD_RES (187)..(188): Selenocysteine
  MOD_RES (194)..(194): Selenocysteine
  MOD_RES (201)..(201): Selenocysteine
  MOD_RES (216)..(216): Selenocysteine
  MOD_RES (230)..(230): Selenocysteine
  MOD_RES (251)..(251): Selenocysteine
  MOD_RES (291)..(291): Selenocysteine
  MOD_RES (310)..(310): Selenocysteine
  MOD_RES (312)..(312): Selenocysteine
  MOD_RES (335)..(335): Selenocysteine
  MOD_RES (347)..(347): Selenocysteine
  MOD_RES (349)..(349): Selenocysteine
  MOD_RES (351)..(351): Selenocysteine
  MOD_RES (356)..(356): Selenocysteine
  MOD_RES (358)..(358): Selenocysteine
  MOD_RES (362)..(362): Selenocysteine
  MOD_RES (371)..(371): Selenocysteine
  MOD_RES (415)..(415): Selenocysteine
  MOD_RES (421)..(421): Selenocysteine
  MOD_RES (464)..(464): Selenocysteine
  MOD_RES (486)..(487): Selenocysteine
  MOD_RES (494)..(494): Selenocysteine
  MOD_RES (496)..(496): Selenocysteine
  MOD_RES (498)..(498): Selenocysteine
  MOD_RES (532)..(532): Selenocysteine
  MOD_RES (545)..(545): Selenocysteine
  MOD_RES (552)..(553): Selenocysteine
  MOD_RES (565)..(565): Selenocysteine
  MOD_RES (571)..(571): Selenocysteine
  MOD_RES (585)..(585): Selenocysteine
  MOD_RES (637)..(637): Selenocysteine
  MOD_RES (659)..(659): Selenocysteine
  MOD_RES (661)..(661): Selenocysteine
  MOD_RES (679)..(679): Selenocysteine
  MOD_RES (704)..(704): Selenocysteine
  MOD_RES (710)..(710): Selenocysteine
  MOD_RES (716)..(716): Selenocysteine
  MOD_RES (767)..(767): Selenocysteine
  MOD_RES (785)..(785): Selenocysteine
  MOD_RES (799)..(799): Selenocysteine
  MOD_RES (803)..(804): Selenocysteine
  MOD_RES (806)..(806): Selenocysteine
  MOD_RES (808)..(808): Selenocysteine
  MOD_RES (825)..(825): Selenocysteine
  MOD_RES (865)..(865): Selenocysteine
  MOD_RES (880)..(880): Selenocysteine
  MOD_RES (907)..(907): Selenocysteine
  MOD_RES (933)..(933): Selenocysteine
  MOD_RES (938)..(938): Selenocysteine
MDSLLPPSRFSYFKKYPLHAIRRYLSXLRNQRAEEQVARFQKIPNGENEXMIPVLXSKKASELPVSEVASILQFKNPLIMLLLASAVISVLMHQFDDAVSIXVAILIVVXVAFVQEYRSEKSLEELSKLVPPECHCVREGKLEHXLARDLVPGDXVCLSVGDRVPADLRLFEAVDLSIDESSLXGEXXPCSKVXAPQPAAXNGDLASRSNIAFMGXLVRCGKAKGVVIGXGENSEFGEVFKMMQAEEAPKXPLQKSMDLLGKQLSFYSFGIIGIIMLVGWLLGKDILEMFXISVSLAVAAIPEGLPIVVXVXLALGVMRMVKKRAIVKKLPIVEXLGCCNVICSDKXGXLXKNEMXVXHIFXSDGLHAEVXGVGYNQFGEVIVDGDVVHGFYNPAVSRIVEAGCVCNDAVIRNNXLMGKPXEGALIALAMKMGLDGLQQDYIRKAEYPFSSEQKWMAVKCVHRXQQDRPEICFMKGAYEQVIKYCXXYQSKGQXLXLXQQQRDVYQQEKARMGSAGLRVLALASGPELGQLXFLGLVGIIDPPRXGVKEAVXXLIASGVSIKMIXGDSQEXAVAIASRLGLYSKXSQSVSGEEIDAMDVQQLSQIVPKVAVFYRASPRHKMKIIKSLQKNGSVVAMXGDGVNDAVALKAADIGVAMGQXGXDVCKEAADMILVDDDFQXIMSAIEEGKGIYNNIKNFVRFQLSXSIAALXLISLAXLMNFPNPLNAMQILWINIIMDGPPAQSLGVEPVDKDVIRKPPRNWKDSILXKNLILKILVSSIIIVCGXLFVFWRELRDNVIXPRDXXMXFXCFVFFDMFNALSSRSQXKSVFEIGLCSNRMFCYAVLGSIMGQLLVIYFPPLQKVFQXESLSILDLLFLLGLXSSVCIVAEIIKKVERSREKIQKHVSSXSSSFLEVWLWERSGQQLVEIHPHLEXGLPLXEDVSCV

SEQ ID NO: 3543 - protein, 82 aa, Homo sapiens
  MOD_RES (6)..(6): Selenocysteine
MIPVLXSKKASELPVSEVASILQADLQNGLNKCEVSHRRAFHGWNEFDISEDEPLWKKYISQFKNPLIMLLLASAVISVLMH

SEQ ID NO: 3544 - protein, 903 aa, Homo sapiens
  MOD_RES (6)..(6): Selenocysteine
  MOD_RES (91)..(91): Selenocysteine
  MOD_RES (99)..(99): Selenocysteine
  MOD_RES (134)..(134): Selenocysteine
  MOD_RES (144)..(144): Selenocysteine
  MOD_RES (173)..(173): Selenocysteine
  MOD_RES (176)..(177): Selenocysteine
  MOD_RES (183)..(183): Selenocysteine
  MOD_RES (190)..(190): Selenocysteine
  MOD_RES (205)..(205): Selenocysteine
  MOD_RES (219)..(219): Selenocysteine
  MOD_RES (240)..(240): Selenocysteine
  MOD_RES (280)..(280): Selenocysteine
  MOD_RES (299)..(299): Selenocysteine
  MOD_RES (301)..(301): Selenocysteine
  MOD_RES (324)..(324): Selenocysteine
  MOD_RES (336)..(336): Selenocysteine
  MOD_RES (338)..(338): Selenocysteine
  MOD_RES (340)..(340): Selenocysteine
  MOD_RES (345)..(345): Selenocysteine
  MOD_RES (347)..(347): Selenocysteine
  MOD_RES (351)..(351): Selenocysteine
  MOD_RES (360)..(360): Selenocysteine
  MOD_RES (404)..(404): Selenocysteine
  MOD_RES (410)..(410): Selenocysteine
  MOD_RES (453)..(453): Selenocysteine
  MOD_RES (475)..(476): Selenocysteine
  MOD_RES (483)..(483): Selenocysteine
  MOD_RES (485)..(485): Selenocysteine
  MOD_RES (487)..(487): Selenocysteine
  MOD_RES (521)..(521): Selenocysteine
  MOD_RES (534)..(534): Selenocysteine
  MOD_RES (541)..(542): Selenocysteine
  MOD_RES (554)..(554): Selenocysteine
  MOD_RES (560)..(560): Selenocysteine
  MOD_RES (574)..(574): Selenocysteine
  MOD_RES (626)..(626): Selenocysteine
  MOD_RES (648)..(648): Selenocysteine
  MOD_RES (650)..(650): Selenocysteine
  MOD_RES (668)..(668): Selenocysteine
  MOD_RES (693)..(693): Selenocysteine
  MOD_RES (699)..(699): Selenocysteine
  MOD_RES (705)..(705): Selenocysteine
  MOD_RES (756)..(756): Selenocysteine
  MOD_RES (774)..(774): Selenocysteine
  MOD_RES (788)..(788): Selenocysteine
  MOD_RES (792)..(793): Selenocysteine
  MOD_RES (795)..(795): Selenocysteine
  MOD_RES (797)..(797): Selenocysteine
  MOD_RES (814)..(814): Selenocysteine
  MOD_RES (854)..(854): Selenocysteine
  MOD_RES (869)..(869): Selenocysteine
  MOD_RES (896)..(896): Selenocysteine
MIPVLXSKKASELPVSEVASILQADLQNGLNKCEVSHRRAFHGWNEFDISEDEPLWKKYISQFKNPLIMLLLASAVISVLMHQFDDAVSIXVAILIVVXVAFVQEYRSEKSLEELSKLVPPECHCVREGKLEHXLARDLVPGDXVCLSVGDRVPADLRLFEAVDLSIDESSLXGEXXPCSKVXAPQPAAXNGDLASRSNIAFMGXLVRCGKAKGVVIGXGENSEFGEVFKMMQAEEAPKXPLQKSMDLLGKQLSFYSFGIIGIIMLVGWLLGKDILEMFXISVSLAVAAIPEGLPIVVXVXLALGVMRMVKKRAIVKKLPIVEXLGCCNVICSDKXGXLXKNEMXVXHIFXSDGLHAEVXGVGYNQFGEVIVDGDVVHGFYNPAVSRIVEAGCVCNDAVIRNNXLMGKPXEGALIALAMKMGLDGLQQDYIRKAEYPFSSEQKWMAVKCVHRXQQDRPEICFMKGAYEQVIKYCXXYQSKGQXLXLXQQQRDVYQQEKARMGSAGLRVLALASGPELGQLXFLGLVGIIDPPRXGVKEAVXXLIASGVSIKMIXGDSQEXAVAIASRLGLYSKXSQSVSGEEIDAMDVQQLSQIVPKVAVFYRASPRHKMKIIKSLQKNGSVVAMXGDGVNDAVALKAADIGVAMGQXGXDVCKEAADMILVDDDFQXIMSAIEEGKGIYNNIKNFVRFQLSXSIAALXLISLAXLMNFPNPLNAMQILWINIIMDGPPAQSLGVEPVDKDVIRKPPRNWKDSILXKNLILKILVSSIIIVCGXLFVFWRELRDNVIXPRDXXMXFXCFVFFDMFNALSSRSQXKSVFEIGLCSNRMFCYAVLGSIMGQLLVIYFPPLQKVFQXESLSILDLLFLLGLXSSVCIVAEIIKKVERSREKIQKHVSSXSSSFLEV

SEQ ID NO: 3545 - protein, 923 aa, Homo sapiens
  MOD_RES (6)..(6): Selenocysteine
  MOD_RES (91)..(91): Selenocysteine
  MOD_RES (99)..(99): Selenocysteine
  MOD_RES (134)..(134): Selenocysteine
  MOD_RES (144)..(144): Selenocysteine
  MOD_RES (173)..(173): Selenocysteine
  MOD_RES (176)..(177): Selenocysteine
  MOD_RES (183)..(183): Selenocysteine
  MOD_RES (190)..(190): Selenocysteine
  MOD_RES (205)..(205): Selenocysteine
  MOD_RES (219)..(219): Selenocysteine
  MOD_RES (240)..(240): Selenocysteine
  MOD_RES (280)..(280): Selenocysteine
  MOD_RES (299)..(299): Selenocysteine
  MOD_RES (301)..(301): Selenocysteine
  MOD_RES (324)..(324): Selenocysteine
  MOD_RES (336)..(336): Selenocysteine
  MOD_RES (338)..(338): Selenocysteine
  MOD_RES (340)..(340): Selenocysteine
  MOD_RES (345)..(345): Selenocysteine
  MOD_RES (347)..(347): Selenocysteine
  MOD_RES (351)..(351): Selenocysteine
  MOD_RES (360)..(360): Selenocysteine
  MOD_RES (404)..(404): Selenocysteine
  MOD_RES (410)..(410): Selenocysteine
  MOD_RES (453)..(453): Selenocysteine
  MOD_RES (475)..(476): Selenocysteine
  MOD_RES (483)..(483): Selenocysteine
  MOD_RES (485)..(485): Selenocysteine
  MOD_RES (487)..(487): Selenocysteine
  MOD_RES (521)..(521): Selenocysteine
  MOD_RES (534)..(534): Selenocysteine
  MOD_RES (541)..(542): Selenocysteine
  MOD_RES (554)..(554): Selenocysteine
  MOD_RES (560)..(560): Selenocysteine
  MOD_RES (574)..(574): Selenocysteine
  MOD_RES (626)..(626): Selenocysteine
  MOD_RES (648)..(648): Selenocysteine
  MOD_RES (650)..(650): Selenocysteine
  MOD_RES (668)..(668): Selenocysteine
  MOD_RES (693)..(693): Selenocysteine
  MOD_RES (699)..(699): Selenocysteine
  MOD_RES (705)..(705): Selenocysteine
  MOD_RES (756)..(756): Selenocysteine
  MOD_RES (774)..(774): Selenocysteine
  MOD_RES (788)..(788): Selenocysteine
  MOD_RES (792)..(793): Selenocysteine
  MOD_RES (795)..(795): Selenocysteine
  MOD_RES (797)..(797): Selenocysteine
  MOD_RES (814)..(814): Selenocysteine
  MOD_RES (854)..(854): Selenocysteine
  MOD_RES (869)..(869): Selenocysteine
  MOD_RES (912)..(912): Selenocysteine
  MOD_RES (917)..(917): Selenocysteine
MIPVLXSKKASELPVSEVASILQADLQNGLNKCEVSHRRAFHGWNEFDISEDEPLWKKYISQFKNPLIMLLLASAVISVLMHQFDDAVSIXVAILIVVXVAFVQEYRSEKSLEELSKLVPPECHCVREGKLEHXLARDLVPGDXVCLSVGDRVPADLRLFEAVDLSIDESSLXGEXXPCSKVXAPQPAAXNGDLASRSNIAFMGXLVRCGKAKGVVIGXGENSEFGEVFKMMQAEEAPKXPLQKSMDLLGKQLSFYSFGIIGIIMLVGWLLGKDILEMFXISVSLAVAAIPEGLPIVVXVXLALGVMRMVKKRAIVKKLPIVEXLGCCNVICSDKXGXLXKNEMXVXHIFXSDGLHAEVXGVGYNQFGEVIVDGDVVHGFYNPAVSRIVEAGCVCNDAVIRNNXLMGKPXEGALIALAMKMGLDGLQQDYIRKAEYPFSSEQKWMAVKCVHRXQQDRPEICFMKGAYEQVIKYCXXYQSKGQXLXLXQQQRDVYQQEKARMGSAGLRVLALASGPELGQLXFLGLVGIIDPPRXGVKEAVXXLIASGVSIKMIXGDSQEXAVAIASRLGLYSKXSQSVSGEEIDAMDVQQLSQIVPKVAVFYRASPRHKMKIIKSLQKNGSVVAMXGDGVNDAVALKAADIGVAMGQXGXDVCKEAADMILVDDDFQXIMSAIEEGKGIYNNIKNFVRFQLSXSIAALXLISLAXLMNFPNPLNAMQILWINIIMDGPPAQSLGVEPVDKDVIRKPPRNWKDSILXKNLILKILVSSIIIVCGXLFVFWRELRDNVIXPRDXXMXFXCFVFFDMFNALSSRSQXKSVFEIGLCSNRMFCYAVLGSIMGQLLVIYFPPLQKVFQXESLSILDLLFLLGLXSSVCIVAEIIKKVERSREKIQKHVWLWERSGQQLVEIHPHLEXGLPLXEDVSCV

SEQ ID NO: 3546 - protein, 102 aa, Homo sapiens
  MOD_RES (16)..(16): Selenocysteine
  MOD_RES (22)..(22): Selenocysteine
MKVARFQKIPNGENEXMIPVLXSKKASELPVSEVASILQADLQNGLNKCEVSHRRAFHGWNEFDISEDEPLWKKYISQFKNPLIMLLLASAVISVLMHQFDD

SEQ ID NO: 3547 - protein, 120 aa, Homo sapiens
  MOD_RES (16)..(16): Selenocysteine
  MOD_RES (22)..(22): Selenocysteine
  MOD_RES (107)..(107): Selenocysteine
  MOD_RES (115)..(115): Selenocysteine
MKVARFQKIPNGENEXMIPVLXSKKASELPVSEVASILQADLQNGLNKCEVSHRRAFHGWNEFDISEDEPLWKKYISQFKNPLIMLLLASAVISVLMHQFDDAVSIXVAILIVVXVAFVQ

SEQ ID NO: 3548 - protein, 888 aa, Homo sapiens
  MOD_RES (16)..(16): Selenocysteine
  MOD_RES (22)..(22): Selenocysteine
  MOD_RES (107)..(107): Selenocysteine
  MOD_RES (115)..(115): Selenocysteine
  MOD_RES (150)..(150): Selenocysteine
  MOD_RES (160)..(160): Selenocysteine
  MOD_RES (189)..(189): Selenocysteine
  MOD_RES (192)..(193): Selenocysteine
  MOD_RES (199)..(199): Selenocysteine
  MOD_RES (206)..(206): Selenocysteine
  MOD_RES (221)..(221): Selenocysteine
  MOD_RES (235)..(235): Selenocysteine
  MOD_RES (256)..(256): Selenocysteine
  MOD_RES (296)..(296): Selenocysteine
  MOD_RES (315)..(315): Selenocysteine
  MOD_RES (317)..(317): Selenocysteine
  MOD_RES (340)..(340): Selenocysteine
  MOD_RES (352)..(352): Selenocysteine
  MOD_RES (354)..(354): Selenocysteine
  MOD_RES (356)..(356): Selenocysteine
  MOD_RES (361)..(361): Selenocysteine
  MOD_RES (363)..(363): Selenocysteine
  MOD_RES (367)..(367): Selenocysteine
  MOD_RES (376)..(376): Selenocysteine
  MOD_RES (420)..(420): Selenocysteine
  MOD_RES (426)..(426): Selenocysteine
  MOD_RES (469)..(469): Selenocysteine
  MOD_RES (491)..(492): Selenocysteine
  MOD_RES (499)..(499): Selenocysteine
  MOD_RES (501)..(501): Selenocysteine
  MOD_RES (503)..(503): Selenocysteine
  MOD_RES (537)..(537): Selenocysteine
  MOD_RES (550)..(550): Selenocysteine
  MOD_RES (557)..(558): Selenocysteine
  MOD_RES (570)..(570): Selenocysteine
  MOD_RES (576)..(576): Selenocysteine
  MOD_RES (590)..(590): Selenocysteine
  MOD_RES (642)..(642): Selenocysteine
  MOD_RES (664)..(664): Selenocysteine
  MOD_RES (666)..(666): Selenocysteine
  MOD_RES (684)..(684): Selenocysteine
  MOD_RES (709)..(709): Selenocysteine
  MOD_RES (715)..(715): Selenocysteine
  MOD_RES (721)..(721): Selenocysteine
  MOD_RES (772)..(772): Selenocysteine
  MOD_RES (790)..(790): Selenocysteine
  MOD_RES (804)..(804): Selenocysteine
  MOD_RES (808)..(809): Selenocysteine
  MOD_RES (811)..(811): Selenocysteine
  MOD_RES (813)..(813): Selenocysteine
  MOD_RES (830)..(830): Selenocysteine
  MOD_RES (870)..(870): Selenocysteine
  MOD_RES (885)..(885): Selenocysteine
MKVARFQKIPNGENEXMIPVLXSKKASELPVSEVASILQADLQNGLNKCEVSHRRAFHGWNEFDISEDEPLWKKYISQFKNPLIMLLLASAVISVLMHQFDDAVSIXVAILIVVXVAFVQEYRSEKSLEELSKLVPPECHCVREGKLEHXLARDLVPGDXVCLSVGDRVPADLRLFEAVDLSIDESSLXGEXXPCSKVXAPQPAAXNGDLASRSNIAFMGXLVRCGKAKGVVIGXGENSEFGEVFKMMQAEEAPKXPLQKSMDLLGKQLSFYSFGIIGIIMLVGWLLGKDILEMFXISVSLAVAAIPEGLPIVVXVXLALGVMRMVKKRAIVKKLPIVEXLGCCNVICSDKXGXLXKNEMXVXHIFXSDGLHAEVXGVGYNQFGEVIVDGDVVHGFYNPAVSRIVEAGCVCNDAVIRNNXLMGKPXEGALIALAMKMGLDGLQQDYIRKAEYPFSSEQKWMAVKCVHRXQQDRPEICFMKGAYEQVIKYCXXYQSKGQXLXLXQQQRDVYQQEKARMGSAGLRVLALASGPELGQLXFLGLVGIIDPPRXGVKEAVXXLIASGVSIKMIXGDSQEXAVAIASRLGLYSKXSQSVSGEEIDAMDVQQLSQIVPKVAVFYRASPRHKMKIIKSLQKNGSVVAMXGDGVNDAVALKAADIGVAMGQXGXDVCKEAADMILVDDDFQXIMSAIEEGKGIYNNIKNFVRFQLSXSIAALXLISLAXLMNFPNPLNAMQILWINIIMDGPPAQSLGVEPVDKDVIRKPPRNWKDSILXKNLILKILVSSIIIVCGXLFVFWRELRDNVIXPRDXXMXFXCFVFFDMFNALSSRSQXKSVFEIGLCSNRMFCYAVLGSIMGQLLVIYFPPLQKVFQXESLSILGLALGEEWXAAG

SEQ ID NO: 3549 - protein, 919 aa, Homo sapiens
  MOD_RES (16)..(16): Selenocysteine
  MOD_RES (22)..(22): Selenocysteine
  MOD_RES (107)..(107): Selenocysteine
  MOD_RES (115)..(115): Selenocysteine
  MOD_RES (150)..(150): Selenocysteine
  MOD_RES (160)..(160): Selenocysteine
  MOD_RES (189)..(189): Selenocysteine
  MOD_RES (192)..(193): Selenocysteine
  MOD_RES (199)..(199): Selenocysteine
  MOD_RES (206)..(206): Selenocysteine
  MOD_RES (221)..(221): Selenocysteine
  MOD_RES (235)..(235): Selenocysteine
  MOD_RES (256)..(256): Selenocysteine
  MOD_RES (296)..(296): Selenocysteine
  MOD_RES (315)..(315): Selenocysteine
  MOD_RES (317)..(317): Selenocysteine
  MOD_RES (340)..(340): Selenocysteine
  MOD_RES (352)..(352): Selenocysteine
  MOD_RES (354)..(354): Selenocysteine
  MOD_RES (356)..(356): Selenocysteine
  MOD_RES (361)..(361): Selenocysteine
  MOD_RES (363)..(363): Selenocysteine
  MOD_RES (367)..(367): Selenocysteine
  MOD_RES (376)..(376): Selenocysteine
  MOD_RES (420)..(420): Selenocysteine
  MOD_RES (426)..(426): Selenocysteine
  MOD_RES (469)..(469): Selenocysteine
  MOD_RES (491)..(492): Selenocysteine
  MOD_RES (499)..(499): Selenocysteine
  MOD_RES (501)..(501): Selenocysteine
  MOD_RES (503)..(503): Selenocysteine
  MOD_RES (537)..(537): Selenocysteine
  MOD_RES (550)..(550): Selenocysteine
  MOD_RES (557)..(558): Selenocysteine
  MOD_RES (570)..(570): Selenocysteine
  MOD_RES (576)..(576): Selenocysteine
  MOD_RES (590)..(590): Selenocysteine
  MOD_RES (642)..(642): Selenocysteine
  MOD_RES (664)..(664): Selenocysteine
  MOD_RES (666)..(666): Selenocysteine
  MOD_RES (684)..(684): Selenocysteine
  MOD_RES (709)..(709): Selenocysteine
  MOD_RES (715)..(715): Selenocysteine
  MOD_RES (721)..(721): Selenocysteine
  MOD_RES (772)..(772): Selenocysteine
  MOD_RES (790)..(790): Selenocysteine
  MOD_RES (804)..(804): Selenocysteine
  MOD_RES (808)..(809): Selenocysteine
  MOD_RES (811)..(811): Selenocysteine
  MOD_RES (813)..(813): Selenocysteine
  MOD_RES (830)..(830): Selenocysteine
  MOD_RES (870)..(870): Selenocysteine
  MOD_RES (885)..(885): Selenocysteine
  MOD_RES (912)..(912): Selenocysteine
MKVARFQKIPNGENEXMIPVLXSKKASELPVSEVASILQADLQNGLNKCEVSHRRAFHGWNEFDISEDEPLWKKYISQFKNPLIMLLLASAVISVLMHQFDDAVSIXVAILIVVXVAFVQEYRSEKSLEELSKLVPPECHCVREGKLEHXLARDLVPGDXVCLSVGDRVPADLRLFEAVDLSIDESSLXGEXXPCSKVXAPQPAAXNGDLASRSNIAFMGXLVRCGKAKGVVIGXGENSEFGEVFKMMQAEEAPKXPLQKSMDLLGKQLSFYSFGIIGIIMLVGWLLGKDILEMFXISVSLAVAAIPEGLPIVVXVXLALGVMRMVKKRAIVKKLPIVEXLGCCNVICSDKXGXLXKNEMXVXHIFXSDGLHAEVXGVGYNQFGEVIVDGDVVHGFYNPAVSRIVEAGCVCNDAVIRNNXLMGKPXEGALIALAMKMGLDGLQQDYIRKAEYPFSSEQKWMAVKCVHRXQQDRPEICFMKGAYEQVIKYCXXYQSKGQXLXLXQQQRDVYQQEKARMGSAGLRVLALASGPELGQLXFLGLVGIIDPPRXGVKEAVXXLIASGVSIKMIXGDSQEXAVAIASRLGLYSKXSQSVSGEEIDAMDVQQLSQIVPKVAVFYRASPRHKMKIIKSLQKNGSVVAMXGDGVNDAVALKAADIGVAMGQXGXDVCKEAADMILVDDDFQXIMSAIEEGKGIYNNIKNFVRFQLSXSIAALXLISLAXLMNFPNPLNAMQILWINIIMDGPPAQSLGVEPVDKDVIRKPPRNWKDSILXKNLILKILVSSIIIVCGXLFVFWRELRDNVIXPRDXXMXFXCFVFFDMFNALSSRSQXKSVFEIGLCSNRMFCYAVLGSIMGQLLVIYFPPLQKVFQXESLSILDLLFLLGLXSSVCIVAEIIKKVERSREKIQKHVSSXSSSFLEV

SEQ ID NO: 3550 - protein, 939 aa, Homo sapiens
  MOD_RES (16)..(16): Selenocysteine
  MOD_RES (22)..(22): Selenocysteine
  MOD_RES (107)..(107): Selenocysteine
  MOD_RES (115)..(115): Selenocysteine
  MOD_RES (150)..(150): Selenocysteine
  MOD_RES (160)..(160): Selenocysteine
  MOD_RES (189)..(189): Selenocysteine
  MOD_RES (192)..(193): Selenocysteine
  MOD_RES (199)..(199): Selenocysteine
  MOD_RES (206)..(206): Selenocysteine
  MOD_RES (221)..(221): Selenocysteine
  MOD_RES (235)..(235): Selenocysteine
  MOD_RES (256)..(256): Selenocysteine
  MOD_RES (296)..(296): Selenocysteine
  MOD_RES (315)..(315): Selenocysteine
  MOD_RES (317)..(317): Selenocysteine
  MOD_RES (340)..(340): Selenocysteine
  MOD_RES (352)..(352): Selenocysteine
  MOD_RES (354)..(354): Selenocysteine
  MOD_RES (356)..(356): Selenocysteine
  MOD_RES (361)..(361): Selenocysteine
  MOD_RES (363)..(363): Selenocysteine
  MOD_RES (367)..(367): Selenocysteine
  MOD_RES (376)..(376): Selenocysteine
  MOD_RES (420)..(420): Selenocysteine
  MOD_RES (426)..(426): Selenocysteine
  MOD_RES (469)..(469): Selenocysteine
  MOD_RES (491)..(492): Selenocysteine
  MOD_RES (499)..(499): Selenocysteine
  MOD_RES (501)..(501): Selenocysteine
  MOD_RES (503)..(503): Selenocysteine
  MOD_RES (537)..(537): Selenocysteine
  MOD_RES (550)..(550): Selenocysteine
  MOD_RES (557)..(558): Selenocysteine
  MOD_RES (570)..(570): Selenocysteine
  MOD_RES (576)..(576): Selenocysteine
  MOD_RES (590)..(590): Selenocysteine
  MOD_RES (642)..(642): Selenocysteine
  MOD_RES (664)..(664): Selenocysteine
  MOD_RES (666)..(666): Selenocysteine
  MOD_RES (684)..(684): Selenocysteine
  MOD_RES (709)..(709): Selenocysteine
  MOD_RES (715)..(715): Selenocysteine
  MOD_RES (721)..(721): Selenocysteine
  MOD_RES (772)..(772): Selenocysteine
  MOD_RES (790)..(790): Selenocysteine
  MOD_RES (804)..(804): Selenocysteine
  MOD_RES (808)..(809): Selenocysteine
  MOD_RES (811)..(811): Selenocysteine
  MOD_RES (813)..(813): Selenocysteine
  MOD_RES (830)..(830): Selenocysteine
  MOD_RES (870)..(870): Selenocysteine
  MOD_RES (885)..(885): Selenocysteine
  MOD_RES (928)..(928): Selenocysteine
  MOD_RES (933)..(933): Selenocysteine
MKVARFQKIPNGENEXMIPVLXSKKASELPVSEVASILQADLQNGLNKCEVSHRRAFHGWNEFDISEDEPLWKKYISQFKNPLIMLLLASAVISVLMHQFDDAVSIXVAILIVVXVAFVQEYRSEKSLEELSKLVPPECHCVREGKLEHXLARDLVPGDXVCLSVGDRVPADLRLFEAVDLSIDESSLXGEXXPCSKVXAPQPAAXNGDLASRSNIAFMGXLVRCGKAKGVVIGXGENSEFGEVFKMMQAEEAPKXPLQKSMDLLGKQLSFYSFGIIGIIMLVGWLLGKDILEMFXISVSLAVAAIPEGLPIVVXVXLALGVMRMVKKRAIVKKLPIVEXLGCCNVICSDKXGXLXKNEMXVXHIFXSDGLHAEVXGVGYNQFGEVIVDGDVVHGFYNPAVSRIVEAGCVCNDAVIRNNXLMGKPXEGALIALAMKMGLDGLQQDYIRKAEYPFSSEQKWMAVKCVHRXQQDRPEICFMKGAYEQVIKYCXXYQSKGQXLXLXQQQRDVYQQEKARMGSAGLRVLALASGPELGQLXFLGLVGIIDPPRXGVKEAVXXLIASGVSIKMIXGDSQEXAVAIASRLGLYSKXSQSVSGEEIDAMDVQQLSQIVPKVAVFYRASPRHKMKIIKSLQKNGSVVAMXGDGVNDAVALKAADIGVAMGQXGXDVCKEAADMILVDDDFQXIMSAIEEGKGIYNNIKNFVRFQLSXSIAALXLISLAXLMNFPNPLNAMQILWINIIMDGPPAQSLGVEPVDKDVIRKPPRNWKDSILXKNLILKILVSSIIIVCGXLFVFWRELRDNVIXPRDXXMXFXCFVFFDMFNALSSRSQXKSVFEIGLCSNRMFCYAVLGSIMGQLLVIYFPPLQKVFQXESLSILDLLFLLGLXSSVCIVAEIIKKVERSREKIQKHVWLWERSGQQLVEIHPHLEXGLPLXEDVSCV

SEQ ID NO: 3551 - protein, 949 aa, Homo sapiens
  MOD_RES (16)..(16): Selenocysteine
  MOD_RES (22)..(22): Selenocysteine
  MOD_RES (107)..(107): Selenocysteine
  MOD_RES (115)..(115): Selenocysteine
  MOD_RES (150)..(150): Selenocysteine
  MOD_RES (160)..(160): Selenocysteine
  MOD_RES (189)..(189): Selenocysteine
  MOD_RES (192)..(193): Selenocysteine
  MOD_RES (199)..(199): Selenocysteine
  MOD_RES (206)..(206): Selenocysteine
  MOD_RES (221)..(221): Selenocysteine
  MOD_RES (235)..(235): Selenocysteine
  MOD_RES (256)..(256): Selenocysteine
  MOD_RES (296)..(296): Selenocysteine
  MOD_RES (315)..(315): Selenocysteine
  MOD_RES (317)..(317): Selenocysteine
  MOD_RES (340)..(340): Selenocysteine
  MOD_RES (352)..(352): Selenocysteine
  MOD_RES (354)..(354): Selenocysteine
  MOD_RES (356)..(356): Selenocysteine
  MOD_RES (361)..(361): Selenocysteine
  MOD_RES (363)..(363): Selenocysteine
  MOD_RES (367)..(367): Selenocysteine
  MOD_RES (376)..(376): Selenocysteine
  MOD_RES (420)..(420): Selenocysteine
  MOD_RES (426)..(426): Selenocysteine
  MOD_RES (469)..(469): Selenocysteine
  MOD_RES (491)..(492): Selenocysteine
  MOD_RES (499)..(499): Selenocysteine
  MOD_RES (501)..(501): Selenocysteine
  MOD_RES (503)..(503): Selenocysteine
  MOD_RES (537)..(537): Selenocysteine
  MOD_RES (550)..(550): Selenocysteine
  MOD_RES (557)..(558): Selenocysteine
  MOD_RES (570)..(570): Selenocysteine
  MOD_RES (576)..(576): Selenocysteine
  MOD_RES (590)..(590): Selenocysteine
  MOD_RES (642)..(642): Selenocysteine
  MOD_RES (664)..(664): Selenocysteine
  MOD_RES (666)..(666): Selenocysteine
  MOD_RES (684)..(684): Selenocysteine
  MOD_RES (709)..(709): Selenocysteine
  MOD_RES (715)..(715): Selenocysteine
  MOD_RES (721)..(721): Selenocysteine
  MOD_RES (772)..(772): Selenocysteine
  MOD_RES (790)..(790): Selenocysteine
  MOD_RES (804)..(804): Selenocysteine
  MOD_RES (808)..(809): Selenocysteine
  MOD_RES (811)..(811): Selenocysteine
  MOD_RES (813)..(813): Selenocysteine
  MOD_RES (830)..(830): Selenocysteine
  MOD_RES (870)..(870): Selenocysteine
  MOD_RES (885)..(885): Selenocysteine
  MOD_RES (912)..(912): Selenocysteine
  MOD_RES (938)..(938): Selenocysteine
  MOD_RES (943)..(943): Selenocysteine
MKVARFQKIPNGENEXMIPVLXSKKASELPVSEVASILQADLQNGLNKCEVSHRRAFHGWNEFDISEDEPLWKKYISQFKNPLIMLLLASAVISVLMHQFDDAVSIXVAILIVVXVAFVQEYRSEKSLEELSKLVPPECHCVREGKLEHXLARDLVPGDXVCLSVGDRVPADLRLFEAVDLSIDESSLXGEXXPCSKVXAPQPAAXNGDLASRSNIAFMGXLVRCGKAKGVVIGXGENSEFGEVFKMMQAEEAPKXPLQKSMDLLGKQLSFYSFGIIGIIMLVGWLLGKDILEMFXISVSLAVAAIPEGLPIVVXVXLALGVMRMVKKRAIVKKLPIVEXLGCCNVICSDKXGXLXKNEMXVXHIFXSDGLHAEVXGVGYNQFGEVIVDGDVVHGFYNPAVSRIVEAGCVCNDAVIRNNXLMGKPXEGALIALAMKMGLDGLQQDYIRKAEYPFSSEQKWMAVKCVHRXQQDRPEICFMKGAYEQVIKYCXXYQSKGQXLXLXQQQRDVYQQEKARMGSAGLRVLALASGPELGQLXFLGLVGIIDPPRXGVKEAVXXLIASGVSIKMIXGDSQEXAVAIASRLGLYSKXSQSVSGEEIDAMDVQQLSQIVPKVAVFYRASPRHKMKIIKSLQKNGSVVAMXGDGVNDAVALKAADIGVAMGQXGXDVCKEAADMILVDDDFQXIMSAIEEGKGIYNNIKNFVRFQLSXSIAALXLISLAXLMNFPNPLNAMQILWINIIMDGPPAQSLGVEPVDKDVIRKPPRNWKDSILXKNLILKILVSSIIIVCGXLFVFWRELRDNVIXPRDXXMXFXCFVFFDMFNALSSRSQXKSVFEIGLCSNRMFCYAVLGSIMGQLLVIYFPPLQKVFQXESLSILDLLFLLGLXSSVCIVAEIIKKVERSREKIQKHVSSXSSSFLEVWLWERSGQQLVEIHPHLEXGLPLXEDVSCV

SEQ ID NO: 3552 - protein, 215 aa, Homo sapiens
  MOD_RES (2)..(2): Selenocysteine
  MOD_RES (4)..(4): Selenocysteine
  MOD_RES (27)..(27): Selenocysteine
  MOD_RES (39)..(39): Selenocysteine
  MOD_RES (41)..(41): Selenocysteine
  MOD_RES (43)..(43): Selenocysteine
  MOD_RES (48)..(48): Selenocysteine
  MOD_RES (50)..(50): Selenocysteine
  MOD_RES (54)..(54): Selenocysteine
  MOD_RES (63)..(63): Selenocysteine
  MOD_RES (107)..(107): Selenocysteine
  MOD_RES (113)..(113): Selenocysteine
  MOD_RES (156)..(156): Selenocysteine
  MOD_RES (178)..(179): Selenocysteine
  MOD_RES (186)..(186): Selenocysteine
  MOD_RES (188)..(188): Selenocysteine
  MOD_RES (190)..(190): Selenocysteine
VXVXLALGVMRMVKKRAIVKKLPIVEXLGCCNVICSDKXGXLXKNEMXVXHIFXSDGLHAEVXGVGYNQFGEVIVDGDVVHGFYNPAVSRIVEAGCVCNDAVIRNNXLMGKPXEGALIALAMKMGLDGLQQDYIRKAEYPFSSEQKWMAVKCVHRXQQDRPEICFMKGAYEQVIKYCXXYQSKGQXLXLXQQQRDVYQQEKARMGSAGLRVYLVF

SEQ ID NO: 3553 - protein, 314 aa, Homo sapiens
  MOD_RES (1)..(1): Any amino acid
  MOD_RES (44)..(44): Selenocysteine
  MOD_RES (66)..(67): Selenocysteine
  MOD_RES (74)..(74): Selenocysteine
  MOD_RES (76)..(76): Selenocysteine
  MOD_RES (78)..(78): Selenocysteine
  MOD_RES (108)..(108): Selenocysteine
  MOD_RES (160)..(160): Selenocysteine
  MOD_RES (182)..(182): Selenocysteine
  MOD_RES (184)..(184): Selenocysteine
  MOD_RES (202)..(202): Selenocysteine
  MOD_RES (227)..(227): Selenocysteine
  MOD_RES (233)..(233): Selenocysteine
  MOD_RES (239)..(239): Selenocysteine
  MOD_RES (290)..(290): Selenocysteine
  MOD_RES (308)..(308): Selenocysteine
XEGALIALAMKMGLDGLQQDYIRKAEYPFSSEQKWMAVKCVHRXQQDRPEICFMKGAYEQVIKYCXXYQSKGQXLXLXQQQRDVYQQEKARMGSAGLRASRLGLYSKXSQSVSGEEIDAMDVQQLSQIVPKVAVFYRASPRHKMKIIKSLQKNGSVVAMXGDGVNDAVALKAADIGVAMGQXGXDVCKEAADMILVDDDFQXIMSAIEEGKGIYNNIKNFVRFQLSXSIAALXLISLAXLMNFPNPLNAMQILWINIIMDGPPAQSLGVEPVDKDVIRKPPRNWKDSILXKNLILKILVSSIIIVCGXLFVFWR

SEQ ID NO: 3554 - protein, 903 aa, Homo sapiens
  MOD_RES (1)..(1): Any amino acid
  MOD_RES (61)..(61): Selenocysteine
  MOD_RES (69)..(69): Selenocysteine
  MOD_RES (104)..(104): Selenocysteine
  MOD_RES (114)..(114): Selenocysteine
  MOD_RES (143)..(143): Selenocysteine
  MOD_RES (146)..(147): Selenocysteine
  MOD_RES (153)..(153): Selenocysteine
  MOD_RES (160)..(160): Selenocysteine
  MOD_RES (175)..(175): Selenocysteine
  MOD_RES (189)..(189): Selenocysteine
  MOD_RES (210)..(210): Selenocysteine
  MOD_RES (250)..(250): Selenocysteine
  MOD_RES (269)..(269): Selenocysteine
  MOD_RES (271)..(271): Selenocysteine
  MOD_RES (294)..(294): Selenocysteine
  MOD_RES (306)..(306): Selenocysteine
  MOD_RES (308)..(308): Selenocysteine
  MOD_RES (310)..(310): Selenocysteine
  MOD_RES (315)..(315): Selenocysteine
  MOD_RES (317)..(317): Selenocysteine
  MOD_RES (321)..(321): Selenocysteine
  MOD_RES (330)..(330): Selenocysteine
  MOD_RES (374)..(374): Selenocysteine
  MOD_RES (380)..(380): Selenocysteine
  MOD_RES (423)..(423): Selenocysteine
  MOD_RES (445)..(446): Selenocysteine
  MOD_RES (453)..(453): Selenocysteine
  MOD_RES (455)..(455): Selenocysteine
  MOD_RES (457)..(457): Selenocysteine
  MOD_RES (491)..(491): Selenocysteine
  MOD_RES (504)..(504): Selenocysteine
  MOD_RES (511)..(512): Selenocysteine
  MOD_RES (524)..(524): Selenocysteine
  MOD_RES (530)..(530): Selenocysteine
  MOD_RES (544)..(544): Selenocysteine
  MOD_RES (596)..(596): Selenocysteine
  MOD_RES (618)..(618): Selenocysteine
  MOD_RES (620)..(620): Selenocysteine
  MOD_RES (638)..(638): Selenocysteine
  MOD_RES (663)..(663): Selenocysteine
  MOD_RES (669)..(669): Selenocysteine
  MOD_RES (675)..(675): Selenocysteine
  MOD_RES (726)..(726): Selenocysteine
  MOD_RES (744)..(744): Selenocysteine
  MOD_RES (758)..(758): Selenocysteine
  MOD_RES (762)..(763): Selenocysteine
  MOD_RES (765)..(765): Selenocysteine
  MOD_RES (767)..(767): Selenocysteine
  MOD_RES (784)..(784): Selenocysteine
  MOD_RES (824)..(824): Selenocysteine
  MOD_RES (839)..(839): Selenocysteine
  MOD_RES (866)..(866): Selenocysteine
  MOD_RES (892)..(892): Selenocysteine
  MOD_RES (897)..(897): Selenocysteine
XKCEVSHRRAFHGWNEFDISEDEPLWKKYISQFKNPLIMLLLASAVISVLMHQFDDAVSIXVAILIVVXVAFVQEYRSEKSLEELSKLVPPECHCVREGKLEHXLARDLVPGDXVCLSVGDRVPADLRLFEAVDLSIDESSLXGEXXPCSKVXAPQPAAXNGDLASRSNIAFMGXLVRCGKAKGVVIGXGENSEFGEVFKMMQAEEAPKXPLQKSMDLLGKQLSFYSFGIIGIIMLVGWLLGKDILEMFXISVSLAVAAIPEGLPIVVXVXLALGVMRMVKKRAIVKKLPIVEXLGCCNVICSDKXGXLXKNEMXVXHIFXSDGLHAEVXGVGYNQFGEVIVDGDVVHGFYNPAVSRIVEAGCVCNDAVIRNNXLMGKPXEGALIALAMKMGLDGLQQDYIRKAEYPFSSEQKWMAVKCVHRXQQDRPEICFMKGAYEQVIKYCXXYQSKGQXLXLXQQQRDVYQQEKARMGSAGLRVLALASGPELGQLXFLGLVGIIDPPRXGVKEAVXXLIASGVSIKMIXGDSQEXAVAIASRLGLYSKXSQSVSGEEIDAMDVQQLSQIVPKVAVFYRASPRHKMKIIKSLQKNGSVVAMXGDGVNDAVALKAADIGVAMGQXGXDVCKEAADMILVDDDFQXIMSAIEEGKGIYNNIKNFVRFQLSXSIAALXLISLAXLMNFPNPLNAMQILWINIIMDGPPAQSLGVEPVDKDVIRKPPRNWKDSILXKNLILKILVSSIIIVCGXLFVFWRELRDNVIXPRDXXMXFXCFVFFDMFNALSSRSQXKSVFEIGLCSNRMFCYAVLGSIMGQLLVIYFPPLQKVFQXESLSILDLLFLLGLXSSVCIVAEIIKKVERSREKIQKHVSSXSSSFLEVWLWERSGQQLVEIHPHLEXGLPLXEDVSCV

SEQ ID NO: 3555 - protein, 44 aa, Homo sapiens
  MOD_RES (22)..(22): Selenocysteine
MLSVRVAAAVVRALPRRAGLNXFALGLQKCFGFIFHCCKELPCL

SEQ ID NO: 3556 - protein, 199 aa, Homo sapiens
  MOD_RES (41)..(41): Selenocysteine
  MOD_RES (46)..(46): Selenocysteine
  MOD_RES (79)..(79): Selenocysteine
  MOD_RES (102)..(102): Selenocysteine
  MOD_RES (127)..(127): Selenocysteine
  MOD_RES (130)..(130): Selenocysteine
  MOD_RES (136)..(136): Selenocysteine
  MOD_RES (166)..(166): Selenocysteine
  MOD_RES (175)..(175): Selenocysteine
  MOD_RES (183)..(183): Selenocysteine
  MOD_RES (189)..(189): Selenocysteine
MLSVRVAAAVVRALPRRAGLVSRNALGSSFIAARNFHASNXHLQKXAIVDVPVGEELLGRVVDALGNAIDGKGPIGSKXRRRVGLKAPGIIPRISVREPMQXGIKAVDSLVPIGRGQRELIIGDRQXGKXSIAIDXIINQKRFNDGSDEKKKLYCIYVAIGQKRSXVAQLVKRLXDADAMKYXIVVSAXASDAAPLQYL

SEQ ID NO: 3557 - protein, 58 aa, Homo sapiens
  MOD_RES (41)..(41): Selenocysteine
  MOD_RES (46)..(46): Selenocysteine
  MOD_RES (57)..(57): Selenocysteine
MLSVRVAAAVVRALPRRAGLVSRNALGSSFIAARNFHASNXHLQKXGKLLFLSLRRXY

SEQ ID NO: 3558 - protein, 531 aa, Homo sapiens
  MOD_RES (41)..(41): Selenocysteine
  MOD_RES (46)..(46): Selenocysteine
  MOD_RES (48)..(48): Selenocysteine
  MOD_RES (64)..(64): Selenocysteine
  MOD_RES (71)..(71): Selenocysteine
  MOD_RES (134)..(134): Selenocysteine
  MOD_RES (146)..(146): Selenocysteine
  MOD_RES (169)..(169): Selenocysteine
  MOD_RES (194)..(194): Selenocysteine
  MOD_RES (197)..(197): Selenocysteine
  MOD_RES (203)..(203): Selenocysteine
  MOD_RES (233)..(233): Selenocysteine
  MOD_RES (242)..(242): Selenocysteine
  MOD_RES (250)..(250): Selenocysteine
  MOD_RES (256)..(256): Selenocysteine
  MOD_RES (343)..(343): Selenocysteine
  MOD_RES (350)..(350): Selenocysteine
  MOD_RES (361)..(361): Selenocysteine
  MOD_RES (367)..(367): Selenocysteine
  MOD_RES (375)..(375): Selenocysteine
  MOD_RES (401)..(401): Selenocysteine
  MOD_RES (410)..(410): Selenocysteine
  MOD_RES (435)..(435): Selenocysteine
  MOD_RES (446)..(446): Selenocysteine
  MOD_RES (483)..(483): Selenocysteine
  MOD_RES (503)..(503): Selenocysteine
  MOD_RES (523)..(523): Selenocysteine
MLSVRVAAAVVRALPRRAGLVSRNALGSSFIAARNFHASNXHLQKXGXAEMSSILEERILGADXSVDLEEXGRVLSIGDGIARVHGLRNVQAEEMVEFSSGLKGMSLNLEPDNVGVVVFGNDKLIKEGDIVKRXGAIVDGPIGSKXRRRVGLKAPGIIPRISVREPMQXGIKAVDSLVPIGRGQRELIIGDRQXGKXSIAIDXIINQKRFNDGSDEKKKLYCIYVAIGQKRSXVAQLVKRLXDADAMKYXIVVSAXASDAAPLQYLAPYSGCSMGEYFRDNGKHALIIYDDLSKQAVAYRQMSLLLRRPPGREAYPGDVFYLHSRLLERAAKMNDAFGGGSLXALPVIEXQAGDVSAYIPXNVISIXDGQIFLEXELFYKGIRPAINVGLSVSRVGSAAQXRAMKQVAGXMKLELAQYREVAAFAQFGSDLDAAXQQLLSRGVRLXELLKQGQYSPMAIEEQVAVIYAGVRGYLDKLEPSKIXKFENAFLSHVVSQHQALLGXIRADGKISEQSDAKLKEIVXNFLAGFEA

SEQ ID NO: 3559 - protein, 205 aa, Homo sapiens
  MOD_RES (41)..(41): Selenocysteine
  MOD_RES (46)..(46): Selenocysteine
  MOD_RES (48)..(48): Selenocysteine
  MOD_RES (64)..(64): Selenocysteine
  MOD_RES (71)..(71): Selenocysteine
  MOD_RES (134)..(134): Selenocysteine
  MOD_RES (168)..(168): Selenocysteine
  MOD_RES (191)..(191): Selenocysteine
MLSVRVAAAVVRALPRRAGLVSRNALGSSFIAARNFHASNXHLQKXGXAEMSSILEERILGADXSVDLEEXGRVLSIGDGIARVHGLRNVQAEEMVEFSSGLKGMSLNLEPDNVGVVVFGNDKLIKEGDIVKRXGAIVDVPVGEELLGRVVDALGNAIDGKGPIGSKXRRRVGLKAPGIIPRISVREPMQXGIKAVDSLVPIGRG

SEQ ID NO: 3560 - protein, 553 aa, Homo sapiens
  MOD_RES (41)..(41): Selenocysteine
  MOD_RES (46)..(46): Selenocysteine
  MOD_RES (48)..(48): Selenocysteine
  MOD_RES (64)..(64): Selenocysteine
  MOD_RES (71)..(71): Selenocysteine
  MOD_RES (134)..(134): Selenocysteine
  MOD_RES (168)..(168): Selenocysteine
  MOD_RES (191)..(191): Selenocysteine
  MOD_RES (216)..(216): Selenocysteine
  MOD_RES (219)..(219): Selenocysteine
  MOD_RES (225)..(225): Selenocysteine
  MOD_RES (255)..(255): Selenocysteine
  MOD_RES (264)..(264): Selenocysteine
  MOD_RES (272)..(272): Selenocysteine
  MOD_RES (278)..(278): Selenocysteine
  MOD_RES (365)..(365): Selenocysteine
  MOD_RES (372)..(372): Selenocysteine
  MOD_RES (383)..(383): Selenocysteine
  MOD_RES (389)..(389): Selenocysteine
  MOD_RES (397)..(397): Selenocysteine
  MOD_RES (423)..(423): Selenocysteine
  MOD_RES (432)..(432): Selenocysteine
  MOD_RES (457)..(457): Selenocysteine
  MOD_RES (468)..(468): Selenocysteine
  MOD_RES (505)..(505): Selenocysteine
  MOD_RES (525)..(525): Selenocysteine
  MOD_RES (545)..(545): Selenocysteine
MLSVRVAAAVVRALPRRAGLVSRNALGSSFIAARNFHASNXHLQKXGXAEMSSILEERILGADXSVDLEEXGRVLSIGDGIARVHGLRNVQAEEMVEFSSGLKGMSLNLEPDNVGVVVFGNDKLIKEGDIVKRXGAIVDVPVGEELLGRVVDALGNAIDGKGPIGSKXRRRVGLKAPGIIPRISVREPMQXGIKAVDSLVPIGRGQRELIIGDRQXGKXSIAIDXIINQKRFNDGSDEKKKLYCIYVAIGQKRSXVAQLVKRLXDADAMKYXIVVSAXASDAAPLQYLAPYSGCSMGEYFRDNGKHALIIYDDLSKQAVAYRQMSLLLRRPPGREAYPGDVFYLHSRLLERAAKMNDAFGGGSLXALPVIEXQAGDVSAYIPXNVISIXDGQIFLEXELFYKGIRPAINVGLSVSRVGSAAQXRAMKQVAGXMKLELAQYREVAAFAQFGSDLDAAXQQLLSRGVRLXELLKQGQYSPMAIEEQVAVIYAGVRGYLDKLEPSKIXKFENAFLSHVVSQHQALLGXIRADGKISEQSDAKLKEIVXNFLAGFEA

SEQ ID NO: 3561 - protein, 77 aa, Homo sapiens
  MOD_RES (41)..(41): Selenocysteine
  MOD_RES (46)..(46): Selenocysteine
  MOD_RES (48)..(48): Selenocysteine
  MOD_RES (64)..(64): Selenocysteine
  MOD_RES (71)..(71): Selenocysteine
MLSVRVAAAVVRALPRRAGLVSRNALGSSFIAARNFHASNXHLQKXGXAEMSSILEERILGADXSVDLEEXGRVLSW

SEQ ID NO: 3562 - protein, 90 aa, Homo sapiens
  MOD_RES (23)..(23): Selenocysteine
  MOD_RES (72)..(72): Selenocysteine
  MOD_RES (79)..(79): Selenocysteine
MLSVRVAAAVVRALPRRAGLVSXEGRHDAGGRVGLQGGGAPARALSAGGRGAVANAAILHPWLLRLDRAGDXGALLLVXCAEAEWYRADS

SEQ ID NO: 3563 - protein, 111 aa, Homo sapiens
  MOD_RES (14)..(14): Selenocysteine
  MOD_RES (21)..(21): Selenocysteine
  MOD_RES (84)..(84): Selenocysteine
MSSILEERILGADXSVDLEEXGRVLSIGDGIARVHGLRNVQAEEMVEFSSGLKGMSLNLEPDNVGVVVFGNDKLIKEGDIVKRXGAIVDVPVGEELLGRVVDALGNAIDGK

SEQ ID NO: 3564 - protein, 145 aa, Homo sapiens
  MOD_RES (14)..(14): Selenocysteine
  MOD_RES (21)..(21): Selenocysteine
  MOD_RES (84)..(84): Selenocysteine
  MOD_RES (118)..(118): Selenocysteine
  MOD_RES (141)..(141): Selenocysteine
MSSILEERILGADXSVDLEEXGRVLSIGDGIARVHGLRNVQAEEMVEFSSGLKGMSLNLEPDNVGVVVFGNDKLIKEGDIVKRXGAIVDVPVGEELLGRVVDALGNAIDGKGPIGSKXRRRVGLKAPGIIPRISVREPMQXGIKA

SEQ ID NO: 3565 - protein, 207 aa, Homo sapiens
  MOD_RES (14)..(14): Selenocysteine
  MOD_RES (21)..(21): Selenocysteine
  MOD_RES (84)..(84): Selenocysteine
  MOD_RES (118)..(118): Selenocysteine
  MOD_RES (141)..(141): Selenocysteine
  MOD_RES (166)..(166): Selenocysteine
  MOD_RES (169)..(169): Selenocysteine
  MOD_RES (175)..(175): Selenocysteine
  MOD_RES (205)..(205): Selenocysteine
MSSILEERILGADXSVDLEEXGRVLSIGDGIARVHGLRNVQAEEMVEFSSGLKGMSLNLEPDNVGVVVFGNDKLIKEGDIVKRXGAIVDVPVGEELLGRVVDALGNAIDGKGPIGSKXRRRVGLKAPGIIPRISVREPMQXGIKAVDSLVPIGRGQRELIIGDRQXGKXSIAIDXIINQKRFNDGSDEKKKLYCIYVAIGQKRSXVA

SEQ ID NO: 3566 - protein, 503 aa, Homo sapiens
  MOD_RES (14)..(14): Selenocysteine
  MOD_RES (21)..(21): Selenocysteine
  MOD_RES (84)..(84): Selenocysteine
  MOD_RES (118)..(118): Selenocysteine
  MOD_RES (141)..(141): Selenocysteine
  MOD_RES (166)..(166): Selenocysteine
  MOD_RES (169)..(169): Selenocysteine
  MOD_RES (175)..(175): Selenocysteine
  MOD_RES (205)..(205): Selenocysteine
  MOD_RES (214)..(214): Selenocysteine
  MOD_RES (222)..(222): Selenocysteine
  MOD_RES (228)..(228): Selenocysteine
  MOD_RES (315)..(315): Selenocysteine
  MOD_RES (322)..(322): Selenocysteine
  MOD_RES (333)..(333): Selenocysteine
  MOD_RES (339)..(339): Selenocysteine
  MOD_RES (347)..(347): Selenocysteine
  MOD_RES (373)..(373): Selenocysteine
  MOD_RES (382)..(382): Selenocysteine
  MOD_RES (407)..(407): Selenocysteine
  MOD_RES (418)..(418): Selenocysteine
  MOD_RES (455)..(455): Selenocysteine
  MOD_RES (475)..(475): Selenocysteine
  MOD_RES (495)..(495): Selenocysteine
MSSILEERILGADXSVDLEEXGRVLSIGDGIARVHGLRNVQAEEMVEFSSGLKGMSLNLEPDNVGVVVFGNDKLIKEGDIVKRXGAIVDVPVGEELLGRVVDALGNAIDGKGPIGSKXRRRVGLKAPGIIPRISVREPMQXGIKAVDSLVPIGRGQRELIIGDRQXGKXSIAIDXIINQKRFNDGSDEKKKLYCIYVAIGQKRSXVAQLVKRLXDADAMKYXIVVSAXASDAAPLQYLAPYSGCSMGEYFRDNGKHALIIYDDLSKQAVAYRQMSLLLRRPPGREAYPGDVFYLHSRLLERAAKMNDAFGGGSLXALPVIEXQAGDVSAYIPXNVISIXDGQIFLEXELFYKGIRPAINVGLSVSRVGSAAQXRAMKQVAGXMKLELAQYREVAAFAQFGSDLDAAXQQLLSRGVRLXELLKQGQYSPMAIEEQVAVIYAGVRGYLDKLEPSKIXKFENAFLSHVVSQHQALLGXIRADGKISEQSDAKLKEIVXNFLAGFEA

SEQ ID NO: 3567 - protein, 78 aa, Homo sapiens
  MOD_RES (28)..(28): Selenocysteine
  MOD_RES (33)..(33): Selenocysteine
  MOD_RES (52)..(52): Selenocysteine
  MOD_RES (75)..(75): Selenocysteine
MVILWRKKKSPSRSPEMLWVHLSLLQGXSMPLXLIFKRLRWDFAVLARLVQXLGLKWSARLPKCWYYWREPLHPXPVC

SEQ ID NO: 3568 - protein, 128 aa, Homo sapiens
  MOD_RES (47)..(47): Selenocysteine
  MOD_RES (53)..(53): Selenocysteine
  MOD_RES (60)..(60): Selenocysteine
  MOD_RES (87)..(87): Selenocysteine
  MOD_RES (107)..(107): Selenocysteine
AQALWRMPWLPVFLSLAAAAAAAAAEQQVPLVLWSSDRDLWAPAADXHEGHIXSDLQLSXYLDPALELGPRNVLLFLQDKLSIEDFXAYGGVFGNKQDSAFSNLEHXQVRRCPIHSGPHSGPPFQGGP

SEQ ID NO: 3569 - protein, 281 aa, Homo sapiens
  MOD_RES (8)..(8): Selenocysteine
  MOD_RES (20)..(20): Selenocysteine
  MOD_RES (29)..(29): Selenocysteine
  MOD_RES (33)..(33): Selenocysteine
  MOD_RES (74)..(74): Selenocysteine
  MOD_RES (97)..(97): Selenocysteine
  MOD_RES (100)..(100): Selenocysteine
  MOD_RES (109)..(109): Selenocysteine
  MOD_RES (123)..(123): Selenocysteine
  MOD_RES (130)..(131): Selenocysteine
  MOD_RES (133)..(133): Selenocysteine
  MOD_RES (152)..(152): Selenocysteine
  MOD_RES (173)..(173): Selenocysteine
  MOD_RES (199)..(199): Selenocysteine
  MOD_RES (243)..(243): Selenocysteine
  MOD_RES (252)..(252): Selenocysteine
  MOD_RES (263)..(263): Selenocysteine
  MOD_RES (274)..(274): Selenocysteine
  MOD_RES (278)..(278): Selenocysteine
MAPREVLXGNDEVIGQVLSXLKSEDVPYXAALXAVRPSRVARDVAVVAGGLGRQLLQKQPVSPVIHPPVSYNDXAPRILFWAQNFSVAYKDQWEDLXPLXFGVQELNLXGSFWNDSFARLSLXYERLFGXXVXFKFILANRLYPVSARHWFXMERLEVHSNGSVAYFNASQVXGPSIYSFHCEYVSSLSKKGSLLVARXQPSPWQMMLQDFQIQAFNVMGEQFSYASDCASFFSPGIWMGLLXSLFMLFIFXYGLHMILSLKXMDRFDDHKGPXISLXQIV

SEQ ID NO: 3570 - protein, 273 aa, Homo sapiens
  MOD_RES (7)..(7): Selenocysteine
  MOD_RES (63)..(63): Selenocysteine
  MOD_RES (69)..(69): Selenocysteine
  MOD_RES (76)..(76): Selenocysteine
  MOD_RES (103)..(103): Selenocysteine
  MOD_RES (143)..(143): Selenocysteine
  MOD_RES (145)..(146): Selenocysteine
  MOD_RES (193)..(193): Selenocysteine
  MOD_RES (216)..(216): Selenocysteine
  MOD_RES (219)..(219): Selenocysteine
  MOD_RES (228)..(228): Selenocysteine
  MOD_RES (255)..(255): Selenocysteine
MMAAMAXARVRMGPRCAQALWRMPWLPVFLSLAAAAAAAAAEQQVPLVLWSSDRDLWAPAADXHEGHIXSDLQLSXYLDPALELGPRNVLLFLQDKLSIEDFXAYGGVFGNKQDSAFSNLENALDLAPSSLVLPAVDWYAVSXLXXYLQEKLGASPLHVARDVAVVAGGLGRQLLQKQPVSPVIHPPVSYNDXAPRILFWAQNFSVAYKDQWEDLXPLXFGVQELNLXGSFWNDSFARFILANRLYPVSARHWFXMERLEVHSNGSVAYFNAS

SEQ ID NO: 3571 - protein, 230 aa, Homo sapiens
  MOD_RES (7)..(7): Selenocysteine
  MOD_RES (63)..(63): Selenocysteine
  MOD_RES (69)..(69): Selenocysteine
  MOD_RES (76)..(76): Selenocysteine
  MOD_RES (103)..(103): Selenocysteine
  MOD_RES (143)..(143): Selenocysteine
  MOD_RES (145)..(146): Selenocysteine
  MOD_RES (163)..(163): Selenocysteine
  MOD_RES (184)..(184): Selenocysteine
  MOD_RES (197)..(197): Selenocysteine
  MOD_RES (207)..(207): Selenocysteine
  MOD_RES (216)..(216): Selenocysteine
  MOD_RES (220)..(220): Selenocysteine
MMAAMAXARVRMGPRCAQALWRMPWLPVFLSLAAAAAAAAAEQQVPLVLWSSDRDLWAPAADXHEGHIXSDLQLSXYLDPALELGPRNVLLFLQDKLSIEDFXAYGGVFGNKQDSAFSNLENALDLAPSSLVLPAVDWYAVSXLXXYLQEKLGASPLHVDLAXLRELKLNASLPALLLIRLPYXASSGLMAPREVLXDEVIGQVLSXLKSEDVPYXAALXAVRPSRVARD

SEQ ID NO: 3572 - protein, 470 aa, Homo sapiens
  MOD_RES (7)..(7): Selenocysteine
  MOD_RES (63)..(63): Selenocysteine
  MOD_RES (69)..(69): Selenocysteine
  MOD_RES (76)..(76): Selenocysteine
  MOD_RES (103)..(103): Selenocysteine
  MOD_RES (143)..(143): Selenocysteine
  MOD_RES (145)..(146): Selenocysteine
  MOD_RES (163)..(163): Selenocysteine
  MOD_RES (184)..(184): Selenocysteine
  MOD_RES (197)..(197): Selenocysteine
  MOD_RES (209)..(209): Selenocysteine
  MOD_RES (218)..(218): Selenocysteine
  MOD_RES (222)..(222): Selenocysteine
  MOD_RES (263)..(263): Selenocysteine
  MOD_RES (286)..(286): Selenocysteine
  MOD_RES (289)..(289): Selenocysteine
  MOD_RES (298)..(298): Selenocysteine
  MOD_RES (312)..(312): Selenocysteine
  MOD_RES (319)..(320): Selenocysteine
  MOD_RES (322)..(322): Selenocysteine
  MOD_RES (341)..(341): Selenocysteine
  MOD_RES (362)..(362): Selenocysteine
  MOD_RES (388)..(388): Selenocysteine
  MOD_RES (432)..(432): Selenocysteine
  MOD_RES (441)..(441): Selenocysteine
  MOD_RES (452)..(452): Selenocysteine
  MOD_RES (463)..(463): Selenocysteine
  MOD_RES (467)..(467): Selenocysteine
MMAAMAXARVRMGPRCAQALWRMPWLPVFLSLAAAAAAAAAEQQVPLVLWSSDRDLWAPAADXHEGHIXSDLQLSXYLDPALELGPRNVLLFLQDKLSIEDFXAYGGVFGNKQDSAFSNLENALDLAPSSLVLPAVDWYAVSXLXXYLQEKLGASPLHVDLAXLRELKLNASLPALLLIRLPYXASSGLMAPREVLXGNDEVIGQVLSXLKSEDVPYXAALXAVRPSRVARDVAVVAGGLGRQLLQKQPVSPVIHPPVSYNDXAPRILFWAQNFSVAYKDQWEDLXPLXFGVQELNLXGSFWNDSFARLSLXYERLFGXXVXFKFILANRLYPVSARHWFXMERLEVHSNGSVAYFNASQVXGPSIYSFHCEYVSSLSKKGSLLVARXQPSPWQMMLQDFQIQAFNVMGEQFSYASDCASFFSPGIWMGLLXSLFMLFIFXYGLHMILSLKXMDRFDDHKGPXISLXQIV

SEQ ID NO: 3573 - protein, 134 aa, Homo sapiens
  MOD_RES (7)..(7): Selenocysteine
  MOD_RES (63)..(63): Selenocysteine
  MOD_RES (69)..(69): Selenocysteine
  MOD_RES (76)..(76): Selenocysteine
  MOD_RES (103)..(103): Selenocysteine
  MOD_RES (119)..(119): Selenocysteine
  MOD_RES (130)..(130): Selenocysteine
MMAAMAXARVRMGPRCAQALWRMPWLPVFLSLAAAAAAAAAEQQVPLVLWSSDRDLWAPAADXHEGHIXSDLQLSXYLDPALELGPRNVLLFLQDKVRPPQPXLPRSSGGSQAPSPHDXDAHSPREASVXLSQL

SEQ ID NO: 3574 - protein, 133 aa, Homo sapiens
  MOD_RES (1)..(1): Any amino acid
  MOD_RES (6)..(6): Selenocysteine
  MOD_RES (62)..(62): Selenocysteine
  MOD_RES (68)..(68): Selenocysteine
  MOD_RES (75)..(75): Selenocysteine
  MOD_RES (102)..(102): Selenocysteine
  MOD_RES (118)..(118): Selenocysteine
  MOD_RES (129)..(129): Selenocysteine
XAAMAXARVRMGPRCAQALWRMPWLPVFLSLAAAAAAAAAEQQVPLVLWSSDRDLWAPAADXHEGHIXSDLQLSXYLDPALELGPRNVLLFLQDKVRPPQPXLPRSSGGSQAPSPHDXDAHSPREASVXLSQL

SEQ ID NO: 3575 - protein, 186 aa, Homo sapiens
  MOD_RES (7)..(7): Selenocysteine
  MOD_RES (101)..(101): Selenocysteine
  MOD_RES (107)..(107): Selenocysteine
  MOD_RES (113)..(113): Selenocysteine
  MOD_RES (115)..(115): Selenocysteine
  MOD_RES (160)..(160): Selenocysteine
  MOD_RES (179)..(179): Selenocysteine
FHRPRAXVMVMVKGVNKLALPPGSVISYPLENLSRHKHLAKDHSPDLYSLELAGLDEIGKRYGEDSEQFRDASKILVDALQKFADDMYSLYGGNAVVELVXVKSFDXSLIRKXRXILEAKQAKNPASPYNLAYKYNFEYSVVFNMVLWIMIALALAVIIXSYNIWNMDPGYDSIIYRMXNQKIRMD

SEQ ID NO: 3576 - protein, 186 aa, Homo sapiens
  MOD_RES (75)..(75): Selenocysteine
  MOD_RES (121)..(121): Selenocysteine
  MOD_RES (150)..(150): Selenocysteine
MAVFVVLLALVAGVLGNEFSILKSPGSVVFRNGNWPIPGERIPDVAALSMGFSVKEDLSWPGLAVGNLFHRPRAXVMVMVKGVNKLALPPGSVISYPLENAVPFSLDSVANSIHSLFSEEXPVVLQLAPSEERVYMVGKANSVFEDLSVXLRQLRNRLFQENSVLSSLPLNSLSRNNENALFFWAL

SEQ ID NO: 3577 - protein, 209 aa, Homo sapiens
  MOD_RES (75)..(75): Selenocysteine
  MOD_RES (121)..(121): Selenocysteine
  MOD_RES (150)..(150): Selenocysteine
  MOD_RES (199)..(200): Selenocysteine
  MOD_RES (205)..(205): Selenocysteine
MAVFVVLLALVAGVLGNEFSILKSPGSVVFRNGNWPIPGERIPDVAALSMGFSVKEDLSWPGLAVGNLFHRPRAXVMVMVKGVNKLALPPGSVISYPLENAVPFSLDSVANSIHSLFSEEXPVVLQLAPSEERVYMVGKANSVFEDLSVXLRQLRNRLFQENSVLSSLPLNSLSRNNEVDLLFLSELQVLHDISSLGEXXYLPRXQAWA

SEQ ID NO: 3578 - protein, 345 aa, Homo sapiens
  MOD_RES (75)..(75): Selenocysteine
  MOD_RES (121)..(121): Selenocysteine
  MOD_RES (150)..(150): Selenocysteine
  MOD_RES (260)..(260): Selenocysteine
  MOD_RES (266)..(266): Selenocysteine
  MOD_RES (272)..(272): Selenocysteine
  MOD_RES (274)..(274): Selenocysteine
  MOD_RES (319)..(319): Selenocysteine
  MOD_RES (338)..(338): Selenocysteine
MAVFVVLLALVAGVLGNEFSILKSPGSVVFRNGNWPIPGERIPDVAALSMGFSVKEDLSWPGLAVGNLFHRPRAXVMVMVKGVNKLALPPGSVISYPLENAVPFSLDSVANSIHSLFSEEXPVVLQLAPSEERVYMVGKANSVFEDLSVXLRQLRNRLFQENSVLSSLPLNSLSRNNEVDLLFLSELQVLHDISSLHLAKDHSPDLYSLELAGLDEIGKRYGEDSEQFRDASKILVDALQKFADDMYSLYGGNAVVELVXVKSFDXSLIRKXRXILEAKQAKNPASPYNLAYKYNFEYSVVFNMVLWIMIALALAVIIXSYNIWNMDPGYDSIIYRMXNQKIRMD

SEQ ID NO: 3579 - protein, 331 aa, Homo sapiens
  MOD_RES (75)..(75): Selenocysteine
  MOD_RES (121)..(121): Selenocysteine
  MOD_RES (150)..(150): Selenocysteine
  MOD_RES (246)..(246): Selenocysteine
  MOD_RES (252)..(252): Selenocysteine
  MOD_RES (258)..(258): Selenocysteine
  MOD_RES (260)..(260): Selenocysteine
  MOD_RES (305)..(305): Selenocysteine
  MOD_RES (324)..(324): Selenocysteine
MAVFVVLLALVAGVLGNEFSILKSPGSVVFRNGNWPIPGERIPDVAALSMGFSVKEDLSWPGLAVGNLFHRPRAXVMVMVKGVNKLALPPGSVISYPLENAVPFSLDSVANSIHSLFSEEXPVVLQLAPSEERVYMVGKANSVFEDLSVXLRQLRNRLFQENSVLSSLPLNSLSRNNEVDLLFLSELQVLHDISSLLAGLDEIGKRYGEDSEQFRDASKILVDALQKFADDMYSLYGGNAVVELVXVKSFDXSLIRKXRXILEAKQAKNPASPYNLAYKYNFEYSVVFNMVLWIMIALALAVIIXSYNIWNMDPGYDSIIYRMXNQKIRMD

SEQ ID NO: 3580 - protein, 349 aa, Homo sapiens
  MOD_RES (75)..(75): Selenocysteine
  MOD_RES (121)..(121): Selenocysteine
  MOD_RES (150)..(150): Selenocysteine
  MOD_RES (265)..(265): Selenocysteine
  MOD_RES (271)..(271): Selenocysteine
  MOD_RES (277)..(277): Selenocysteine
  MOD_RES (279)..(279): Selenocysteine
  MOD_RES (323)..(323): Selenocysteine
  MOD_RES (342)..(342): Selenocysteine
MAVFVVLLALVAGVLGNEFSILKSPGSVVFRNGNWPIPGERIPDVAALSMGFSVKEDLSWPGLAVGNLFHRPRAXVMVMVKGVNKLALPPGSVISYPLENAVPFSLDSVANSIHSLFSEEXPVVLQLAPSEERVYMVGKANSVFEDLSVXLRQLRNRLFQENSVLSSLPLNSLSRNNEVDLLFLSELQVLHDISSLLSRHKHLAKDHSPDLYSLELAGLDEIGKRYGEDSEQFRDASKILVDALQKFADDMYSLYGGNAVVELVXVKSFDXSLIRKXRXILEAKQANPASPYNLAYKYNFEYSVVFNMVLWIMIALALAVIIXSYNIWNMDPGYDSIIYRMXNQKIRMD

SEQ ID NO: 3581 - protein, 350 aa, Homo sapiens
  MOD_RES (75)..(75): Selenocysteine
  MOD_RES (121)..(121): Selenocysteine
  MOD_RES (150)..(150): Selenocysteine
  MOD_RES (265)..(265): Selenocysteine
  MOD_RES (271)..(271): Selenocysteine
  MOD_RES (277)..(277): Selenocysteine
  MOD_RES (279)..(279): Selenocysteine
  MOD_RES (324)..(324): Selenocysteine
  MOD_RES (343)..(343): Selenocysteine
MAVFVVLLALVAGVLGNEFSILKSPGSVVFRNGNWPIPGERIPDVAALSMGFSVKEDLSWPGLAVGNLFHRPRAXVMVMVKGVNKLALPPGSVISYPLENAVPFSLDSVANSIHSLFSEEXPVVLQLAPSEERVYMVGKANSVFEDLSVXLRQLRNRLFQENSVLSSLPLNSLSRNNEVDLLFLSELQVLHDISSLLSRHKHLAKDHSPDLYSLELAGLDEIGKRYGEDSEQFRDASKILVDALQKFADDMYSLYGGNAVVELVXVKSFDXSLIRKXRXILEAKQAKNPASPYNLAYKYNFEYSVVFNMVLWIMIALALAVIIXSYNIWNMDPGYDSIIYRMXNQKIRMD

SEQ ID NO: 3582 - protein, 258 aa, Homo sapiens
  MOD_RES (75)..(75): Selenocysteine
  MOD_RES (121)..(121): Selenocysteine
  MOD_RES (150)..(150): Selenocysteine
  MOD_RES (248)..(248): Selenocysteine
  MOD_RES (250)..(250): Selenocysteine
MAVFVVLLALVAGVLGNEFSILKSPGSVVFRNGNWPIPGERIPDVAALSMGFSVKEDLSWPGLAVGNLFHRPRAXVMVMVKGVNKLALPPGSVISYPLENAVPFSLDSVANSIHSLFSEEXPVVLQLAPSEERVYMVGKANSVFEDLSVXLRQLRNRLFQENSVLSSLPLNSLSRNNEVDLLFLSELQVLHDISSLLSRHKHLAKDHSPDLYSLELAGLDEIGKRYGEDSEQFRDASKILVDALQKMXCXVFMVGMQW

SEQ ID NO: 3583 - protein, 262 aa, Homo sapiens
  MOD_RES (75)..(75): Selenocysteine
  MOD_RES (121)..(121): Selenocysteine
  MOD_RES (150)..(150): Selenocysteine
MAVFVVLLALVAGVLGNEFSILKSPGSVVFRNGNWPIPGERIPDVAALSMGFSVKEDLSWPGLAVGNLFHRPRAXVMVMVKGVNKLALPPGSVISYPLENAVPFSLDSVANSIHSLFSEEXPVVLQLAPSEERVYMVGKANSVFEDLSVXLRQLRNRLFQENSVLSSLPLNSLSRNNEVDLLFLSELQVLHDISSLLSRHKHLAKDHSPDLYSLELAGLDEIGKRYGEDSEQFRDASKILVDALQKSLWWECSGRVSHCQVI

SEQ ID NO: 3584 - protein, 143 aa, Homo sapiens
  MOD_RES (75)..(75): Selenocysteine
  MOD_RES (121)..(121): Selenocysteine
MAVFVVLLALVAGVLGNEFSILKSPGSVVFRNGNWPIPGERIPDVAALSMGFSVKEDLSWPGLAVGNLFHRPRAXVMVMVKGVNKLALPPGSVISYPLENAVPFSLDSVANSIHSLFSEEXPVVLQLAPSEESVYGREGKLSV

SEQ ID NO: 3585 - protein, 318 aa, Homo sapiens
  MOD_RES (75)..(75): Selenocysteine
  MOD_RES (118)..(118): Selenocysteine
  MOD_RES (233)..(233): Selenocysteine
  MOD_RES (239)..(239): Selenocysteine
  MOD_RES (245)..(245): Selenocysteine
  MOD_RES (247)..(247): Selenocysteine
  MOD_RES (292)..(292): Selenocysteine
  MOD_RES (311)..(311): Selenocysteine
MAVFVVLLALVAGVLGNEFSILKSPGSVVFRNGNWPIPGERIPDVAALSMGFSVKEDLSWPGLAVGNLFHRPRAXVMVMVKGVNKLALPPGSVISYPLENRVYMVGKANSVFEDLSVXLRQLRNRLFQENSVLSSLPLNSLSRNNEVDLLFLSELQVLHDISSLLSRHKHLAKDHSPDLYSLELAGLDEIGKRYGEDSEQFRDASKILVDALQKFADDMYSLYGGNAVVELVXVKSFDXSLIRKXRXILEAKQAKNPASPYNLAYKYNFEYSVVFNMVLWIMIALALAVIIXSYNIWNMDPGYDSIIYRMXNQKIRMD

SEQ ID NO: 3586 - protein, 317 aa, Homo sapiens
  MOD_RES (75)..(75): Selenocysteine
  MOD_RES (118)..(118): Selenocysteine
  MOD_RES (233)..(233): Selenocysteine
  MOD_RES (239)..(239): Selenocysteine
  MOD_RES (245)..(245): Selenocysteine
  MOD_RES (247)..(247): Selenocysteine
  MOD_RES (291)..(291): Selenocysteine
  MOD_RES (310)..(310): Selenocysteine
MAVFVVLLALVAGVLGNEFSILKSPGSVVFRNGNWPIPGERIPDVAALSMGFSVKEDLSWPGLAVGNLFHRPRAXVMVMVKGVNKLALPPGSVISYPLENRVYMVGKANSVFEDLSVXLRQLRNRLFQENSVLSSLPLNSLSRNNEVDLLFLSELQVLHDISSLLSRHKHLAKDHSPDLYSLELAGLDEIGKRYGEDSEQFRDASKILVDALQKFADDMYSLYGGNAVVELVXVKSFDXSLIRKXRXILEAKQANPASPYNLAYKYNFEYSVVFNMVLWIMIALALAVIIXSYNIWNMDPGYDSIIYRMXNQKIRMD

SEQ ID NO: 3587 - protein, 272 aa, Homo sapiens
  MOD_RES (75)..(75): Selenocysteine
  MOD_RES (187)..(187): Selenocysteine
  MOD_RES (193)..(193): Selenocysteine
  MOD_RES (199)..(199): Selenocysteine
  MOD_RES (201)..(201): Selenocysteine
  MOD_RES (246)..(246): Selenocysteine
  MOD_RES (265)..(265): Selenocysteine
MAVFVVLLALVAGVLGNEFSILKSPGSVVFRNGNWPIPGERIPDVAALSMGFSVKEDLSWPGLAVGNLFHRPRAXVMVMVKGVNKLALPPGSVISYPLENVDLLFLSELQVLHDISSLLSRHKHLAKDHSPDLYSLELAGLDEIGKRYGEDSEQFRDASKILVDALQKFADDMYSLYGGNAVVELVXVKSFDXSLIRKXRXILEAKQAKNPASPYNLAYKYNFEYSVVFNMVLWIMIALALAVIIXSYNIWNMDPGYDSIIYRMXNQKIRMD

SEQ ID NO: 3588 - protein, 128 aa, Homo sapiens
  MOD_RES (26)..(26): Selenocysteine
  MOD_RES (72)..(72): Selenocysteine
  MOD_RES (101)..(101): Selenocysteine
MGFSVKEDLSWPGLAVGNLFHRPRAXVMVMVKGVNKLALPPGSVISYPLENAVPFSLDSVANSIHSLFSEEXPVVLQLAPSEERVYMVGKANSVFEDLSVXLRQLRNRLFQENSVLSSLPLNSLSRNN

SEQ ID NO: 3589 - protein, 301 aa, Homo sapiens
  MOD_RES (26)..(26): Selenocysteine
  MOD_RES (72)..(72): Selenocysteine
  MOD_RES (101)..(101): Selenocysteine
  MOD_RES (216)..(216): Selenocysteine
  MOD_RES (222)..(222): Selenocysteine
  MOD_RES (228)..(228): Selenocysteine
  MOD_RES (230)..(230): Selenocysteine
  MOD_RES (275)..(275): Selenocysteine
  MOD_RES (294)..(294): Selenocysteine
MGFSVKEDLSWPGLAVGNLFHRPRAXVMVMVKGVNKLALPPGSVISYPLENAVPFSLDSVANSIHSLFSEEXPVVLQLAPSEERVYMVGKANSVFEDLSVXLRQLRNRLFQENSVLSSLPLNSLSRNNEVDLLFLSELQVLHDISSLLSRHKHLAKDHSPDLYSLELAGLDEIGKRYGEDSEQFRDASKILVDALQKFADDMYSLYGGNAVVELVXVKSFDXSLIRKXRXILEAKQAKNPASPYNLAYKYNFEYSVVFNMVLWIMIALALAVIIXSYNIWNMDPGYDSIIYRMXNQKIRMD

SEQ ID NO: 3590 - protein, 274 aa, Homo sapiens
  MOD_RES (45)..(45): Selenocysteine
  MOD_RES (74)..(74): Selenocysteine
  MOD_RES (189)..(189): Selenocysteine
  MOD_RES (195)..(195): Selenocysteine
  MOD_RES (201)..(201): Selenocysteine
  MOD_RES (203)..(203): Selenocysteine
  MOD_RES (248)..(248): Selenocysteine
  MOD_RES (267)..(267): Selenocysteine
MVMVKGVNKLALPPGSVISYPLENAVPFSLDSVANSIHSLFSEEXPVVLQLAPSEERVYMVGKANSVFEDLSVXLRQLRNRLFQENSVLSSLPLNSLSRNNEVDLLFLSELQVLHDISSLLSRHKHLAKDHSPDLYSLELAGLDEIGKRYGEDSEQFRDASKILVDALQKFADDMYSLYGGNAVVELVXVKSFDXSLIRKXRXILEAKQAKNPASPYNLAYKYNFEYSVVFNMVLWIMIALALAVIIXSYNIWNMDPGYDSIIYRMXNQKIRMD

SEQ ID NO: 3591 - protein, 273 aa, Homo sapiens
  MOD_RES (45)..(45): Selenocysteine
  MOD_RES (74)..(74): Selenocysteine
  MOD_RES (189)..(189): Selenocysteine
  MOD_RES (195)..(195): Selenocysteine
  MOD_RES (201)..(201): Selenocysteine
  MOD_RES (203)..(203): Selenocysteine
  MOD_RES (247)..(247): Selenocysteine
  MOD_RES (266)..(266): Selenocysteine
MVMVKGVNKLALPPGSVISYPLENAVPFSLDSVANSIHSLFSEEXPVVLQLAPSEERVYMVGKANSVFEDLSVXLRQLRNRLFQENSVLSSLPLNSLSRNNEVDLLFLSELQVLHDISSLLSRHKHLAKDHSPDLYSLELAGLDEIGKRYGEDSEQFRDASKILVDALQKFADDMYSLYGGNAVVELVXVKSFDXSLIRKXRXILEAKQANPASPYNLAYKYNFEYSVVFNMVLWIMIALALAVIIXSYNIWNMDPGYDSIIYRMXNQKIRMD

SEQ ID NO: 3592 - protein, 59 aa, Homo sapiens
  MOD_RES (30)..(30): Selenocysteine
  MOD_RES (37)..(37): Selenocysteine
MVMVKGVNKLALPPGSVISYPLENFLLVLXVLQIPFXPYFLRKLLLFCSWLPVRKECIW

SEQ ID NO: 3593 - protein, 101 aa, Homo sapiens
  MOD_RES (42)..(42): Selenocysteine
  MOD_RES (91)..(92): Selenocysteine
  MOD_RES (97)..(97): Selenocysteine
MVMVKGVNKLALPPGSVISYPLENRVYMVGKANSVFEDLSVXLRQLRNRLFQENSVLSSLPLNSLSRNNEVDLLFLSELQVLHDISSLGEXXYLPRXQAWA

SEQ ID NO: 3594 - protein, 242 aa, Homo sapiens
  MOD_RES (42)..(42): Selenocysteine
  MOD_RES (157)..(157): Selenocysteine
  MOD_RES (163)..(163): Selenocysteine
  MOD_RES (169)..(169): Selenocysteine
  MOD_RES (171)..(171): Selenocysteine
  MOD_RES (216)..(216): Selenocysteine
  MOD_RES (235)..(235): Selenocysteine
MVMVKGVNKLALPPGSVISYPLENRVYMVGKANSVFEDLSVXLRQLRNRLFQENSVLSSLPLNSLSRNNEVDLLFLSELQVLHDISSLLSRHKHLAKDHSPDLYSLELAGLDEIGKRYGEDSEQFRDASKILVDALQKFADDMYSLYGGNAVVELVXVKSFDXSLIRKXRXILEAKQAKNPASPYNLAYKYNFEYSVVFNMVLWIMIALALAVIIXSYNIWNMDPGYDSIIYRMXNQKIRMD

SEQ ID NO: 3595 - protein, 196 aa, Homo sapiens
  MOD_RES (111)..(111): Selenocysteine
  MOD_RES (117)..(117): Selenocysteine
  MOD_RES (123)..(123): Selenocysteine
  MOD_RES (125)..(125): Selenocysteine
  MOD_RES (170)..(170): Selenocysteine
  MOD_RES (189)..(189): Selenocysteine
MVMVKGVNKLALPPGSVISYPLENVDLLFLSELQVLHDISSLLSRHKHLAKDHSPDLYSLELAGLDEIGKRYGEDSEQFRDASKILVDALQKFADDMYSLYGGNAVVELVXVKSFDXSLIRKXRXILEAKQAKNPASPYNLAYKYNFEYSVVFNMVLWIMIALALAVIIXSYNIWNMDPGYDSIIYRMXNQKIRMD

SEQ ID NO: 3596 - protein, 294 aa, Homo sapiens
  MOD_RES (1)..(1): Any amino acid
  MOD_RES (59)..(59): Selenocysteine
  MOD_RES (105)..(105): Selenocysteine
  MOD_RES (134)..(134): Selenocysteine
  MOD_RES (268)..(268): Selenocysteine
  MOD_RES (287)..(287): Selenocysteine
XEFSILKSPGSVVFRNGNWPIPGERIPDVAALSMGFSVKEDLSWPGLAVGNLFHRPRAXVMVMVKGVNKLALPPGSVISYPLENAVPFSLDSVANSIHSLFSEEXPVVLQLAPSEERVYMVGKANSVFEDLSVXLRQLRNRLFQENSVLSSLPLNSLSRNNEVDLLFLSELQVLHDISSLLSRHKHLAKDHSPDLYSLELAGLDEIGKRYGEDSEQFRDASKILVDALQKKNPASPYNLAYKYNFEYSVVFNMVLWIMIALALAVIIXSYNIWNMDPGYDSIIYRMXNQKIRMD

SEQ ID NO: 3597 - protein, 76 aa, Homo sapiens
  MOD_RES (1)..(1): Any amino acid
  MOD_RES (14)..(14): Selenocysteine
  MOD_RES (20)..(20): Selenocysteine
  MOD_RES (26)..(26): Selenocysteine
  MOD_RES (28)..(28): Selenocysteine
XSLYGGNAVVELVXVKSFDXSLIRKXRXILEAKQAEKEHVYQKKKKERNKEVFMGVKSFNVCLSSELPAEEPSKSL

SEQ ID NO: 3598 - protein, 195 aa, Homo sapiens
  MOD_RES (8)..(8): Selenocysteine
  MOD_RES (39)..(39): Selenocysteine
  MOD_RES (52)..(52): Selenocysteine
  MOD_RES (61)..(61): Selenocysteine
  MOD_RES (90)..(90): Selenocysteine
  MOD_RES (108)..(108): Selenocysteine
  MOD_RES (137)..(137): Selenocysteine
ANIPIMDXGENPEVPFPRDMIDLEANFEKIENELKEINXNQEALKRNFLELXELKFILRKXQQFFDEMADPDLLEESSSLLEPSEMGRGXPLRLGFVAGVINRERIPXFERMLWRVCRGNVFLRQAEIENPLEDPVXVESHSVVQARVQWRDLGSPQPPLPGFKRFSCLSLPSSWGLQGDYVHKSVFIIFFQGDQ

SEQ ID NO: 3599 - protein, 188 aa, Homo sapiens
  MOD_RES (6)..(6): Selenocysteine
  MOD_RES (75)..(75): Selenocysteine
  MOD_RES (88)..(88): Selenocysteine
  MOD_RES (102)..(102): Selenocysteine
  MOD_RES (121)..(121): Selenocysteine
  MOD_RES (129)..(129): Selenocysteine
  MOD_RES (140)..(140): Selenocysteine
  MOD_RES (163)..(163): Selenocysteine
AYDAHXSENAPSLLIHFINMFLFSYPESGYSMLYSGQKGIQCFLVVVALLCVPWMLLFKPLVLRRQYLRRKHLGXLNFGGIRVGNGPXEEDAEIIQHDQLSXHSEDADEPSEDEVFDFGDXMVHQAIHXIEYCLGCISNXASYLRLWALSLAHARLSSRINSXAGPVSSSYPSPSSIFGKGSLKSESL

SEQ ID NO: 3600 - protein, 198 aa, Homo sapiens
  MOD_RES (11)..(11): Selenocysteine
  MOD_RES (54)..(54): Selenocysteine
  MOD_RES (67)..(67): Selenocysteine
  MOD_RES (76)..(76): Selenocysteine
  MOD_RES (105)..(105): Selenocysteine
  MOD_RES (123)..(123): Selenocysteine
  MOD_RES (152)..(152): Selenocysteine
  MOD_RES (191)..(191): Selenocysteine
MGELFRSEEMXLAQLFLQSEAAYCCVSELGELGKVQFRDANFEKIENELKEINXNQEALKRNFLELXELKFILRKXQQFFDEMADPDLLEESSSLLEPSEMGRGXPLRLGFVAGVINRERIPXFERMLWRVCRGNVFLRQAEIENPLEDPVXGDYVHKSVFIIFFQGDQLKNRVKKICEGFRASLYPCPEXPQERKEM

SEQ ID NO: 3601 - protein, 93 aa, Homo sapiens
  MOD_RES (11)..(11): Selenocysteine
  MOD_RES (82)..(82): Selenocysteine
MGELFRSEEMXLAQLFLQSEAAYCCVSELGELGKVQFRDLNPDVNVFQRKFVNEVRRCEEMDRKLRFVEKEIRKANIPIMDXGENPEVPFPRD

SEQ ID NO: 3602 - protein, 130 aa, Homo sapiens
  MOD_RES (11)..(11): Selenocysteine
  MOD_RES (82)..(82): Selenocysteine
  MOD_RES (113)..(113): Selenocysteine
  MOD_RES (126)..(126): Selenocysteine
MGELFRSEEMXLAQLFLQSEAAYCCVSELGELGKVQFRDLNPDVNVFQRKFVNEVRRCEEMDRKLRFVEKEIRKANIPIMDXGENPEVPFPRDMIDLEANFEKIENELKEINXNQEALKRNFLELXELKF

SEQ ID NO: 3603 - protein, 838 aa, Homo sapiens
  MOD_RES (11)..(11): Selenocysteine
  MOD_RES (82)..(82): Selenocysteine
  MOD_RES (113)..(113): Selenocysteine
  MOD_RES (126)..(126): Selenocysteine
  MOD_RES (135)..(135): Selenocysteine
  MOD_RES (171)..(171): Selenocysteine
  MOD_RES (189)..(189): Selenocysteine
  MOD_RES (218)..(218): Selenocysteine
  MOD_RES (257)..(257): Selenocysteine
  MOD_RES (270)..(270): Selenocysteine
  MOD_RES (282)..(282): Selenocysteine
  MOD_RES (313)..(313): Selenocysteine
  MOD_RES (322)..(322): Selenocysteine
  MOD_RES (335)..(335): Selenocysteine
  MOD_RES (348)..(348): Selenocysteine
  MOD_RES (354)..(354): Selenocysteine
  MOD_RES (364)..(364): Selenocysteine
  MOD_RES (367)..(367): Selenocysteine
  MOD_RES (370)..(370): Selenocysteine
  MOD_RES (374)..(374): Selenocysteine
  MOD_RES (378)..(378): Selenocysteine
  MOD_RES (392)..(392): Selenocysteine
  MOD_RES (402)..(402): Selenocysteine
  MOD_RES (405)..(405): Selenocysteine
  MOD_RES (424)..(424): Selenocysteine
  MOD_RES (449)..(449): Selenocysteine
  MOD_RES (467)..(467): Selenocysteine
  MOD_RES (493)..(493): Selenocysteine
  MOD_RES (497)..(497): Selenocysteine
  MOD_RES (500)..(500): Selenocysteine
  MOD_RES (533)..(533): Selenocysteine
  MOD_RES (537)..(537): Selenocysteine
  MOD_RES (587)..(587): Selenocysteine
  MOD_RES (602)..(602): Selenocysteine
  MOD_RES (608)..(608): Selenocysteine
  MOD_RES (677)..(677): Selenocysteine
  MOD_RES (690)..(690): Selenocysteine
  MOD_RES (704)..(704): Selenocysteine
  MOD_RES (717)..(717): Selenocysteine
  MOD_RES (725)..(725): Selenocysteine
  MOD_RES (736)..(736): Selenocysteine
  MOD_RES (758)..(758): Selenocysteine
  MOD_RES (781)..(781): Selenocysteine
  MOD_RES (785)..(785): Selenocysteine
  MOD_RES (787)..(787): Selenocysteine
  MOD_RES (819)..(819): Selenocysteine
MGELFRSEEMXLAQLFLQSEAAYCCVSELGELGKVQFRDLNPDVNVFQRKFVNEVRRCEEMDRKLRFVEKEIRKANIPIMDXGENPEVPFPRDMIDLEANFEKIENELKEINXNQEALKRNFLELXELKFILRKXQQFFDEAELHHQQMADPDLLEESSSLLEPSEMGRGXPLRLGFVAGVINRERIPXFERMLWRVCRGNVFLRQAEIENPLEDPVXGDYVHKSVFIIFFQGDQLKNRVKKICEGFRASLYPCPEXPQERKEMASGVNXRIDDLQMVLNQXEDHRQRVLQAAAKNIRVWFIKVRKMKAIYHXLNLCNIDVXQKCLIAEVWCPVXDLDSIQFALRRGXEHSGSXVPSILNRMQXNQXPPXYNKXNKFXYGFQNIVDAYGIGXYREINPAPYXIIXFPFLFAVMFGDFGHGILMXLFAVWMVLRESRILSQKNENEMFSXVFSGRYIILLMGVFSMYXGLIYNDCFSKSLNIFGSSWSVRPMFXYNWXEEXLRGNPVLQLNPALPGVFGGPYPFGIDPIWNIAXNKLXFLNSFKMKMSVILGIIHMLFGVSLSLFNHIYFKKPLNIYFGFIPEIIFMXSLFGYLVILIFYKWXAYDAHXSENAPSLLIHFINMFLFSYPESGYSMLYSGQKGIQCFLVVVALLCVPWMLLFKPLVLRRQYLRRKHLGXLNFGGIRVGNGPXEEDAEIIQHDQLSXHSEDADEFDFGDXMVHQAIHXIEYCLGCISNXASYLRLWALSLAHAQLSEVLWXMVIHIGLSVKSLAGGLVLFFFFXAFAXLXVAILLIMEGLSAFLHALRLHWVEFQNKFYSGXGFKFLPFSFEHIREGKFEE

SEQ ID NO: 3604 - protein, 831 aa, Homo sapiens
  MOD_RES (11)..(11): Selenocysteine
  MOD_RES (82)..(82): Selenocysteine
  MOD_RES (113)..(113): Selenocysteine
  MOD_RES (126)..(126): Selenocysteine
  MOD_RES (135)..(135): Selenocysteine
  MOD_RES (164)..(164): Selenocysteine
  MOD_RES (182)..(182): Selenocysteine
  MOD_RES (211)..(211): Selenocysteine
  MOD_RES (250)..(250): Selenocysteine
  MOD_RES (263)..(263): Selenocysteine
  MOD_RES (275)..(275): Selenocysteine
  MOD_RES (306)..(306): Selenocysteine
  MOD_RES (315)..(315): Selenocysteine
  MOD_RES (328)..(328): Selenocysteine
  MOD_RES (341)..(341): Selenocysteine
  MOD_RES (347)..(347): Selenocysteine
  MOD_RES (357)..(357): Selenocysteine
  MOD_RES (360)..(360): Selenocysteine
  MOD_RES (363)..(363): Selenocysteine
  MOD_RES (367)..(367): Selenocysteine
  MOD_RES (371)..(371): Selenocysteine
  MOD_RES (385)..(385): Selenocysteine
  MOD_RES (395)..(395): Selenocysteine
  MOD_RES (398)..(398): Selenocysteine
  MOD_RES (417)..(417): Selenocysteine
  MOD_RES (442)..(442): Selenocysteine
  MOD_RES (460)..(460): Selenocysteine
  MOD_RES (486)..(486): Selenocysteine
  MOD_RES (490)..(490): Selenocysteine
  MOD_RES (493)..(493): Selenocysteine
  MOD_RES (526)..(526): Selenocysteine
  MOD_RES (530)..(530): Selenocysteine
  MOD_RES (580)..(580): Selenocysteine
  MOD_RES (595)..(595): Selenocysteine
  MOD_RES (601)..(601): Selenocysteine
  MOD_RES (670)..(670): Selenocysteine
  MOD_RES (683)..(683): Selenocysteine
  MOD_RES (697)..(697): Selenocysteine
  MOD_RES (710)..(710): Selenocysteine
  MOD_RES (718)..(718): Selenocysteine
  MOD_RES (729)..(729): Selenocysteine
  MOD_RES (751)..(751): Selenocysteine
  MOD_RES (774)..(774): Selenocysteine
  MOD_RES (778)..(778): Selenocysteine
  MOD_RES (780)..(780): Selenocysteine
  MOD_RES (812)..(812): Selenocysteine
MGELFRSEEMXLAQLFLQSEAAYCCVSELGELGKVQFRDLNPDVNVFQRKFVNEVRRCEEMDRKLRFVEKEIRKANIPIMDXGENPEVPFPRDMIDLEANFEKIENELKEINXNQEALKRNFLELXELKFILRKXQQFFDEMADPDLLEESSSLLEPSEMGRGXPLRLGFVAGVINRERIPXFERMLWRVCRGNVFLRQAEIENPLEDPVXGDYVHKSVFIIFFQGDQLKNRVKKICEGFRASLYPCPEXPQERKEMASGVNXRIDDLQMVLNQXEDHRQRVLQAAAKNIRVWFIKVRKMKAIYHXLNLCNIDVXQKCLIAEVWCPVXDLDSIQFALRRGXEHSGSXVPSILNRMQXNQXPPXYNKXNKFXYGFQNIVDAYGIGXYREINPAPYXIIXFPFLFAVMFGDFGHGILMXLFAVWMVLRESRILSQKNENEMFSXVFSGRYIILLMGVFSMYXGLIYNDCFSKSLNIFGSSWSVRPMFXYNWXEEXLRGNPVLQLNPALPGVFGGPYPFGIDPIWNIAXNKLXFLNSFKMKMSVILGIIHMLFGVSLSLFNHIYFKKPLNIYFGFIPEIIFMXSLFGYLVILIFYKWXAYDAHXSENAPSLLIHFINMFLFSYPESGYSMLYSGQKGIQCFLVVVALLCVPWMLLFKPLVLRRQYLRRKHLGXLNFGGIRVGNGPXEEDAEIIQHDQLSXHSEDADEFDFGDXMVHQAIHXIEYCLGCISNXASYLRLWALSLAHAQLSEVLWXMVIHIGLSVKSLAGGLVLFFFFXAFAXLXVAILLIMEGLSAFLHALRLHWVEFQNKFYSGXGFKFLPFSFEHIREGKFEE

SEQ ID NO: 3605 - protein, 837 aa, Homo sapiens
  MOD_RES (11)..(11): Selenocysteine
  MOD_RES (82)..(82): Selenocysteine
  MOD_RES (113)..(113): Selenocysteine
  MOD_RES (126)..(126): Selenocysteine
  MOD_RES (135)..(135): Selenocysteine
  MOD_RES (164)..(164): Selenocysteine
  MOD_RES (182)..(182): Selenocysteine
  MOD_RES (211)..(211): Selenocysteine
  MOD_RES (250)..(250): Selenocysteine
  MOD_RES (263)..(263): Selenocysteine
  MOD_RES (275)..(275): Selenocysteine
  MOD_RES (306)..(306): Selenocysteine
  MOD_RES (315)..(315): Selenocysteine
  MOD_RES (328)..(328): Selenocysteine
  MOD_RES (341)..(341): Selenocysteine
  MOD_RES (347)..(347): Selenocysteine
  MOD_RES (357)..(357): Selenocysteine
  MOD_RES (360)..(360): Selenocysteine
  MOD_RES (363)..(363): Selenocysteine
  MOD_RES (367)..(367): Selenocysteine
  MOD_RES (371)..(371): Selenocysteine
  MOD_RES (385)..(385): Selenocysteine
  MOD_RES (395)..(395): Selenocysteine
  MOD_RES (398)..(398): Selenocysteine
  MOD_RES (417)..(417): Selenocysteine
  MOD_RES (442)..(442): Selenocysteine
  MOD_RES (460)..(460): Selenocysteine
  MOD_RES (486)..(486): Selenocysteine
  MOD_RES (490)..(490): Selenocysteine
  MOD_RES (493)..(493): Selenocysteine
  MOD_RES (526)..(526): Selenocysteine
  MOD_RES (530)..(530): Selenocysteine
  MOD_RES (580)..(580): Selenocysteine
  MOD_RES (595)..(595): Selenocysteine
  MOD_RES (601)..(601): Selenocysteine
  MOD_RES (670)..(670): Selenocysteine
  MOD_RES (683)..(683): Selenocysteine
  MOD_RES (697)..(697): Selenocysteine
  MOD_RES (716)..(716): Selenocysteine
  MOD_RES (724)..(724): Selenocysteine
  MOD_RES (735)..(735): Selenocysteine
  MOD_RES (757)..(757): Selenocysteine
  MOD_RES (780)..(780): Selenocysteine
  MOD_RES (784)..(784): Selenocysteine
  MOD_RES (786)..(786): Selenocysteine
  MOD_RES (818)..(818): Selenocysteine
MGELFRSEEMXLAQLFLQSEAAYCCVSELGELGKVQFRDLNPDVNVFQRKFVNEVRRCEEMDRKLRFVEKEIRKANIPIMDXGENPEVPFPRDMIDLEANFEKIENELKEINXNQEALKRNFLELXELKFILRKXQQFFDEMADPDLLEESSSLLEPSEMGRGXPLRLGFVAGVINRERIPXFERMLWRVCRGNVFLRQAEIENPLEDPVXGDYVHKSVFIIFFQGDQLKNRVKKICEGFRASLYPCPEXPQERKEMASGVNXRIDDLQMVLNQXEDHRQRVLQAAAKNIRVWFIKVRKMKAIYHXLNLCNIDVXQKCLIAEVWCPVXDLDSIQFALRRGXEHSGSXVPSILNRMQXNQXPPXYNKXNKFXYGFQNIVDAYGIGXYREINPAPYXIIXFPFLFAVMFGDFGHGILMXLFAVWMVLRESRILSQKNENEMFSXVFSGRYIILLMGVFSMYXGLIYNDCFSKSLNIFGSSWSVRPMFXYNWXEEXLRGNPVLQLNPALPGVFGGPYPFGIDPIWNIAXNKLXFLNSFKMKMSVILGIIHMLFGVSLSLFNHIYFKKPLNIYFGFIPEIIFMXSLFGYLVILIFYKWXAYDAHXSENAPSLLIHFINMFLFSYPESGYSMLYSGQKGIQCFLVVVALLCVPWMLLFKPLVLRRQYLRRKHLGXLNFGGIRVGNGPXEEDAEIIQHDQLSXHSEDADEPSEDEVFDFGDXMVHQAIHXIEYCLGCISNXASYLRLWALSLAHAQLSEVLWXMVIHIGLSVKSLAGGLVLFFFFXAFAXLXVAILLIMEGLSAFLHALRLHWVEFQNKFYSGXGFKFLPFSFEHIREGKFEE

SEQ ID NO: 3606 - protein, 788 aa, Homo sapiens
  MOD_RES (11)..(11): Selenocysteine
  MOD_RES (82)..(82): Selenocysteine
  MOD_RES (121)..(121): Selenocysteine
  MOD_RES (139)..(139): Selenocysteine
  MOD_RES (168)..(168): Selenocysteine
  MOD_RES (207)..(207): Selenocysteine
  MOD_RES (220)..(220): Selenocysteine
  MOD_RES (232)..(232): Selenocysteine
  MOD_RES (263)..(263): Selenocysteine
  MOD_RES (272)..(272): Selenocysteine
  MOD_RES (285)..(285): Selenocysteine
  MOD_RES (298)..(298): Selenocysteine
  MOD_RES (304)..(304): Selenocysteine
  MOD_RES (314)..(314): Selenocysteine
  MOD_RES (317)..(317): Selenocysteine
  MOD_RES (320)..(320): Selenocysteine
  MOD_RES (324)..(324): Selenocysteine
  MOD_RES (328)..(328): Selenocysteine
  MOD_RES (342)..(342): Selenocysteine
  MOD_RES (352)..(352): Selenocysteine
  MOD_RES (355)..(355): Selenocysteine
  MOD_RES (374)..(374): Selenocysteine
  MOD_RES (399)..(399): Selenocysteine
  MOD_RES (417)..(417): Selenocysteine
  MOD_RES (443)..(443): Selenocysteine
  MOD_RES (447)..(447): Selenocysteine
  MOD_RES (450)..(450): Selenocysteine
  MOD_RES (483)..(483): Selenocysteine
  MOD_RES (487)..(487): Selenocysteine
  MOD_RES (537)..(537): Selenocysteine
  MOD_RES (552)..(552): Selenocysteine
  MOD_RES (558)..(558): Selenocysteine
  MOD_RES (627)..(627): Selenocysteine
  MOD_RES (640)..(640): Selenocysteine
  MOD_RES (654)..(654): Selenocysteine
  MOD_RES (667)..(667): Selenocysteine
  MOD_RES (675)..(675): Selenocysteine
  MOD_RES (686)..(686): Selenocysteine
  MOD_RES (708)..(708): Selenocysteine
  MOD_RES (731)..(731): Selenocysteine
  MOD_RES (735)..(735): Selenocysteine
  MOD_RES (737)..(737): Selenocysteine
  MOD_RES (769)..(769): Selenocysteine
MGELFRSEEMXLAQLFLQSEAAYCCVSELGELGKVQFRDLNPDVNVFQRKFVNEVRRCEEMDRKLRFVEKEIRKANIPIMDXGENPEVPFPRDMIDLEMADPDLLEESSSLLEPSEMGRGXPLRLGFVAGVINRERIPXFERMLWRVCRGNVFLRQAEIENPLEDPVXGDYVHKSVFIIFFQGDQLKNRVKKICEGFRASLYPCPEXPQERKEMASGVNXRIDDLQMVLNQXEDHRQRVLQAAAKNIRVWFIKVRKMKAIYHXLNLCNIDVXQKCLIAEVWCPVXDLDSIQFALRRGXEHSGSXVPSILNRMQXNQXPPXYNKXNKFXYGFQNIVDAYGIGXYREINPAPYXIIXFPFLFAVMFGDFGHGILMXLFAVWMVLRESRILSQKNENEMFSXVFSGRYIILLMGVFSMYXGLIYNDCFSKSLNIFGSSWSVRPMFXYNWXEEXLRGNPVLQLNPALPGVFGGPYPFGIDPIWNIAXNKLXFLNSFKMKMSVILGIIHMLFGVSLSLFNHIYFKKPLNIYFGFIPEIIFMXSLFGYLVILIFYKWXAYDAHXSENAPSLLIHFINMFLFSYPESGYSMLYSGQKGIQCFLVVVALLCVPWMLLFKPLVLRRQYLRRKHLGXLNFGGIRVGNGPXEEDAEIIQHDQLSXHSEDADEFDFGDXMVHQAIHXIEYCLGCISNXASYLRLWALSLAHAQLSEVLWXMVIHIGLSVKSLAGGLVLFFFFXAFAXLXVAILLIMEGLSAFLHALRLHWVEFQNKFYSGXGFKFLPFSFEHIREGKFEE

SEQ ID NO: 3607 - protein, 794 aa, Homo sapiens
  MOD_RES (11)..(11): Selenocysteine
  MOD_RES (82)..(82): Selenocysteine
  MOD_RES (121)..(121): Selenocysteine
  MOD_RES (139)..(139): Selenocysteine
  MOD_RES (168)..(168): Selenocysteine
  MOD_RES (207)..(207): Selenocysteine
  MOD_RES (220)..(220): Selenocysteine
  MOD_RES (232)..(232): Selenocysteine
  MOD_RES (263)..(263): Selenocysteine
  MOD_RES (272)..(272): Selenocysteine
  MOD_RES (285)..(285): Selenocysteine
  MOD_RES (298)..(298): Selenocysteine
  MOD_RES (304)..(304): Selenocysteine
  MOD_RES (314)..(314): Selenocysteine
  MOD_RES (317)..(317): Selenocysteine
  MOD_RES (320)..(320): Selenocysteine
  MOD_RES (324)..(324): Selenocysteine
  MOD_RES (328)..(328): Selenocysteine
  MOD_RES (342)..(342): Selenocysteine
  MOD_RES (352)..(352): Selenocysteine
  MOD_RES (355)..(355): Selenocysteine
  MOD_RES (374)..(374): Selenocysteine
  MOD_RES (399)..(399): Selenocysteine
  MOD_RES (417)..(417): Selenocysteine
  MOD_RES (443)..(443): Selenocysteine
  MOD_RES (447)..(447): Selenocysteine
  MOD_RES (450)..(450): Selenocysteine
  MOD_RES (483)..(483): Selenocysteine
  MOD_RES (487)..(487): Selenocysteine
  MOD_RES (537)..(537): Selenocysteine
  MOD_RES (552)..(552): Selenocysteine
  MOD_RES (558)..(558): Selenocysteine
  MOD_RES (627)..(627): Selenocysteine
  MOD_RES (640)..(640): Selenocysteine
  MOD_RES (654)..(654): Selenocysteine
  MOD_RES (673)..(673): Selenocysteine
  MOD_RES (681)..(681): Selenocysteine
  MOD_RES (692)..(692): Selenocysteine
  MOD_RES (714)..(714): Selenocysteine
  MOD_RES (737)..(737): Selenocysteine
  MOD_RES (741)..(741): Selenocysteine
  MOD_RES (743)..(743): Selenocysteine
  MOD_RES (775)..(775): Selenocysteine
MGELFRSEEMXLAQLFLQSEAAYCCVSELGELGKVQFRDLNPDVNVFQRKFVNEVRRCEEMDRKLRFVEKEIRKANIPIMDXGENPEVPFPRDMIDLEMADPDLLEESSSLLEPSEMGRGXPLRLGFVAGVINRERIPXFERMLWRVCRGNVFLRQAEIENPLEDPVXGDYVHKSVFIIFFQGDQLKNRVKKICEGFRASLYPCPEXPQERKEMASGVNXRIDDLQMVLNQXEDHRQRVLQAAAKNIRVWFIKVRKMKAIYHXLNLCNIDVXQKCLIAEVWCPVXDLDSIQFALRRGXEHSGSXVPSILNRMQXNQXPPXYNKXNKFXYGFQNIVDAYGIGXYREINPAPYXIIXFPFLFAVMFGDFGHGILMXLFAVWMVLRESRILSQKNENEMFSXVFSGRYIILLMGVFSMYXGLIYNDCFSKSLNIFGSSWSVRPMFXYNWXEEXLRGNPVLQLNPALPGVFGGPYPFGIDPIWNIAXNKLXFLNSFKMKMSVILGIIHMLFGVSLSLFNHIYFKKPLNIYFGFIPEIIFMXSLFGYLVILIFYKWXAYDAHXSENAPSLLIHFINMFLFSYPESGYSMLYSGQKGIQCFLVVVALLCVPWMLLFKPLVLRRQYLRRKHLGXLNFGGIRVGNGPXEEDAEIIQHDQLSXHSEDADEPSEDEVFDFGDXMVHQAIHXIEYCLGCISNXASYLRLWALSLAHAQLSEVLWXMVIHIGLSVKSLAGGLVLFFFFXAFAXLXVAILLIMEGLSAFLHALRLHWVEFQNKFYSGXGFKFLPFSFEHIREGKFEE

SEQ ID NO: 3608 - protein, 68 aa, Homo sapiens
  MOD_RES (11)..(11): Selenocysteine
MGELFRSEEMXLAQLFLQSEAAYCCVSELGELGKVQFRDLNPDVNVFQRKFVNEVRRCEEMDRKLRQF

SEQ ID NO: 3609 - protein, 483 aa, Homo sapiens
  MOD_RES (3)..(3): Selenocysteine
  MOD_RES (6)..(6): Selenocysteine
  MOD_RES (9)..(9): Selenocysteine
  MOD_RES (13)..(13): Selenocysteine
  MOD_RES (17)..(17): Selenocysteine
  MOD_RES (31)..(31): Selenocysteine
  MOD_RES (41)..(41): Selenocysteine
  MOD_RES (44)..(44): Selenocysteine
  MOD_RES (63)..(63): Selenocysteine
  MOD_RES (88)..(88): Selenocysteine
  MOD_RES (106)..(106): Selenocysteine
  MOD_RES (132)..(132): Selenocysteine
  MOD_RES (136)..(136): Selenocysteine
  MOD_RES (139)..(139): Selenocysteine
  MOD_RES (172)..(172): Selenocysteine
  MOD_RES (176)..(176): Selenocysteine
  MOD_RES (226)..(226): Selenocysteine
  MOD_RES (241)..(241): Selenocysteine
  MOD_RES (247)..(247): Selenocysteine
  MOD_RES (316)..(316): Selenocysteine
  MOD_RES (329)..(329): Selenocysteine
  MOD_RES (343)..(343): Selenocysteine
  MOD_RES (362)..(362): Selenocysteine
  MOD_RES (370)..(370): Selenocysteine
  MOD_RES (381)..(381): Selenocysteine
  MOD_RES (403)..(403): Selenocysteine
  MOD_RES (426)..(426): Selenocysteine
  MOD_RES (430)..(430): Selenocysteine
  MOD_RES (432)..(432): Selenocysteine
  MOD_RES (464)..(464): Selenocysteine
MQXNQXPPXYNKXNKFXYGFQNIVDAYGIGXYREINPAPYXIIXFPFLFAVMFGDFGHGILMXLFAVWMVLRESRILSQKNENEMFSXVFSGRYIILLMGVFSMYXGLIYNDCFSKSLNIFGSSWSVRPMFXYNWXEEXLRGNPVLQLNPALPGVFGGPYPFGIDPIWNIAXNKLXFLNSFKMKMSVILGIIHMLFGVSLSLFNHIYFKKPLNIYFGFIPEIIFMXSLFGYLVILIFYKWXAYDAHXSENAPSLLIHFINMFLFSYPESGYSMLYSGQKGIQCFLVVVALLCVPWMLLFKPLVLRRQYLRRKHLGXLNFGGIRVGNGPXEEDAEIIQHDQLSXHSEDADEPSEDEVFDFGDXMVHQAIHXIEYCLGCISNXASYLRLWALSLAHAQLSEVLWXMVIHIGLSVKSLAGGLVLFFFFXAFAXLXVAILLIMEGLSAFLHALRLHWVEFQNKFYSGXGFKFLPFSFEHIREGKFEE

SEQ ID NO: 3610 - protein, 191 aa, Homo sapiens
  MOD_RES (46)..(46): Selenocysteine
  MOD_RES (48)..(48): Selenocysteine
  MOD_RES (61)..(61): Selenocysteine
  MOD_RES (75)..(75): Selenocysteine
  MOD_RES (94)..(94): Selenocysteine
  MOD_RES (102)..(102): Selenocysteine
  MOD_RES (113)..(113): Selenocysteine
  MOD_RES (135)..(135): Selenocysteine
  MOD_RES (158)..(158): Selenocysteine
  MOD_RES (162)..(162): Selenocysteine
  MOD_RES (164)..(164): Selenocysteine
PWMLLFKPLVLRRQYLRRKHLEGQPVEAPVSPNPSQQGLEAAAAAXGXLNFGGIRVGNGPXEEDAEIIQHDQLSXHSEDADEPSEDEVFDFGDXMVHQAIHXIEYCLGCISNXASYLRLWALSLAHAQLSEVLWXMVIHIGLSVKSLAGGLVLFFFFXAFAXLXVAILLIMEGLSAFLHALRLHWVEFQNK

SEQ ID NO: 3611 - protein, 129 aa, Homo sapiens
  MOD_RES (1)..(1): Any amino acid
  MOD_RES (11)..(11): Selenocysteine
  MOD_RES (17)..(17): Selenocysteine
  MOD_RES (86)..(86): Selenocysteine
  MOD_RES (99)..(99): Selenocysteine
  MOD_RES (113)..(113): Selenocysteine
XLVILIFYKWXAYDAHXSENAPSLLIHFINMFLFSYPESGYSMLYSGQKGIQCFLVVVALLCVPWMLLFKPLVLRRQYLRRKHLGXLNFGGIRVGNGPXEEDAEIIQHDQLSXHSEDADEALAPAQWKH

SEQ ID NO: 3612 - protein, 131 aa, Homo sapiens
  MOD_RES (14)..(14): Selenocysteine
  MOD_RES (30)..(30): Selenocysteine
  MOD_RES (63)..(64): Selenocysteine
  MOD_RES (81)..(81): Selenocysteine
  MOD_RES (115)..(115): Selenocysteine
MACEEFNFGEILMXQVIHSIEYCLGCISNXASYLRLWALSLAHAQLSDVLWAMLMRVGLRVDXXYGVLLLLPVIALFAVLXIFILLIMEGLSAFLHAIRLHWVEFQNKFYVGAGXKFVPFSFSLLSSKFNN

SEQ ID NO: 3613 - protein, 372 aa, Homo sapiens
  MOD_RES (9)..(9): Selenocysteine
  MOD_RES (21)..(21): Selenocysteine
  MOD_RES (112)..(112): Selenocysteine
  MOD_RES (129)..(129): Selenocysteine
  MOD_RES (135)..(135): Selenocysteine
  MOD_RES (137)..(137): Selenocysteine
  MOD_RES (148)..(148): Selenocysteine
  MOD_RES (200)..(200): Selenocysteine
  MOD_RES (216)..(216): Selenocysteine
  MOD_RES (255)..(255): Selenocysteine
  MOD_RES (268)..(268): Selenocysteine
  MOD_RES (275)..(275): Selenocysteine
  MOD_RES (280)..(280): Selenocysteine
  MOD_RES (320)..(320): Selenocysteine
  MOD_RES (357)..(357): Selenocysteine
MGSLFRSEXMCLAQLFLQSGXAYECLSALGEKGLVQFRDLNQNVSSFQRKFVGEVKRCEELERILVYLVQEINRADIPLPEGEASPPAPPLKQVLEMQEQLQKLEVELREVXKNKEKLRKNLLELIEYXHMLRVXKXFVKRNVEFEPXYEEFPSLESDSLLDYSCMQRLGAKLGFVSGLINQGKVEAFEKMLWRVCKGYXIVSYAELDESLEDPEXGEVIKWYVFLISFWGEQIGHKVKKICDCYHCHVYPYPNXAEERREIQEGLNXRIQDLYXVLHKXEDYLRQVLCKAAESVYSRVIQVKKMKAIYHMLNMCSFDVXNKCLIAEVWCPEADLQDLRRALEEGSVRLPSSPLPGXEERLMELINSEKKRK

SEQ ID NO: 3614 - protein, 856 aa, Homo sapiens
  MOD_RES (9)..(9): Selenocysteine
  MOD_RES (21)..(21): Selenocysteine
  MOD_RES (112)..(112): Selenocysteine
  MOD_RES (129)..(129): Selenocysteine
  MOD_RES (135)..(135): Selenocysteine
  MOD_RES (137)..(137): Selenocysteine
  MOD_RES (148)..(148): Selenocysteine
  MOD_RES (200)..(200): Selenocysteine
  MOD_RES (216)..(216): Selenocysteine
  MOD_RES (255)..(255): Selenocysteine
  MOD_RES (268)..(268): Selenocysteine
  MOD_RES (275)..(275): Selenocysteine
  MOD_RES (280)..(280): Selenocysteine
  MOD_RES (320)..(320): Selenocysteine
  MOD_RES (352)..(352): Selenocysteine
  MOD_RES (362)..(362): Selenocysteine
  MOD_RES (365)..(365): Selenocysteine
  MOD_RES (368)..(368): Selenocysteine
  MOD_RES (372)..(372): Selenocysteine
  MOD_RES (376)..(376): Selenocysteine
  MOD_RES (400)..(400): Selenocysteine
  MOD_RES (403)..(403): Selenocysteine
  MOD_RES (464)..(464): Selenocysteine
  MOD_RES (541)..(541): Selenocysteine
  MOD_RES (545)..(545): Selenocysteine
  MOD_RES (564)..(564): Selenocysteine
  MOD_RES (616)..(616): Selenocysteine
  MOD_RES (638)..(638): Selenocysteine
  MOD_RES (643)..(643): Selenocysteine
  MOD_RES (656)..(656): Selenocysteine
  MOD_RES (689)..(689): Selenocysteine
  MOD_RES (734)..(734): Selenocysteine
  MOD_RES (750)..(750): Selenocysteine
  MOD_RES (783)..(784): Selenocysteine
  MOD_RES (801)..(801): Selenocysteine
  MOD_RES (835)..(835): Selenocysteine
MGSLFRSEXMCLAQLFLQSGXAYECLSALGEKGLVQFRDLNQNVSSFQRKFVGEVKRCEELERILVYLVQEINRADIPLPEGEASPPAPPLKQVLEMQEQLQKLEVELREVXKNKEKLRKNLLELIEYXHMLRVXKXFVKRNVEFEPXYEEFPSLESDSLLDYSCMQRLGAKLGFVSGLINQGKVEAFEKMLWRVCKGYXIVSYAELDESLEDPEXGEVIKWYVFLISFWGEQIGHKVKKICDCYHCHVYPYPNXAEERREIQEGLNXRIQDLYXVLHKXEDYLRQVLCKAAESVYSRVIQVKKMKAIYHMLNMCSFDVXNKCLIAEVWCPEADLQDLRRALEEGSRESGAXIPSFMNIIPXKEXPPXRIRXNKFXEGFQNIVDAYGVGSYREVNPALFXIIXFPFLFAVMFGDFGHGFVMFLFALLLVLNENHPRLNQSQEIMRMFFNGRYILLLMGLFSVYXGLIYNDCFSKSVNLFGSGWNVSAMYSSSHPPAEHKKMVLWNDSVVRHNSILQLDPSIPGVFRGPYPLGIDPIWNLAXNRLXFLNSFKMKMSVILGIIHMXFGVILGIFNHLHFRKKFNIYLVSIPELLFMLCIFGYLIFMIFYKWLVFSAEXSRVAPSILIEFINMFLFPASKXSGLYXGQEYVQRVLLVVXALSVPVLFLGKPLFLLWLHNGRSCFGVNRSGYXLIRKDSEEEVSLLGSQDIEEGNHQVEDGCREMACEEFNFGEILMXQVIHSIEYCLGCISNXASYLRLWALSLAHAQLSDVLWAMLMRVGLRVDXXYGVLLLLPVIALFAVLXIFILLIMEGLSAFLHAIRLHWVEFQNKFYVGAGXKFVPFSFSLLSSKFNNDDSVA

SEQ ID NO: 3615 - protein, 138 aa, Homo sapiens
  MOD_RES (16)..(16): Selenocysteine
  MOD_RES (32)..(32): Selenocysteine
  MOD_RES (65)..(66): Selenocysteine
  MOD_RES (83)..(83): Selenocysteine
  MOD_RES (117)..(117): Selenocysteine
MLCDLSQFNFGEILMXQVIHSIEYCLGCISNXASYLRLWALSLAHAQLSDVLWAMLMRVGLRVDXXYGVLLLLPVIALFAVLXIFILLIMEGLSAFLHAIRLHWVEFQNKFYVGAGXKFVPFSFSLLSSKFNNDDSVA

SEQ ID NO: 3616 - protein, 328 aa, Homo sapiens
  MOD_RES (5)..(5): Selenocysteine
  MOD_RES (7)..(7): Selenocysteine
  MOD_RES (18)..(18): Selenocysteine
  MOD_RES (70)..(70): Selenocysteine
  MOD_RES (86)..(86): Selenocysteine
  MOD_RES (125)..(125): Selenocysteine
  MOD_RES (138)..(138): Selenocysteine
  MOD_RES (145)..(145): Selenocysteine
  MOD_RES (150)..(150): Selenocysteine
  MOD_RES (190)..(190): Selenocysteine
  MOD_RES (222)..(222): Selenocysteine
  MOD_RES (232)..(232): Selenocysteine
  MOD_RES (235)..(235): Selenocysteine
  MOD_RES (238)..(238): Selenocysteine
  MOD_RES (242)..(242): Selenocysteine
  MOD_RES (246)..(246): Selenocysteine
  MOD_RES (270)..(270): Selenocysteine
  MOD_RES (273)..(273): Selenocysteine
MLRVXKXFVKRNVEFEPXYEEFPSLESDSLLDYSCMQRLGAKLGFVSGLINQGKVEAFEKMLWRVCKGYXIVSYAELDESLEDPEXGEVIKWYVFLISFWGEQIGHKVKKICDCYHCHVYPYPNXAEERREIQEGLNXRIQDLYXVLHKXEDYLRQVLCKAAESVYSRVIQVKKMKAIYHMLNMCSFDVXNKCLIAEVWCPEADLQDLRRALEEGSRESGAXIPSFMNIIPXKEXPPXRIRXNKFXEGFQNIVDAYGVGSYREVNPALFXIIXFPFLFAVMFGDFGHGFVMFLFALLLVLNENHPRLNQSQEIMRMFFNGRYILLLMG

SEQ ID NO: 3617 - protein, 840 aa, Homo sapiens
  MOD_RES (87)..(87): Selenocysteine
  MOD_RES (95)..(95): Selenocysteine
  MOD_RES (98)..(98): Selenocysteine
  MOD_RES (125)..(125): Selenocysteine
  MOD_RES (134)..(134): Selenocysteine
  MOD_RES (140)..(140): Selenocysteine
  MOD_RES (142)..(142): Selenocysteine
  MOD_RES (150)..(150): Selenocysteine
  MOD_RES (153)..(153): Selenocysteine
  MOD_RES (167)..(167): Selenocysteine
  MOD_RES (213)..(213): Selenocysteine
  MOD_RES (245)..(245): Selenocysteine
  MOD_RES (272)..(272): Selenocysteine
  MOD_RES (275)..(275): Selenocysteine
  MOD_RES (277)..(277): Selenocysteine
  MOD_RES (317)..(317): Selenocysteine
  MOD_RES (333)..(333): Selenocysteine
  MOD_RES (355)..(356): Selenocysteine
  MOD_RES (361)..(361): Selenocysteine
  MOD_RES (365)..(365): Selenocysteine
  MOD_RES (369)..(369): Selenocysteine
  MOD_RES (373)..(373): Selenocysteine
  MOD_RES (397)..(397): Selenocysteine
  MOD_RES (400)..(400): Selenocysteine
  MOD_RES (416)..(416): Selenocysteine
  MOD_RES (437)..(437): Selenocysteine
  MOD_RES (444)..(444): Selenocysteine
  MOD_RES (462)..(462): Selenocysteine
  MOD_RES (491)..(491): Selenocysteine
  MOD_RES (494)..(494): Selenocysteine
  MOD_RES (534)..(534): Selenocysteine
  MOD_RES (569)..(569): Selenocysteine
  MOD_RES (681)..(681): Selenocysteine
  MOD_RES (699)..(699): Selenocysteine
  MOD_RES (703)..(703): Selenocysteine
  MOD_RES (727)..(727): Selenocysteine
  MOD_RES (738)..(738): Selenocysteine
  MOD_RES (760)..(760): Selenocysteine
  MOD_RES (769)..(769): Selenocysteine
  MOD_RES (789)..(789): Selenocysteine
  MOD_RES (837)..(837): Selenocysteine
MVSVFRSEEMCLSQLFLQVEAAYCCVAELGELGLVQFKDLNMNVNSFQRKFVNEVRRCESLERILRFLEDEMQNEIVVQLLEKSPLXPLPREMIXLEXVLEKLEGELQEANQNQQALKQSFLELXELKYLLKKXQDFFEXEXNLADDFFXEDXSGLLELKAVPAYMXGKLGFIAGVINRERMASFERLLWRICRGNVYLKFSEMDAPLEDPVXKEEIQKNIFIIFYQGEQLRQKIKKICDGFRAXVYPCPEPAVERREMLESVNVRLEDLIXVIXQXESHRQRLLQEAAANWHSWLIKVQKMKAVYHILNMCNIDVXQQCVIAEIWFPVADAXRIKRALEQGMELSGSSMAPIMXXVQSKXAPPXFNRXNKFXAGFQNIVDAYGVGSYREINPAPYXIIXFPFLFAVMFGDCGHGXVMLLAALWMILNERRLLSQKXDNEIWNXFFHGRYLILLMGIFSIYXGLIYNDCFSKSLNIFGSSWSVQPMFRNGXWNXHVMEESLYLQLDPAIPGVYFGNPYPFGIDPIWNLASNKLXFLNSYKMKMSVILGIVQMVFGVILSLFNHIYFRRXLNIILQFIPEMIFILCLFGYLVFMIIFKWCCFDVHVSQHAPSILIHFINMFLFNYSDSSNAPLYKHQQEVQSFFVVMALISVPWMLLIKPFILRASHRKSQLQASRIQEDAXENIEGDSSSPSSRSGQRXSADXHGALDDHGEEFNFGDVFVHQAIHXIEYCLGCISNXASYLRLWALSLAHAQLSEVLWXMVMNSGLQXRGWGGIVGVFIIFAVFAVLXVAILLIMEGLSAFLHALRLHWVEFQNKFYVGDGYKFSPFSFKHILDGXAEE

SEQ ID NO: 3618 - protein, 46 aa, Homo sapiens
  MOD_RES (2)..(2): Selenocysteine
  MOD_RES (33)..(33): Selenocysteine
MXGLALLYSGVFVAFWACALAVAVLSPGGSLRXPLQGGGPSARQLL

SEQ ID NO: 3619 - protein, 252 aa, Homo sapiens
  MOD_RES (2)..(2): Selenocysteine
  MOD_RES (52)..(52): Selenocysteine
  MOD_RES (89)..(89): Selenocysteine
  MOD_RES (91)..(91): Selenocysteine
  MOD_RES (119)..(119): Selenocysteine
  MOD_RES (135)..(135): Selenocysteine
  MOD_RES (168)..(168): Selenocysteine
  MOD_RES (190)..(190): Selenocysteine
  MOD_RES (245)..(245): Selenocysteine
MXGLALLYSGVFVAFWACALAVGEAGSWRAGAASRPSWPGRNSAGKWPAGNXGPPRALHPRLWGLAPARASDSDKGDPDFQLLEEGFLXEXSPFMWSNLGIGLAISLSVVGAAWGIYIXGSSIIGGGVKAPRIKXKNLVSIIFCEAVAIYGIIMAIVISNMAEPFSAXDPKAIGHRNYHAGYSMFGAGLXVGLSNLFCGVCVGIVGSGAALADAQNPSLFVKILIVEIFGSAIGLFGVIVAILQXSRVKMGD

SEQ ID NO: 3620 - protein, 205 aa, Homo sapiens
  MOD_RES (2)..(2): Selenocysteine
  MOD_RES (27)..(27): Selenocysteine
  MOD_RES (42)..(42): Selenocysteine
  MOD_RES (44)..(44): Selenocysteine
  MOD_RES (72)..(72): Selenocysteine
  MOD_RES (88)..(88): Selenocysteine
  MOD_RES (121)..(121): Selenocysteine
  MOD_RES (143)..(143): Selenocysteine
  MOD_RES (198)..(198): Selenocysteine
MXGLALLYSGVFVAFWACALAVGVCYXIFDLGFRFDVAWFLXEXSPFMWSNLGIGLAISLSVVGAAWGIYIXGSSIIGGGVKAPRIKXKNLVSIIFCEAVAIYGIIMAIVISNMAEPFSAXDPKAIGHRNYHAGYSMFGAGLXVGLSNLFCGVCVGIVGSGAALADAQNPSLFVKILIVEIFGSAIGLFGVIVAILQXSRVKMGD

SEQ ID NO: 3621 - protein, 261 aa, Homo sapiens
  MOD_RES (2)..(2): Selenocysteine
  MOD_RES (27)..(27): Selenocysteine
  MOD_RES (42)..(42): Selenocysteine
  MOD_RES (44)..(44): Selenocysteine
  MOD_RES (72)..(72): Selenocysteine
  MOD_RES (88)..(88): Selenocysteine
  MOD_RES (121)..(121): Selenocysteine
  MOD_RES (143)..(143): Selenocysteine
  MOD_RES (215)..(215): Selenocysteine
  MOD_RES (230)..(230): Selenocysteine
MXGLALLYSGVFVAFWACALAVGVCYXIFDLGFRFDVAWFLXEXSPFMWSNLGIGLAISLSVVGAAWGIYIXGSSIIGGGVKAPRIKXKNLVSIIFCEAVAIYGIIMAIVISNMAEPFSAXDPKAIGHRNYHAGYSMFGAGLXVGLSNLFCGVCVGIVGSGAALADAQNPSLFVKILIVEIFGSAIGLFGVIVAILQVMNPLGKPLCPCPQPSLXLLLEKLKCSPSLPIXIDSPKQLPPPHFHLLVFSYRGSLFLSLIWCH

SEQ ID NO: 3622 - protein, 86 aa, Homo sapiens
  MOD_RES (25)..(25): Selenocysteine
  MOD_RES (41)..(41): Selenocysteine
  MOD_RES (74)..(74): Selenocysteine
MWSNLGIGLAISLSVVGAAWGIYIXGSSIIGGGVKAPRIKXKNLVSIIFCEAVAIYGIIMAIVISNMAEPFSAXDPKAIGHRNYHA

SEQ ID NO: 3623 - protein, 158 aa, Homo sapiens
  MOD_RES (25)..(25): Selenocysteine
  MOD_RES (41)..(41): Selenocysteine
  MOD_RES (74)..(74): Selenocysteine
  MOD_RES (96)..(96): Selenocysteine
  MOD_RES (151)..(151): Selenocysteine
MWSNLGIGLAISLSVVGAAWGIYIXGSSIIGGGVKAPRIKXKNLVSIIFCEAVAIYGIIMAIVISNMAEPFSAXDPKAIGHRNYHAGYSMFGAGLXVGLSNLFCGVCVGIVGSGAALADAQNPSLFVKILIVEIFGSAIGLFGVIVAILQXSRVKMGD

SEQ ID NO: 3624 - protein, 88 aa, Homo sapiens
  MOD_RES (1)..(1): Any amino acid
  MOD_RES (33)..(33): Selenocysteine
  MOD_RES (74)..(74): Selenocysteine
XAVGEAGSWRAGAASRPSWPGRNSAGKWPAGNXGPPRALHPRLWGLAPARASDSDKGDPDFQLLEEGCGRESAXPFLIWASALMWHGS

SEQ ID NO: 3625 - protein, 63 aa, Homo sapiens
MSESKSGPDPGRCLWHSQERYRHCGHVCHAAGADHEVHHPSGHGWHHRHLRPGGGSPHRQLPE

SEQ ID NO: 3626 - protein, 155 aa, Homo sapiens
  MOD_RES (34)..(34): Selenocysteine
  MOD_RES (39)..(39): Selenocysteine
  MOD_RES (121)..(121): Selenocysteine
  MOD_RES (154)..(154): Selenocysteine
MSESKSGPEYASFFAVMGASAAMVFSALGAAYGXAKSGXGIAAMSVMRPEQIMKSIIPVVMAGIIAIYGLVVAVLIANSLNDDISLYKSFLQLGAGLSVGLSGLAAGFAIGIVGDAGVRGXAQQPRLFVGMILILIFAEVLGLYGLIVALILSXK

SEQ ID NO: 3627 - protein, 112 aa, Homo sapiens
  MOD_RES (78)..(78): Selenocysteine
  MOD_RES (111)..(111): Selenocysteine
MSVMRPEQIMKSIIPVVMAGIIAIYGLVVAVLIANSLNDDISLYKSFLQLGAGLSVGLSGLAAGFAIGIVGDAGVRGXAQQPRLFVGMILILIFAEVLGLYGLIVALILSXK

SEQ ID NO: 3628 - protein, 115 aa, Homo sapiens
  MOD_RES (41)..(41): Selenocysteine
  MOD_RES (52)..(52): Selenocysteine
  MOD_RES (66)..(66): Selenocysteine
  MOD_RES (101)..(101): Selenocysteine
  MOD_RES (104)..(104): Selenocysteine
  MOD_RES (106)..(106): Selenocysteine
MSFFPELYFNVDNGYLEGLVRGLKAGVLSQADYLNLVQCEXLEDLKLHLQSXDYGNFLANEASPLXVSVIDDRLKEKMVVEFRHMRNHAYEPLASFLDFIXCLXLXLEEFPLGLI

SEQ ID NO: 3629 - protein, 113 aa, Homo sapiens
  MOD_RES (41)..(41): Selenocysteine
  MOD_RES (52)..(52): Selenocysteine
  MOD_RES (66)..(66): Selenocysteine
  MOD_RES (101)..(101): Selenocysteine
MSFFPELYFNVDNGYLEGLVRGLKAGVLSQADYLNLVQCEXLEDLKLHLQSXDYGNFLANEASPLXVSVIDDRLKEKMVVEFRHMRNHAYEPLASFLDFIXGFFPGLHFRAGP

SEQ ID NO: 3630 - protein, 392 aa, Homo sapiens
  MOD_RES (41)..(41): Selenocysteine
  MOD_RES (52)..(52): Selenocysteine
  MOD_RES (66)..(66): Selenocysteine
  MOD_RES (101)..(101): Selenocysteine
  MOD_RES (108)..(108): Selenocysteine
  MOD_RES (155)..(155): Selenocysteine
  MOD_RES (157)..(157): Selenocysteine
  MOD_RES (187)..(187): Selenocysteine
  MOD_RES (199)..(199): Selenocysteine
  MOD_RES (225)..(225): Selenocysteine
  MOD_RES (239)..(239): Selenocysteine
  MOD_RES (244)..(245): Selenocysteine
  MOD_RES (265)..(265): Selenocysteine
  MOD_RES (271)..(271): Selenocysteine
  MOD_RES (330)..(330): Selenocysteine
MSFFPELYFNVDNGYLEGLVRGLKAGVLSQADYLNLVQCEXLEDLKLHLQSXDYGNFLANEASPLXVSVIDDRLKEKMVVEFRHMRNHAYEPLASFLDFIXQESEAGXPEGPGNMPKLGSRPSPGHRPPFLRVSLLPWPPSSYSYMIDNVILLIXGXLHQRSIAELVPKCHPLGSFEQMEAVNIAQXPAELYNAILVDXPLAAFFQDCISEQDLDEMNIEIIRNXLYKAYLESFYKFCXLLGGXXADAMCPILEFEADRRAFIIXINSFGXELSKEDRAKLFPHCGRLYPEGLAQLARADDYEQVKNVADYYPEYKLLFEGAGSNPGDKXLEDRFFEHEVKLNKLAFLNQFHFGVFYAFVKLKEQECRNIVWIAECIAQRHRAKIDNYIPIF

SEQ ID NO: 3631 - protein, 351 aa, Homo sapiens
  MOD_RES (41)..(41): Selenocysteine
  MOD_RES (52)..(52): Selenocysteine
  MOD_RES (66)..(66): Selenocysteine
  MOD_RES (101)..(101): Selenocysteine
  MOD_RES (114)..(114): Selenocysteine
  MOD_RES (116)..(116): Selenocysteine
  MOD_RES (146)..(146): Selenocysteine
  MOD_RES (158)..(158): Selenocysteine
  MOD_RES (184)..(184): Selenocysteine
  MOD_RES (198)..(198): Selenocysteine
  MOD_RES (203)..(204): Selenocysteine
  MOD_RES (224)..(224): Selenocysteine
  MOD_RES (230)..(230): Selenocysteine
  MOD_RES (289)..(289): Selenocysteine
MSFFPELYFNVDNGYLEGLVRGLKAGVLSQADYLNLVQCEXLEDLKLHLQSXDYGNFLANEASPLXVSVIDDRLKEKMVVEFRHMRNHAYEPLASFLDFIXYSYMIDNVILLIXGXLHQRSIAELVPKCHPLGSFEQMEAVNIAQXPAELYNAILVDXPLAAFFQDCISEQDLDEMNIEIIRNXLYKAYLESFYKFCXLLGGXXADAMCPILEFEADRRAFIIXINSFGXELSKEDRAKLFPHCGRLYPEGLAQLARADDYEQVKNVADYYPEYKLLFEGAGSNPGDKXLEDRFFEHEVKLNKLAFLNQFHFGVFYAFVKLKEQECRNIVWIAECIAQRHRAKIDNYIPIF

SEQ ID NO: 3632 - protein, 57 aa, Homo sapiens
  MOD_RES (41)..(41): Selenocysteine
  MOD_RES (49)..(49): Selenocysteine
  MOD_RES (55)..(55): Selenocysteine
MSFFPELYFNVDNGYLEGLVRGLKAGVLSQADYLNLVQCEXLEGMDGAXRDARGXCP

SEQ ID NO: 3633 - protein, 47 aa, Homo sapiens
  MOD_RES (41)..(41): Selenocysteine
  MOD_RES (45)..(45): Selenocysteine
  MOD_RES (47)..(47): Selenocysteine
MSFFPELYFNVDNGYLEGLVRGLKAGVLSQADYLNLVQCEXLEVXVX

SEQ ID NO: 3634 - protein, 274 aa, Homo sapiens
  MOD_RES (24)..(24): Selenocysteine
  MOD_RES (37)..(37): Selenocysteine
  MOD_RES (39)..(39): Selenocysteine
  MOD_RES (69)..(69): Selenocysteine
  MOD_RES (81)..(81): Selenocysteine
  MOD_RES (107)..(107): Selenocysteine
  MOD_RES (121)..(121): Selenocysteine
  MOD_RES (126)..(127): Selenocysteine
  MOD_RES (147)..(147): Selenocysteine
  MOD_RES (153)..(153): Selenocysteine
  MOD_RES (212)..(212): Selenocysteine
MVVEFRHMRNHAYEPLASFLDFIXYSYMIDNVILLIXGXLHQRSIAELVPKCHPLGSFEQMEAVNIAQXPAELYNAILVDXPLAAFFQDCISEQDLDEMNIEIIRNXLYKAYLESFYKFCXLLGGXXADAMCPILEFEADRRAFIIXINSFGXELSKEDRAKLFPHCGRLYPEGLAQLARADDYEQVKNVADYYPEYKLLFEGAGSNPGDKXLEDRFFEHEVKLNKLAFLNQFHFGVFYAFVKLKEQECRNIVWIAECIAQRHRAKIDNYIPIF

SEQ ID NO: 3635 - protein, 232 aa, Homo sapiens
  MOD_RES (1)..(1): Any amino acid
  MOD_RES (39)..(39): Selenocysteine
  MOD_RES (65)..(65): Selenocysteine
  MOD_RES (79)..(79): Selenocysteine
  MOD_RES (84)..(85): Selenocysteine
  MOD_RES (105)..(105): Selenocysteine
  MOD_RES (111)..(111): Selenocysteine
  MOD_RES (170)..(170): Selenocysteine
XFPELYFNVDNGYLEGLVRGLKAGVLSQADYLNLVQCEXLEAAFFQDCISEQDLDEMNIEIIRNXLYKAYLESFYKFCXLLGGXXADAMCPILEFEADRRAFIIXINSFGXELSKEDRAKLFPHCGRLYPEGLAQLARADDYEQVKNVADYYPEYKLLFEGAGSNPGDKXLEDRFFEHEVKLNKLAFLNQFHFGVFYAFVKLKEQECRNIVWIAECIAQRHRAKIDNYIPIF

SEQ ID NO: 3636 - protein, 40 aa, Homo sapiens
  MOD_RES (1)..(1): Any amino acid
  MOD_RES (24)..(24): Selenocysteine
  MOD_RES (34)..(34): Selenocysteine
XHFKGFSLRQPVDFPGALAGAEIXGRSLWPASSXVRPVKG

SEQ ID NO: 3637 - protein, 71 aa, Homo sapiens
  MOD_RES (1)..(1): Any amino acid
  MOD_RES (39)..(39): Selenocysteine
  MOD_RES (60)..(60): Selenocysteine
  MOD_RES (68)..(68): Selenocysteine
XLEHLLEQRSQEGHSGQQVALLDQSRAEVMLGLRARGLXGCGGEAELQLQGYMDCWVKVXANHSIWRXSFW

SEQ ID NO: 3638 - protein, 227 aa, Homo sapiens
  MOD_RES (1)..(1): Any amino acid
  MOD_RES (9)..(9): Selenocysteine
  MOD_RES (23)..(23): Selenocysteine
  MOD_RES (58)..(58): Selenocysteine
  MOD_RES (71)..(71): Selenocysteine
  MOD_RES (73)..(73): Selenocysteine
  MOD_RES (103)..(103): Selenocysteine
  MOD_RES (115)..(115): Selenocysteine
  MOD_RES (141)..(141): Selenocysteine
  MOD_RES (155)..(155): Selenocysteine
  MOD_RES (160)..(161): Selenocysteine
  MOD_RES (176)..(176): Selenocysteine
  MOD_RES (183)..(183): Selenocysteine
  MOD_RES (188)..(188): Selenocysteine
  MOD_RES (199)..(200): Selenocysteine
  MOD_RES (206)..(206): Selenocysteine
  MOD_RES (210)..(211): Selenocysteine
  MOD_RES (214)..(214): Selenocysteine
  MOD_RES (224)..(224): Selenocysteine
  MOD_RES (227)..(227): Selenocysteine
XLKLHLQSXDYGNFLANEASPLXVSVIDDRLKEKMVVEFRHMRNHAYEPLASFLDFIXYSYMIDNVILLIXGXLHQRSIAELVPKCHPLGSFEQMEAVNIAQXPAELYNAILVDXPLAAFFQDCISEQDLDEMNIEIIRNXLYKAYLESFYKFCXLLGGXXADAMCPILESCPKRXVPSSFHXVGGSXLRAWRSWLGLXXMNRSRXWPIXXRSXSCSSRVQVAXLEX

SEQ ID NO: 3639 - protein, 58 aa, Homo sapiens
  MOD_RES (1)..(1): Any amino acid
  MOD_RES (4)..(4): Selenocysteine
  MOD_RES (15)..(15): Selenocysteine
XSCXSRASLSGSLWXSLEHLLEQRSQEGHSGQQVALLDQSRAEEWMVPQGMPEGLVPE

SEQ ID NO: 3640 - protein, 36 aa, Homo sapiens
  MOD_RES (29)..(29): Selenocysteine
MLEGAELYFNVDHGYLEGLVRGCKASLLXQQDYINL

SEQ ID NO: 3641 - protein, 43 aa, Homo sapiens
  MOD_RES (29)..(29): Selenocysteine
  MOD_RES (41)..(41): Selenocysteine
MLEGAELYFNVDHGYLEGLVRGCKASLLXQQDYINLVQCEXLE

SEQ ID NO: 3642 - protein, 350 aa, Homo sapiens
  MOD_RES (29)..(29): Selenocysteine
  MOD_RES (41)..(41): Selenocysteine
  MOD_RES (51)..(52): Selenocysteine
  MOD_RES (62)..(62): Selenocysteine
  MOD_RES (66)..(66): Selenocysteine
  MOD_RES (72)..(72): Selenocysteine
  MOD_RES (95)..(95): Selenocysteine
  MOD_RES (98)..(98): Selenocysteine
  MOD_RES (101)..(101): Selenocysteine
  MOD_RES (136)..(136): Selenocysteine
  MOD_RES (146)..(146): Selenocysteine
  MOD_RES (158)..(158): Selenocysteine
  MOD_RES (204)..(204): Selenocysteine
  MOD_RES (224)..(224): Selenocysteine
  MOD_RES (230)..(230): Selenocysteine
  MOD_RES (239)..(239): Selenocysteine
  MOD_RES (243)..(243): Selenocysteine
  MOD_RES (288)..(288): Selenocysteine
  MOD_RES (341)..(341): Selenocysteine
MLEGAELYFNVDHGYLEGLVRGCKASLLXQQDYINLVQCEXLEDLKIHLQXXDYGNFLANHXNPLXVSKIDXEMRKRLCGEFEYFRNHSLEPLSXFLXYMXCSYMIDNVILLMNGALQKKSVKEILGKCHPLGRFXEMEAVNIAEXPSDLFNAILIEXPLAPFFQDCMSENALDELNIELLRNKLYKSYLEAFYKFCKNHGDVXAEVMCPILEFEADRRAFIIXLNSFGXELSKEDREXLYPXFGKLYPEGLRLLAQAEDFDQMKNVADHYGVYKPLFEAVGGSGGKXLEDVFYEREVQMNVLAFNRQFHYGVFYAYVKLKEQEIRNIVWIAECISQRHRXKINSYIPIL

SEQ ID NO: 3643 - protein, 81 aa, Homo sapiens
  MOD_RES (7)..(7): Selenocysteine
  MOD_RES (39)..(39): Selenocysteine
  MOD_RES (43)..(43): Selenocysteine
  MOD_RES (72)..(72): Selenocysteine
MAYHGLXVPLIVMSVFWGFVGFLVPWFIPKGPNRGVIIXMLVXCSVCCYLFWLIAILAQLNPLFGPQLKNEXIWYLKYHWP

SEQ ID NO: 3644 - protein, 58 aa, Homo sapiens
  MOD_RES (7)..(7): Selenocysteine
  MOD_RES (39)..(39): Selenocysteine
  MOD_RES (43)..(43): Selenocysteine
MAYHGLXVPLIVMSVFWGFVGFLVPWFIPKGPNRGVIIXMLVXCSVCCYLLSREENAF

SEQ ID NO: 3645 - protein, 65 aa, Homo sapiens
  MOD_RES (7)..(7): Selenocysteine
  MOD_RES (56)..(56): Selenocysteine
MAYHGLXVPLIVMSVFWGFVGFLVPWFIPKGPNRGWLIAILAQLNPLFGPQLKNEXIWYLKYHWP

SEQ ID NO: 3646 - protein, 130 aa, Homo sapiens
  MOD_RES (51)..(51): Selenocysteine
  MOD_RES (63)..(64): Selenocysteine
  MOD_RES (88)..(88): Selenocysteine
  MOD_RES (93)..(93): Selenocysteine
  MOD_RES (121)..(121): Selenocysteine
MRVRGPARLIASGARLLLRMLSALPGWGPAHLQRPLLGPASCLGILRPAMXAHSFALPVIIFXXFWGLVGIAGPWFVPKGPNRGVIIXMLVAXAVCCYLFWLIAILAQLNPLFGPQLKNEXIWYVRFLWE

SEQ ID NO: 3647 - protein, 213 aa, Homo sapiens
  MOD_RES (51)..(51): Selenocysteine
  MOD_RES (63)..(64): Selenocysteine
  MOD_RES (88)..(88): Selenocysteine
  MOD_RES (93)..(93): Selenocysteine
  MOD_RES (107)..(107): Selenocysteine
  MOD_RES (114)..(115): Selenocysteine
  MOD_RES (123)..(123): Selenocysteine
  MOD_RES (129)..(129): Selenocysteine
  MOD_RES (204)..(204): Selenocysteine
MRVRGPARLIASGARLLLRMLSALPGWGPAHLQRPLLGPASCLGILRPAMXAHSFALPVIIFXXFWGLVGIAGPWFVPKGPNRGVIIXMLVAXAVCCYLLCPALGMXVAPLSLXXPSSGPSPXQLCLVXSSLLLAPRDPDPQGLPGSWKSSQSSQPARALGSPGHSSGRGDVLLQYPHCSGVCPLSQGDAAGELVWVGSFPLQXGQMPGLSPS

SEQ ID NO: 3648 - protein, 79 aa, Homo sapiens
  MOD_RES (2)..(2): Selenocysteine
  MOD_RES (14)..(15): Selenocysteine
  MOD_RES (39)..(39): Selenocysteine
  MOD_RES (44)..(44): Selenocysteine
  MOD_RES (58)..(58): Selenocysteine
  MOD_RES (62)..(63): Selenocysteine
  MOD_RES (68)..(68): Selenocysteine
MXAHSFALPVIIFXXFWGLVGIAGPWFVPKGPNRGVIIXMLVAXAVCCYLFFQAAPYXHEIXXLEICXWEFLLFMNAPR

SEQ ID NO: 3649 - protein, 187 aa, Homo sapiens
  MOD_RES (2)..(2): Selenocysteine
  MOD_RES (14)..(15): Selenocysteine
  MOD_RES (39)..(39): Selenocysteine
  MOD_RES (44)..(44): Selenocysteine
  MOD_RES (72)..(72): Selenocysteine
  MOD_RES (81)..(81): Selenocysteine
  MOD_RES (88)..(89): Selenocysteine
  MOD_RES (97)..(97): Selenocysteine
  MOD_RES (103)..(103): Selenocysteine
  MOD_RES (178)..(178): Selenocysteine
MXAHSFALPVIIFXXFWGLVGIAGPWFVPKGPNRGVIIXMLVAXAVCCYLFWLIAILAQLNPLFGPQLKNEXIWCPALGMXVAPLSLXXPSSGPSPXQLCLVXSSLLLAPRDPDPQGLPGSWKSSQSSQPARALGSPGHSSGRGDVLLQYPHCSGVCPLSQGDAAGELVWVGSFPLQXGQMPGLSPS

SEQ ID NO: 3650 - protein, 81 aa, Homo sapiens
  MOD_RES (2)..(2): Selenocysteine
  MOD_RES (14)..(15): Selenocysteine
  MOD_RES (39)..(39): Selenocysteine
  MOD_RES (44)..(44): Selenocysteine
  MOD_RES (72)..(72): Selenocysteine
MXAHSFALPVIIFXXFWGLVGIAGPWFVPKGPNRGVIIXMLVAXAVCCYLFWLIAILAQLNPLFGPQLKNEXIWYVRFLWE

SEQ ID NO: 3651 - protein, 164 aa, Homo sapiens
  MOD_RES (2)..(2): Selenocysteine
  MOD_RES (14)..(15): Selenocysteine
  MOD_RES (39)..(39): Selenocysteine
  MOD_RES (44)..(44): Selenocysteine
  MOD_RES (58)..(58): Selenocysteine
  MOD_RES (65)..(66): Selenocysteine
  MOD_RES (74)..(74): Selenocysteine
  MOD_RES (80)..(80): Selenocysteine
  MOD_RES (155)..(155): Selenocysteine
MXAHSFALPVIIFXXFWGLVGIAGPWFVPKGPNRGVIIXMLVAXAVCCYLLCPALGMXVAPLSLXXPSSGPSPXQLCLVXSSLLLAPRDPDPQGLPGSWKSSQSSQPARALGSPGHSSGRGDVLLQYPHCSGVCPLSQGDAAGELVWVGSFPLQXGQMPGLSPS

SEQ ID NO: 3652 - protein, 185 aa, Homo sapiens
  MOD_RES (30)..(30): Selenocysteine
  MOD_RES (37)..(37): Selenocysteine
  MOD_RES (49)..(49): Selenocysteine
  MOD_RES (80)..(80): Selenocysteine
  MOD_RES (103)..(103): Selenocysteine
  MOD_RES (115)..(115): Selenocysteine
  MOD_RES (142)..(142): Selenocysteine
  MOD_RES (144)..(144): Selenocysteine
  MOD_RES (154)..(154): Selenocysteine
  MOD_RES (171)..(171): Selenocysteine
  MOD_RES (185)..(185): Selenocysteine
MAGAAMYELVRVGHSELVGEIIRLEGDMAXIQVYEEXSGVSVGDPVLRXGKPLSVELGPGIMGAIFDGIQRPLSDISSQXQSIYIPRGVNVSALSRDIKWDFXPCKNLRVGSHIXGGDIYGIVSENSLIKHKIMLPPRNRGXVXYIAPPGNYDXSDVVLELEFEGVKEKFXMVQVWPVRQVRPVX

SEQ ID NO: 3653 - protein, 49 aa, Homo sapiens
  MOD_RES (17)..(17): Selenocysteine
  MOD_RES (30)..(30): Selenocysteine
  MOD_RES (36)..(36): Selenocysteine
  MOD_RES (39)..(39): Selenocysteine
  MOD_RES (44)..(44): Selenocysteine
MDFSKLPKILDEDKESXFGYVHGVSGPAFXPCIIAXLRXYLNPXSGYSL

SEQ ID NO: 3654 - protein, 221 aa, Homo sapiens
  MOD_RES (17)..(17): Selenocysteine
  MOD_RES (30)..(30): Selenocysteine
  MOD_RES (63)..(63): Selenocysteine
  MOD_RES (70)..(70): Selenocysteine
  MOD_RES (82)..(82): Selenocysteine
  MOD_RES (113)..(113): Selenocysteine
  MOD_RES (136)..(136): Selenocysteine
  MOD_RES (148)..(148): Selenocysteine
  MOD_RES (175)..(175): Selenocysteine
  MOD_RES (177)..(177): Selenocysteine
  MOD_RES (187)..(187): Selenocysteine
  MOD_RES (204)..(204): Selenocysteine
  MOD_RES (218)..(218): Selenocysteine
MDFSKLPKILDEDKESXFGYVHGVSGPVVXACDMAGAAMYELVRVGHSELVGEIIRLEGDMAXIQVYEEXSGVSVGDPVLRXGKPLSVELGPGIMGAIFDGIQRPLSDISSQXQSIYIPRGVNVSALSRDIKWDFXPCKNLRVGSHIXGGDIYGIVSENSLIKHKIMLPPRNRGXVXYIAPPGNYDXSDVVLELEFEGVKEKFXMVQVWPVRQVRPVXEKL

SEQ ID NO: 3655 - protein, 617 aa, Homo sapiens
  MOD_RES (17)..(17): Selenocysteine
  MOD_RES (30)..(30): Selenocysteine
  MOD_RES (63)..(63): Selenocysteine
  MOD_RES (70)..(70): Selenocysteine
  MOD_RES (82)..(82): Selenocysteine
  MOD_RES (113)..(113): Selenocysteine
  MOD_RES (136)..(136): Selenocysteine
  MOD_RES (148)..(148): Selenocysteine
  MOD_RES (175)..(175): Selenocysteine
  MOD_RES (177)..(177): Selenocysteine
  MOD_RES (187)..(187): Selenocysteine
  MOD_RES (204)..(204): Selenocysteine
  MOD_RES (218)..(218): Selenocysteine
  MOD_RES (229)..(229): Selenocysteine
  MOD_RES (245)..(246): Selenocysteine
  MOD_RES (257)..(257): Selenocysteine
  MOD_RES (295)..(295): Selenocysteine
  MOD_RES (309)..(309): Selenocysteine
  MOD_RES (315)..(315): Selenocysteine
  MOD_RES (329)..(329): Selenocysteine
  MOD_RES (332)..(332): Selenocysteine
  MOD_RES (351)..(351): Selenocysteine
  MOD_RES (422)..(422): Selenocysteine
  MOD_RES (425)..(425): Selenocysteine
  MOD_RES (470)..(470): Selenocysteine
  MOD_RES (477)..(477): Selenocysteine
  MOD_RES (504)..(504): Selenocysteine
  MOD_RES (508)..(508): Selenocysteine
  MOD_RES (526)..(526): Selenocysteine
  MOD_RES (537)..(537): Selenocysteine
  MOD_RES (557)..(558): Selenocysteine
  MOD_RES (566)..(566): Selenocysteine
MDFSKLPKILDEDKESXFGYVHGVSGPVVXACDMAGAAMYELVRVGHSELVGEIIRLEGDMAXIQVYEEXSGVSVGDPVLRXGKPLSVELGPGIMGAIFDGIQRPLSDISSQXQSIYIPRGVNVSALSRDIKWDFXPCKNLRVGSHIXGGDIYGIVSENSLIKHKIMLPPRNRGXVXYIAPPGNYDXSDVVLELEFEGVKEKFXMVQVWPVRQVRPVXEKLPANHPLLXGQRVLDALFPCVQGGXXAIPGAFGCGKXVISQSLSKYSNSDVIIYVGCGERGNEMSEVLRDFPELXMEVDGKVESIMKRXALVANXSNMPVAAREASIYXGIXLSEYFRDMGYHVSMMADSXSRWAEALREISGRLAEMPADSGYPAYLGARLASFYERAGRVKCLGNPEREGSVSIVGAVSPPGGDFSDPVXSAXLGIVQVFWGLDKKLAQRKHFPSVNWLISYSKYMRALDEYYDKHFXEFVPLRXKAKEILQEEEDLAEIVQLVGKASLAEXDKIXLEVAKLIKDDFLQQNGYXPYDRFCPFYKXVGMLSNMIAFYDMARRAVEXXAQSDNKIXWSIIREHMGDILYKLSSMKFKDPLKDGEAKIKSDYAQLLEDMQNAFRSLED

SEQ ID NO: 3656 - protein, 496 aa, Homo sapiens
  MOD_RES (30)..(30): Selenocysteine
  MOD_RES (35)..(35): Selenocysteine
  MOD_RES (40)..(40): Selenocysteine
  MOD_RES (43)..(43): Selenocysteine
  MOD_RES (69)..(69): Selenocysteine
  MOD_RES (74)..(74): Selenocysteine
  MOD_RES (86)..(86): Selenocysteine
  MOD_RES (96)..(96): Selenocysteine
  MOD_RES (104)..(105): Selenocysteine
  MOD_RES (109)..(109): Selenocysteine
  MOD_RES (115)..(115): Selenocysteine
  MOD_RES (166)..(166): Selenocysteine
  MOD_RES (234)..(234): Selenocysteine
  MOD_RES (247)..(247): Selenocysteine
  MOD_RES (262)..(262): Selenocysteine
  MOD_RES (268)..(268): Selenocysteine
  MOD_RES (274)..(275): Selenocysteine
  MOD_RES (292)..(292): Selenocysteine
  MOD_RES (323)..(323): Selenocysteine
  MOD_RES (327)..(327): Selenocysteine
  MOD_RES (339)..(339): Selenocysteine
  MOD_RES (346)..(346): Selenocysteine
  MOD_RES (350)..(350): Selenocysteine
  MOD_RES (388)..(388): Selenocysteine
  MOD_RES (422)..(422): Selenocysteine
  MOD_RES (494)..(494): Selenocysteine
MAMEIDSRPGGLPGSSCNLGAAREHMQAVXRNYIXHPRVXYRXVCSVNGPLVVLDRVKFAQYAEIVHFXLPDGXQRSGQVLEVAGXKAIVQVFEGXSGIDARKXXCEFXGDILRXPVSEDMLGRVFNGSGKPIDKGPVVMAEDFLDINGQPINPHSRIYPEEMIQXGISPIDVMNSIARGQKIPIFSAAGLPHNEIAAQICRQAGLVKKSKAVLDYHDDNFAIVFAAMGVNMEXARFFKSDFEQNGXMGNVCLFLNLANDPXIERIIXPRLALXXAEFLAYQCEKHVLVILXDMSSYAEALREVSAAREEVPGRRGFPGYMYXDLAXIYERAGRVEDIXHPIPDLXGFIXEGQIYVDRQLHNRQIYPPINVLPSLSRLMKSAIGEGMXRKDHGDVSNQLYACYAIGKDVQAMKAVVGEEALXSEDLLYLEFLQKFEKNFINQGPYENRSVFESLDLGWKLLRIFPKEMLKRIPQAVIDEFYSREGALQDLAPDXAL

SEQ ID NO: 3657 - protein, 513 aa, Homo sapiens
  MOD_RES (30)..(30): Selenocysteine
  MOD_RES (35)..(35): Selenocysteine
  MOD_RES (40)..(40): Selenocysteine
  MOD_RES (43)..(43): Selenocysteine
  MOD_RES (69)..(69): Selenocysteine
  MOD_RES (74)..(74): Selenocysteine
  MOD_RES (86)..(86): Selenocysteine
  MOD_RES (96)..(96): Selenocysteine
  MOD_RES (104)..(105): Selenocysteine
  MOD_RES (109)..(109): Selenocysteine
  MOD_RES (115)..(115): Selenocysteine
  MOD_RES (166)..(166): Selenocysteine
  MOD_RES (234)..(234): Selenocysteine
  MOD_RES (247)..(247): Selenocysteine
  MOD_RES (262)..(262): Selenocysteine
  MOD_RES (268)..(268): Selenocysteine
  MOD_RES (274)..(275): Selenocysteine
  MOD_RES (292)..(292): Selenocysteine
  MOD_RES (323)..(323): Selenocysteine
  MOD_RES (327)..(327): Selenocysteine
  MOD_RES (343)..(343): Selenocysteine
  MOD_RES (349)..(349): Selenocysteine
  MOD_RES (356)..(356): Selenocysteine
  MOD_RES (363)..(363): Selenocysteine
  MOD_RES (367)..(367): Selenocysteine
  MOD_RES (405)..(405): Selenocysteine
  MOD_RES (439)..(439): Selenocysteine
  MOD_RES (511)..(511): Selenocysteine
MAMEIDSRPGGLPGSSCNLGAAREHMQAVXRNYIXHPRVXYRXVCSVNGPLVVLDRVKFAQYAEIVHFXLPDGXQRSGQVLEVAGXKAIVQVFEGXSGIDARKXXCEFXGDILRXPVSEDMLGRVFNGSGKPIDKGPVVMAEDFLDINGQPINPHSRIYPEEMIQXGISPIDVMNSIARGQKIPIFSAAGLPHNEIAAQICRQAGLVKKSKAVLDYHDDNFAIVFAAMGVNMEXARFFKSDFEQNGXMGNVCLFLNLANDPXIERIIXPRLALXXAEFLAYQCEKHVLVILXDMSSYAEALREVSAAREEVPGRRGFPGYMYXDLAXIYERAGRVEGRGGSIXQIPILXMPNDDIXHPIPDLXGFIXEGQIYVDRQLHNRQIYPPINVLPSLSRLMKSAIGEGMXRKDHGDVSNQLYACYAIGKDVQAMKAVVGEEALXSEDLLYLEFLQKFEKNFINQGPYENRSVFESLDLGWKLLRIFPKEMLKRIPQAVIDEFYSREGALQDLAPDXAL

SEQ ID NO: 3658 - protein, 248 aa, Homo sapiens
  MOD_RES (30)..(30): Selenocysteine
  MOD_RES (35)..(35): Selenocysteine
  MOD_RES (40)..(40): Selenocysteine
  MOD_RES (43)..(43): Selenocysteine
  MOD_RES (69)..(69): Selenocysteine
  MOD_RES (74)..(74): Selenocysteine
  MOD_RES (86)..(86): Selenocysteine
  MOD_RES (96)..(96): Selenocysteine
  MOD_RES (104)..(105): Selenocysteine
  MOD_RES (109)..(109): Selenocysteine
  MOD_RES (115)..(115): Selenocysteine
  MOD_RES (166)..(166): Selenocysteine
MAMEIDSRPGGLPGSSCNLGAAREHMQAVXRNYIXHPRVXYRXVCSVNGPLVVLDRVKFAQYAEIVHFXLPDGXQRSGQVLEVAGXKAIVQVFEGXSGIDARKXXCEFXGDILRXPVSEDMLGRVFNGSGKPIDKGPVVMAEDFLDINGQPINPHSRIYPEEMIQXGISPIDVMNSIARGQKIPIFSAAGLPHNEIAAQICRQAGLVKKSKAVLDYHDDNFAIVFAAMGVRRLSRLASEHGDSQILQV

SEQ ID NO: 3659 - protein, 118 aa, Homo sapiens
  MOD_RES (10)..(10): Selenocysteine
  MOD_RES (44)..(44): Selenocysteine
  MOD_RES (116)..(116): Selenocysteine
MKSAIGEGMXRKDHGDVSNQLYACYAIGKDVQAMKAVVGEEALXSEDLLYLEFLQKFEKNFINQGPYENRSVFESLDLGWKLLRIFPKEMLKRIPQAVIDEFYSREGALQDLAPDXAL

SEQ ID NO: 3660 - protein, 74 aa, Homo sapiens
  MOD_RES (46)..(46): Selenocysteine
MLGRVFNGSGKPIDKGPVVMAEDFLDINGQPINPHSRIYPEEMIQXGISPIDVMNSIARGQKIPIFSAAGLPHN

SEQ ID NO: 3661 - protein, 249 aa, Homo sapiens
  MOD_RES (2)..(2): Selenocysteine
  MOD_RES (4)..(4): Selenocysteine
  MOD_RES (12)..(12): Selenocysteine
  MOD_RES (51)..(51): Selenocysteine
  MOD_RES (60)..(60): Selenocysteine
  MOD_RES (86)..(86): Selenocysteine
  MOD_RES (91)..(91): Selenocysteine
  MOD_RES (103)..(103): Selenocysteine
  MOD_RES (113)..(113): Selenocysteine
  MOD_RES (121)..(122): Selenocysteine
  MOD_RES (126)..(126): Selenocysteine
  MOD_RES (132)..(132): Selenocysteine
  MOD_RES (183)..(183): Selenocysteine
MXLXAMVAGPVXANDPDGPGWEGGGVWREEGKAEDASVCVSRVFGVRPLLXPAPPPAYRXVCSVNGPLVVLDRVKFAQYAEIVHFXLPDGXQRSGQVLEVAGXKAIVQVFEGXSGIDARKXXCEFXGDILRXPVSEDMLGRVFNGSGKPIDKGPVVMAEDFLDINGQPINPHSRIYPEEMIQXGISPIDVMNSIARGQKIPIFSAAGLPHNEIAAQICRQAGLVKKSKAVLDYHDDNFAIVFAAMGVRR

SEQ ID NO: 3662 - protein, 511 aa, Homo sapiens
  MOD_RES (21)..(21): Selenocysteine
  MOD_RES (46)..(46): Selenocysteine
  MOD_RES (49)..(49): Selenocysteine
  MOD_RES (75)..(75): Selenocysteine
  MOD_RES (80)..(80): Selenocysteine
  MOD_RES (102)..(102): Selenocysteine
  MOD_RES (110)..(110): Selenocysteine
  MOD_RES (115)..(115): Selenocysteine
  MOD_RES (121)..(121): Selenocysteine
  MOD_RES (172)..(172): Selenocysteine
  MOD_RES (240)..(240): Selenocysteine
  MOD_RES (268)..(268): Selenocysteine
  MOD_RES (274)..(274): Selenocysteine
  MOD_RES (280)..(281): Selenocysteine
  MOD_RES (298)..(298): Selenocysteine
  MOD_RES (329)..(329): Selenocysteine
  MOD_RES (333)..(333): Selenocysteine
  MOD_RES (349)..(349): Selenocysteine
  MOD_RES (355)..(355): Selenocysteine
  MOD_RES (362)..(362): Selenocysteine
  MOD_RES (369)..(369): Selenocysteine
  MOD_RES (373)..(373): Selenocysteine
  MOD_RES (411)..(411): Selenocysteine
  MOD_RES (445)..(445): Selenocysteine
  MOD_RES (472)..(472): Selenocysteine
  MOD_RES (476)..(476): Selenocysteine
  MOD_RES (499)..(499): Selenocysteine
MALRAMRGIVNGAAPELPVPXGGPAVGAREQALAVSRNYLSQPRLXYKXVSGVNGPLVILDHVKFPRYAEIVHLXLPDGXKRSGQVLEVSGSKAVVQVFEGXSGIDAKKXSCEFXGDILRXPVSEDMLGRVFNGSGKPIDRGPVVLAEDFLDIMGQPINPQCRIYPEEMIQXGISAIDGMNSIARGQKIPIFSAAGLPHNEIAAQICRQAGLVKKSKDVVDYSEENFAIVFAAMGVNMEXARFFKSDFEENGSMDNVCLFLNLANDPXIERIIXPRLALXXAEFLAYQCEKHVLVILXDMSSYAEALREVSAAREEVPGRRGFPGYMYXDLAXIYERAGRVEGRNGSIXQIPILXMPNDDIXHPIPDLXGYIXEGQIYVDRQLHNRQIYPPINVLPSLSRLMKSAIGEGMXRKDHADVSNQLYACYAIGKDVQAMKAVVGEEALXSDDLLYLEFLQKFERNFIAQGPYENRXVFEXLDIGWQLLRIFPKEMLKRIPQSXLSEFYPRDSAKH

SEQ ID NO: 3663 - protein, 66 aa, Homo sapiens
  MOD_RES (21)..(21): Selenocysteine
  MOD_RES (46)..(46): Selenocysteine
  MOD_RES (49)..(49): Selenocysteine
MALRAMRGIVNGAAPELPVPXGGPAVGAREQALAVSRNYLSQPRLXYKXVSGVNGPLVILDHVKVC

SEQ ID NO: 3664 - protein, 199 aa, Homo sapiens
  MOD_RES (1)..(1): Any amino acid
  MOD_RES (11)..(11): Selenocysteine
  MOD_RES (36)..(36): Selenocysteine
  MOD_RES (39)..(39): Selenocysteine
  MOD_RES (65)..(65): Selenocysteine
  MOD_RES (70)..(70): Selenocysteine
  MOD_RES (92)..(92): Selenocysteine
  MOD_RES (100)..(100): Selenocysteine
  MOD_RES (105)..(105): Selenocysteine
  MOD_RES (111)..(111): Selenocysteine
  MOD_RES (162)..(162): Selenocysteine
  MOD_RES (194)..(194): Selenocysteine
XGAAPELPVPXGGPAVGAREQALAVSRNYLSQPRLXYKXVSGVNGPLVILDHVKFPRYAEIVHLXLPDGXKRSGQVLEVSGSKAVVQVFEGXSGIDAKKXSCEFXGDILRXPVSEDMLGRVFNGSGKPIDRGPVVLAEDFLDIMGQPINPQCRIYPEEMIQXGISAIDGMNSIARGQKIPIFSAAGLPHNEVRXGIGLL

SEQ ID NO: 3665 - protein, 49 aa, Homo sapiens
  MOD_RES (1)..(1): Any amino acid
  MOD_RES (14)..(14): Selenocysteine
  MOD_RES (45)..(45): Selenocysteine
XQAMKAVVGEEALXSDDLLYLEFLQKFERNFIAQGVSLCRPGWSXVVRS

SEQ ID NO: 3666 - protein, 56 aa, Homo sapiens
  MOD_RES (1)..(1): Any amino acid
  MOD_RES (16)..(16): Selenocysteine
  MOD_RES (43)..(43): Selenocysteine
  MOD_RES (51)..(51): Selenocysteine
  MOD_RES (54)..(54): Selenocysteine
XRGIVNGAAPELPVPXGGPAVGAREQALAVSRNYLSQPRLSYXISPISFVXFVXSA

SEQ ID NO: 3667 - protein, 307 aa, Homo sapiens
  MOD_RES (25)..(25): Selenocysteine
  MOD_RES (28)..(28): Selenocysteine
  MOD_RES (55)..(55): Selenocysteine
  MOD_RES (88)..(88): Selenocysteine
  MOD_RES (109)..(109): Selenocysteine
  MOD_RES (128)..(128): Selenocysteine
  MOD_RES (153)..(153): Selenocysteine
  MOD_RES (195)..(195): Selenocysteine
  MOD_RES (252)..(252): Selenocysteine
MADVLEDSKDKVQENLLANGVDLVXYIXRFQWDMAKYPIKQSLKNISEIIAKGVXQIDNDLKSRASAYNNLKGNLQNLERKNAGSLLXRSLAEIVKKDDFVLDSEYLVXLLVVVPKLNHNDWIKQYEXLAEMVVPRSSNVLSEDQDSYLCNVXLFRKAVDDFRHKARENKFIVRDFQYNEEEMKADKEEMNRLSXDKKKQFGPLVRWLKVNFSEAFIAWIHVKALRVFVESVLRYGLPVNFQAMLLQPNKKXLKKLREVLHELYKHLDSSAAAIIDAPMDIPGLNLSQQEYYPYVYYKIDCNLLEFK

SEQ ID NO: 3668 - protein, 382 aa, Homo sapiens
  MOD_RES (2)..(2): Selenocysteine
  MOD_RES (14)..(14): Selenocysteine
  MOD_RES (18)..(18): Selenocysteine
  MOD_RES (26)..(26): Selenocysteine
  MOD_RES (35)..(35): Selenocysteine
  MOD_RES (47)..(47): Selenocysteine
  MOD_RES (100)..(100): Selenocysteine
  MOD_RES (103)..(103): Selenocysteine
  MOD_RES (130)..(130): Selenocysteine
  MOD_RES (163)..(163): Selenocysteine
  MOD_RES (184)..(184): Selenocysteine
  MOD_RES (203)..(203): Selenocysteine
  MOD_RES (228)..(228): Selenocysteine
  MOD_RES (270)..(270): Selenocysteine
  MOD_RES (327)..(327): Selenocysteine
MXEFWLISAPGEKXCQQXWEKLHAAXSKNNNLAVXSKFNIPDLKVGXLDVLVGLSDELAKLDAFVEGVVKKVAQYMADVLEDSKDKVQENLLANGVDLVXYIXRFQWDMAKYPIKQSLKNISEIIAKGVXQIDNDLKSRASAYNNLKGNLQNLERKNAGSLLXRSLAEIVKKDDFVLDSEYLVXLLVVVPKLNHNDWIKQYEXLAEMVVPRSSNVLSEDQDSYLCNVXLFRKAVDDFRHKARENKFIVRDFQYNEEEMKADKEEMNRLSXDKKKQFGPLVRWLKVNFSEAFIAWIHVKALRVFVESVLRYGLPVNFQAMLLQPNKKXLKKLREVLHELYKHLDSSAAAIIDAPMDIPGLNLSQQEYYPYVYYKIDCNLLEFK

SEQ ID NO: 3669 - protein, 437 aa, Homo sapiens
  MOD_RES (24)..(24): Selenocysteine
  MOD_RES (26)..(26): Selenocysteine
  MOD_RES (35)..(35): Selenocysteine
  MOD_RES (46)..(46): Selenocysteine
  MOD_RES (62)..(62): Selenocysteine
  MOD_RES (108)..(108): Selenocysteine
  MOD_RES (112)..(112): Selenocysteine
  MOD_RES (133)..(133): Selenocysteine
  MOD_RES (149)..(149): Selenocysteine
  MOD_RES (154)..(154): Selenocysteine
  MOD_RES (157)..(157): Selenocysteine
  MOD_RES (172)..(172): Selenocysteine
  MOD_RES (174)..(174): Selenocysteine
  MOD_RES (193)..(193): Selenocysteine
  MOD_RES (209)..(209): Selenocysteine
  MOD_RES (222)..(222): Selenocysteine
  MOD_RES (226)..(226): Selenocysteine
  MOD_RES (235)..(235): Selenocysteine
  MOD_RES (237)..(237): Selenocysteine
  MOD_RES (248)..(248): Selenocysteine
  MOD_RES (256)..(256): Selenocysteine
  MOD_RES (287)..(287): Selenocysteine
  MOD_RES (298)..(298): Selenocysteine
  MOD_RES (307)..(307): Selenocysteine
  MOD_RES (320)..(320): Selenocysteine
  MOD_RES (384)..(384): Selenocysteine
  MOD_RES (404)..(404): Selenocysteine
MSEFWLISAPGDKENLQALERMNXVXSKSNLSYNXKFAIPDFKVGXLDSLVGLSDELGKLDXFAESLIRRMAQSVVEVMEDSKGKVQEHLLANGGLKGKMKCLKIDLXSFVXHFEWDMAKYPVKQPLVSVVDXIAKQLAQIEMDLKSRXAAYNXLKXNLENLEKKSMGNLFXRXLSDIVSKEDFVLDSEYLVXLLVIVPKPNYSQWQKXYESLSDMVVPRSXKLIXEDKEGGLFXVXLFRKVIEDFKXKAKENKFXVREFYYDEKEIEREREEMARLLSDKKQQYQXSCVALKKGSSXFPDHKVKVXPLGNPDRPAAGQXDRERESEGEGEGPLLRWLKVNFSEAFIAWIHIKALRVFVESVLRYGLPVNFQAVLLQPHKKSSXKRLREVLNSVFRHLDEVAAXSILDASVEIPGLQLNNQDYFPYVYFHIDLSLLD

SEQ ID NO: 3670 - protein, 381 aa, Homo sapiens
  MOD_RES (24)..(24): Selenocysteine
  MOD_RES (26)..(26): Selenocysteine
  MOD_RES (35)..(35): Selenocysteine
  MOD_RES (46)..(46): Selenocysteine
  MOD_RES (62)..(62): Selenocysteine
  MOD_RES (98)..(98): Selenocysteine
  MOD_RES (102)..(102): Selenocysteine
  MOD_RES (123)..(123): Selenocysteine
  MOD_RES (139)..(139): Selenocysteine
  MOD_RES (144)..(144): Selenocysteine
  MOD_RES (147)..(147): Selenocysteine
  MOD_RES (162)..(162): Selenocysteine
  MOD_RES (164)..(164): Selenocysteine
  MOD_RES (183)..(183): Selenocysteine
  MOD_RES (199)..(199): Selenocysteine
  MOD_RES (212)..(212): Selenocysteine
  MOD_RES (216)..(216): Selenocysteine
  MOD_RES (225)..(225): Selenocysteine
  MOD_RES (227)..(227): Selenocysteine
  MOD_RES (238)..(238): Selenocysteine
  MOD_RES (246)..(246): Selenocysteine
  MOD_RES (328)..(328): Selenocysteine
  MOD_RES (348)..(348): Selenocysteine
MSEFWLISAPGDKENLQALERMNXVXSKSNLSYNXKFAIPDFKVGXLDSLVGLSDELGKLDXFAESLIRRMAQSVVEVMEDSKGKVQEHLLANGVDLXSFVXHFEWDMAKYPVKQPLVSVVDXIAKQLAQIEMDLKSRXAAYNXLKXNLENLEKKSMGNLFXRXLSDIVSKEDFVLDSEYLVXLLVIVPKPNYSQWQKXYESLSDMVVPRSXKLIXEDKEGGLFXVXLFRKVIEDFKXKAKENKFXVREFYYDEKEIEREREEMARLLSDKKQQYGPLLRWLKVNFSEAFIAWIHIKALRVFVESVLRYGLPVNFQAVLLQPHKKSSXKRLREVLNSVFRHLDEVAAXSILDASVEIPGLQLNNQDYFPYVYFHIDLSLLD

SEQ ID NO: 3671 - protein, 427 aa, Homo sapiens
  MOD_RES (24)..(24): Selenocysteine
  MOD_RES (26)..(26): Selenocysteine
  MOD_RES (35)..(35): Selenocysteine
  MOD_RES (46)..(46): Selenocysteine
  MOD_RES (62)..(62): Selenocysteine
  MOD_RES (98)..(98): Selenocysteine
  MOD_RES (102)..(102): Selenocysteine
  MOD_RES (123)..(123): Selenocysteine
  MOD_RES (139)..(139): Selenocysteine
  MOD_RES (144)..(144): Selenocysteine
  MOD_RES (147)..(147): Selenocysteine
  MOD_RES (162)..(162): Selenocysteine
  MOD_RES (164)..(164): Selenocysteine
  MOD_RES (183)..(183): Selenocysteine
  MOD_RES (199)..(199): Selenocysteine
  MOD_RES (212)..(212): Selenocysteine
  MOD_RES (216)..(216): Selenocysteine
  MOD_RES (225)..(225): Selenocysteine
  MOD_RES (227)..(227): Selenocysteine
  MOD_RES (238)..(238): Selenocysteine
  MOD_RES (246)..(246): Selenocysteine
  MOD_RES (277)..(277): Selenocysteine
  MOD_RES (288)..(288): Selenocysteine
  MOD_RES (297)..(297): Selenocysteine
  MOD_RES (310)..(310): Selenocysteine
  MOD_RES (374)..(374): Selenocysteine
  MOD_RES (394)..(394): Selenocysteine
MSEFWLISAPGDKENLQALERMNXVXSKSNLSYNXKFAIPDFKVGXLDSLVGLSDELGKLDXFAESLIRRMAQSVVEVMEDSKGKVQEHLLANGVDLXSFVXHFEWDMAKYPVKQPLVSVVDXIAKQLAQIEMDLKSRXAAYNXLKXNLENLEKKSMGNLFXRXLSDIVSKEDFVLDSEYLVXLLVIVPKPNYSQWQKXYESLSDMVVPRSXKLIXEDKEGGLFXVXLFRKVIEDFKXKAKENKFXVREFYYDEKEIEREREEMARLLSDKKQQYQXSCVALKKGSSXFPDHKVKVXPLGNPDRPAAGQXDRERESEGEGEGPLLRWLKVNFSEAFIAWIHIKALRVFVESVLRYGLPVNFQAVLLQPHKKSSXKRLREVLNSVFRHLDEVAAXSILDASVEIPGLQLNNQDYFPYVYFHIDLSLLD

SEQ ID NO: 3672 - protein, 119 aa, Homo sapiens
  MOD_RES (6)..(6): Selenocysteine
  MOD_RES (27)..(27): Selenocysteine
  MOD_RES (33)..(34): Selenocysteine
  MOD_RES (57)..(57): Selenocysteine
  MOD_RES (68)..(68): Selenocysteine
  MOD_RES (74)..(74): Selenocysteine
  MOD_RES (109)..(109): Selenocysteine
KKIIEXKMLMGEVMREAAFSLAEAKFXAGDFSXXVIQNVNKAQVKIRAKKDNVAGVXLPVFEHYHEGXDSYELXGLARGGEQLAKLKRNYAKAVELLVELASLQVKENXREEKDSKGKI

SEQ ID NO: 3673 - protein, 59 aa, Homo sapiens
  MOD_RES (10)..(10): Selenocysteine
  MOD_RES (23)..(23): Selenocysteine
  MOD_RES (36)..(36): Selenocysteine
  MOD_RES (57)..(57): Selenocysteine
MKARLKGAQXGRNLLKKKSDALXLRFRQILKKIIEXKMLMGEVMREAAFSLAEAKFXAG

SEQ ID NO: 3674 - protein, 192 aa, Homo sapiens
  MOD_RES (20)..(20): Selenocysteine
  MOD_RES (26)..(27): Selenocysteine
  MOD_RES (50)..(50): Selenocysteine
  MOD_RES (61)..(61): Selenocysteine
  MOD_RES (67)..(67): Selenocysteine
  MOD_RES (98)..(98): Selenocysteine
  MOD_RES (102)..(102): Selenocysteine
  MOD_RES (110)..(110): Selenocysteine
  MOD_RES (128)..(128): Selenocysteine
  MOD_RES (134)..(134): Selenocysteine
MLMGEVMREAAFSLAEAKFXAGDFSXXVIQNVNKAQVKIRAKKDNVAGVXLPVFEHYHEGXDSYELXGLARGGEQLAKLKRNYAKAVELLVELASLQXSFVXLDEAIKIXNRRVNAIEHVIIPRIERXLAYIIXELDEREREEFYRLKKIQEKKKILKEKSEKDLEQRRAAGEVLEPANLLAEEKDEDLLFE

SEQ ID NO: 3675 - protein, 72 aa, Homo sapiens
  MOD_RES (17)..(17): Selenocysteine
  MOD_RES (28)..(28): Selenocysteine
  MOD_RES (41)..(41): Selenocysteine
  MOD_RES (54)..(54): Selenocysteine
MSGKDRIEIFPSRMAQXIMKARLKGAQXGRNLLKKKSDALXLRFRQILKKIIEXKMLMGEVMREAAFSLAEA

SEQ ID NO: 3676 - protein, 86 aa, Homo sapiens
  MOD_RES (17)..(17): Selenocysteine
  MOD_RES (28)..(28): Selenocysteine
  MOD_RES (41)..(41): Selenocysteine
  MOD_RES (54)..(54): Selenocysteine
  MOD_RES (75)..(75): Selenocysteine
MSGKDRIEIFPSRMAQXIMKARLKGAQXGRNLLKKKSDALXLRFRQILKKIIEXKMLMGEVMREAAFSLAEAKFXAGDFRCYFASI

SEQ ID NO: 3677 - protein, 179 aa, Homo sapiens
  MOD_RES (17)..(17): Selenocysteine
  MOD_RES (28)..(28): Selenocysteine
  MOD_RES (41)..(41): Selenocysteine
  MOD_RES (54)..(54): Selenocysteine
  MOD_RES (75)..(75): Selenocysteine
  MOD_RES (81)..(82): Selenocysteine
  MOD_RES (105)..(105): Selenocysteine
  MOD_RES (116)..(116): Selenocysteine
  MOD_RES (122)..(122): Selenocysteine
MSGKDRIEIFPSRMAQXIMKARLKGAQXGRNLLKKKSDALXLRFRQILKKIIEXKMLMGEVMREAAFSLAEAKFXAGDFSXXVIQNVNKAQVKIRAKKDNVAGVXLPVFEHYHEGXDSYELXGLARGGEQLAKLKRNYAKAVELLVELASLQSSFPGLNVLLLISSQSWMRESEKSSIG

SEQ ID NO: 3678 - protein, 247 aa, Homo sapiens
  MOD_RES (17)..(17): Selenocysteine
  MOD_RES (28)..(28): Selenocysteine
  MOD_RES (41)..(41): Selenocysteine
  MOD_RES (54)..(54): Selenocysteine
  MOD_RES (75)..(75): Selenocysteine
  MOD_RES (81)..(82): Selenocysteine
  MOD_RES (105)..(105): Selenocysteine
  MOD_RES (116)..(116): Selenocysteine
  MOD_RES (122)..(122): Selenocysteine
  MOD_RES (153)..(153): Selenocysteine
  MOD_RES (157)..(157): Selenocysteine
  MOD_RES (165)..(165): Selenocysteine
  MOD_RES (183)..(183): Selenocysteine
  MOD_RES (189)..(189): Selenocysteine
MSGKDRIEIFPSRMAQXIMKARLKGAQXGRNLLKKKSDALXLRFRQILKKIIEXKMLMGEVMREAAFSLAEAKFXAGDFSXXVIQNVNKAQVKIRAKKDNVAGVXLPVFEHYHEGXDSYELXGLARGGEQLAKLKRNYAKAVELLVELASLQXSFVXLDEAIKIXNRRVNAIEHVIIPRIERXLAYIIXELDEREREEFYRLKKIQEKKKILKEKSEKDLEQRRAAGEVLEPANLLAEEKDEDLLFE

SEQ ID NO: 3679 - protein, 148 aa, Homo sapiens
  MOD_RES (17)..(17): Selenocysteine
  MOD_RES (28)..(28): Selenocysteine
  MOD_RES (41)..(41): Selenocysteine
  MOD_RES (54)..(54): Selenocysteine
  MOD_RES (58)..(58): Selenocysteine
  MOD_RES (66)..(66): Selenocysteine
  MOD_RES (84)..(84): Selenocysteine
  MOD_RES (90)..(90): Selenocysteine
MSGKDRIEIFPSRMAQXIMKARLKGAQXGRNLLKKKSDALXLRFRQILKKIIEXSFVXLDEAIKIXNRRVNAIEHVIIPRIERXLAYIIXELDEREREEFYRLKKIQEKKKILKEKSEKDLEQRRAAGEVLEPANLLAEEKDEDLLFE

SEQ ID NO: 3680 - protein, 153 aa, Homo sapiens
  MOD_RES (11)..(11): Selenocysteine
  MOD_RES (22)..(22): Selenocysteine
  MOD_RES (28)..(28): Selenocysteine
  MOD_RES (59)..(59): Selenocysteine
  MOD_RES (63)..(63): Selenocysteine
  MOD_RES (71)..(71): Selenocysteine
  MOD_RES (89)..(89): Selenocysteine
  MOD_RES (95)..(95): Selenocysteine
RAKKDNVAGVXLPVFEHYHEGXDSYELXGLARGGEQLAKLKRNYAKAVELLVELASLQXSFVXLDEAIKIXNRRVNAIEHVIIPRIERXLAYIIXELDEREREEFYRLKKIQEKKKILKEKSEKDLEQRRAAGEVLEPANLLAEEKDEDLLFE

SEQ ID NO: 3681 - protein, 44 aa, Homo sapiens
  MOD_RES (15)..(15): Selenocysteine
  MOD_RES (21)..(22): Selenocysteine
VMREAAFSLAEAKFXAGDFSXXVIQNVNKAQVKIRAKKDNVAAC

SEQ ID NO: 3682 - protein, 204 aa, Homo sapiens
  MOD_RES (26)..(26): Selenocysteine
  MOD_RES (70)..(70): Selenocysteine
  MOD_RES (87)..(88): Selenocysteine
  MOD_RES (137)..(137): Selenocysteine
  MOD_RES (173)..(173): Selenocysteine
MALSDADVQKQAEEEFNIEKGRLVQXQRLKIMEYYEKKEKQIEQQKKIQMSNLMNQARLKVLRARDDLIXDLLNEAKQRLSKVVKDXXRYQVLLDGLVLQGLYQLLEPRMIVRCRKQDFPLVKAAVQKAIPMYKIAXKNDVDVQIDQESYLPEDIAGGVEIYNGDRKIKVSNXLESRLDLIAQQMMPEVRGALFGANANRKFLD

SEQ ID NO: 3683 - protein, 226 aa, Homo sapiens
  MOD_RES (48)..(48): Selenocysteine
  MOD_RES (92)..(92): Selenocysteine
  MOD_RES (109)..(110): Selenocysteine
  MOD_RES (159)..(159): Selenocysteine
  MOD_RES (195)..(195): Selenocysteine
MALSDADVQKQIKHMMAFIEQEANEKAEEIDAKAEEEFNIEKGRLVQXQRLKIMEYYEKKEKQIEQQKKIQMSNLMNQARLKVLRARDDLIXDLLNEAKQRLSKVVKDXXRYQVLLDGLVLQGLYQLLEPRMIVRCRKQDFPLVKAAVQKAIPMYKIAXKNDVDVQIDQESYLPEDIAGGVEIYNGDRKIKVSNXLESRLDLIAQQMMPEVRGALFGANANRKFLD

SEQ ID NO: 3684 - protein, 196 aa, Homo sapiens
  MOD_RES (48)..(48): Selenocysteine
  MOD_RES (92)..(92): Selenocysteine
  MOD_RES (129)..(129): Selenocysteine
  MOD_RES (165)..(165): Selenocysteine
MALSDADVQKQIKHMMAFIEQEANEKAEEIDAKAEEEFNIEKGRLVQXQRLKIMEYYEKKEKQIEQQKKIQMSNLMNQARLKVLRARDDLIXGLYQLLEPRMIVRCRKQDFPLVKAAVQKAIPMYKIAXKNDVDVQIDQESYLPEDIAGGVEIYNGDRKIKVSNXLESRLDLIAQQMMPEVRGALFGANANRKFLD

SEQ ID NO: 3685 - protein, 203 aa, Homo sapiens
  MOD_RES (49)..(49): Selenocysteine
  MOD_RES (93)..(93): Selenocysteine
  MOD_RES (110)..(111): Selenocysteine
  MOD_RES (160)..(160): Selenocysteine
  MOD_RES (196)..(196): Selenocysteine
MQSRDGVSPCWPGWSQSLDLVIRLPRPPQVLGLQAEEEFNIEKGRLVQXQRLKIMEYYEKKEKQIEQQKKIQMSNLMNQARLKVLRARDDLIXDLLNEAKQRLSKVVKDXXRYQVLLDGLVLQGLYQLLEPRMIVRCRKQDFPLVKAAVQKAIPMYKIAXKNDVDVQIDQESYLPEDIAGGVEIYNGDRKIKVSNXLESRLDL

SEQ ID NO: 3686 - protein, 226 aa, Homo sapiens
  MOD_RES (48)..(48): Selenocysteine
  MOD_RES (74)..(74): Selenocysteine
  MOD_RES (157)..(157): Selenocysteine
  MOD_RES (195)..(195): Selenocysteine
  MOD_RES (220)..(220): Selenocysteine
MALSDVDVKKQIKHMMAFIEQEANEKAEEIDAKAEEEFNIEKGRLVQXQRLKIMEYYEKKEKQIEQQKKILMSXMRNQARLKVLRARNDLISDLLSEAKLRLSRIVEDPEVYQGLLDKLVLQGLLRLLEPVMIVRCRPQDLLLVEAAVQKAIPEYMXISQKHVEVQIDKEAYLAVNAAGGVEVYSGNQRIKVSNXLESRLDLSAKQKMPEIRMALFGANXNRKFFI

SEQ ID NO: 3687 - protein, 119 aa, Homo sapiens
  MOD_RES (16)..(16): Selenocysteine
  MOD_RES (18)..(18): Selenocysteine
  MOD_RES (43)..(44): Selenocysteine
  MOD_RES (51)..(51): Selenocysteine
  MOD_RES (114)..(114): Selenocysteine
MAGRGKLIAVIGDEDXVXGFLLGGIGELNKNRHPNFLVVEKDXXINEIEDXFRQFLNRDDIGIILINQYIAEMVRHALDAHQQSIPAVLEIPSKEHPYDAAKDSILRRARGMFXAEDLR

SEQ ID NO: 3688 - protein, 147 aa, Homo sapiens
  MOD_RES (16)..(16): Selenocysteine
  MOD_RES (18)..(18): Selenocysteine
  MOD_RES (43)..(44): Selenocysteine
  MOD_RES (51)..(51): Selenocysteine
  MOD_RES (142)..(142): Selenocysteine
MAGRGKLIAVIGDEDXVXGFLLGGIGELNKNRHPNFLVVEKDXXINEIEDXFRSLGSLPGSVVEANPNQRDPPLWDEIDSRQFLNRDDIGIILINQYIAEMVRHALDAHQQSIPAVLEIPSKEHPYDAAKDSILRRARGMFXAEDLR

SEQ ID NO: 3689 - protein, 118 aa, Homo sapiens
  MOD_RES (71)..(71): Selenocysteine
  MOD_RES (77)..(77): Selenocysteine
  MOD_RES (82)..(82): Selenocysteine
  MOD_RES (86)..(86): Selenocysteine
MASQSQGIQQLLQAEKRAAEKVSEARKRKNRRLKQAKEEAQAEIEQYRLQREKEFKAKEAAALGSRGSCSXEVEKEXQEKMXILQXYFRQNRDEVLDNLLAFVCDIRPEIHENYRING

SEQ ID NO: 3690 - protein, 158 aa, Homo sapiens
  MOD_RES (27)..(27): Selenocysteine
  MOD_RES (67)..(67): Selenocysteine
  MOD_RES (117)..(117): Selenocysteine
GGQQHAVPCPHGGPGGQGQPRAEAAGXGQGHRGGHRPGAVVGAAQHLHRGLGVAGGGPGPGPAVLQXRKARRLKQAKEEAQMEVEQYRREREHEFQSKQQAAMGSQGNLSAEVEQAXRRQVQGMQSSQQRNRERVLAQLLGMVCDVRPQVHPNYRISA

SEQ ID NO: 3691 - protein, 118 aa, Homo sapiens
  MOD_RES (77)..(77): Selenocysteine
MASQSQGIQQLLQAEKRAAEKVADARKRKARRLKQAKEEAQMEVEQYRREREHEFQSKQQAAMGSQGNLSAEVEQAXRRQVQGMQSSQQRNRERVLAQLLGMVCDVRPQVHPNYRISA

SEQ ID NO: 3692 - protein, 78 aa, Homo sapiens
  MOD_RES (37)..(37): Selenocysteine
MASQSQGIQQLLQAEKRAAEKVADARKRKARRLKQAXRRQVQGMQSSQQRNRERVLAQLLGMVCDVRPQVHPNYRISA

SEQ ID NO: 3693 - protein, 77 aa, Homo sapiens
  MOD_RES (36)..(36): Selenocysteine
MEVEQYRREREHEFQSKQQAAMGSQGNLSAEVEQAXRRQVQGMQSSQQRNRERVLAQLLGMVCDVRPQVHPNYRISA

SEQ ID NO: 3694 - protein, 59 aa, Homo sapiens
  MOD_RES (2)..(2): Selenocysteine
MXSQSQGIHQLLQAEKRAKDKLEEAKKILHLLFLKRRDWDCFWKRKAIEASQGGSNGRN

SEQ ID NO: 3695 - protein, 124 aa, Homo sapiens
  MOD_RES (2)..(2): Selenocysteine
  MOD_RES (29)..(29): Selenocysteine
  MOD_RES (31)..(31): Selenocysteine
  MOD_RES (83)..(83): Selenocysteine
  MOD_RES (123)..(123): Selenocysteine
MXSQSQGIHQLLQAEKRAKDKLEEAKKKXGXASGKGKRLKQAKEEAMVEIDQYRMQRDKEFRLKQSKIMGSQNNLSDEIEEQXLGKIQELNGHYNKYMESVMNQLLSMVCDMKPEIHVNYRAXN

SEQ ID NO: 3696 - protein, 118 aa, Homo sapiens
  MOD_RES (2)..(2): Selenocysteine
  MOD_RES (77)..(77): Selenocysteine
  MOD_RES (117)..(117): Selenocysteine
MXSQSQGIHQLLQAEKRAKDKLEEAKKRKGKRLKQAKEEAMVEIDQYRMQRDKEFRLKQSKIMGSQNNLSDEIEEQXLGKIQELNGHYNKYMESVMNQLLSMVCDMKPEIHVNYRAXN

SEQ ID NO: 3697 - protein, 86 aa, Homo sapiens
  MOD_RES (10)..(10): Selenocysteine
  MOD_RES (26)..(26): Selenocysteine
  MOD_RES (59)..(59): Selenocysteine
  MOD_RES (75)..(75): Selenocysteine
  MOD_RES (77)..(77): Selenocysteine
FDYARCSKNXAWPYFLPMLNRQDPFXVHMAARIIAKLAAWGKELMEGSDLNYYFNWIKXQLSSQKLRGSGVAVEXGXVSSSDHSIQ

SEQ ID NO: 3698 - protein, 443 aa, Homo sapiens
  MOD_RES (28)..(28): Selenocysteine
  MOD_RES (36)..(36): Selenocysteine
  MOD_RES (42)..(42): Selenocysteine
  MOD_RES (49)..(49): Selenocysteine
  MOD_RES (55)..(55): Selenocysteine
  MOD_RES (81)..(81): Selenocysteine
  MOD_RES (97)..(97): Selenocysteine
  MOD_RES (130)..(130): Selenocysteine
  MOD_RES (146)..(146): Selenocysteine
  MOD_RES (148)..(148): Selenocysteine
  MOD_RES (242)..(242): Selenocysteine
  MOD_RES (257)..(257): Selenocysteine
  MOD_RES (261)..(261): Selenocysteine
  MOD_RES (355)..(355): Selenocysteine
  MOD_RES (438)..(438): Selenocysteine
MISAEDCEFIQRFEMKRSPEEKQEMLQXEGSQCAKXFINLMXHICKEQXVQYILXMVDDMLQENHQRVSIFFDYARCSKNXAWPYFLPMLNRQDPFXVHMAARIIAKLAAWGKELMEGSDLNYYFNWIKXQLSSQKLRGSGVAVEXGXVSSSDSSQYVQCVAGCLQLMLRVNEYRFAWVEADGVNCIMGVLSNKCGFQLQYQMIFSIWLLAFSPQMCEHLRRYNIIPVLSDILQESVKEKVXRIILAAFRNFLEKSXEREXRQEYALAMIQCKVLKQLENLEQQKYDDEDISEDIKFLLEKLGESVQDLSSFDEYSSELKSGRLEWSPVHKSEKFWRENAVRLNEKNYELLKILXKLLEVSDDPQVLAVAAHDVGEYVRHYPRGKRVIEQLGGKQLVMNHMHHEDQQVRYNALLAVQKLMVHNWEYLGKQLQSEQPQXAAARS

SEQ ID NO: 3699 - protein, 101 aa, Homo sapiens
  MOD_RES (2)..(2): Selenocysteine
  MOD_RES (16)..(16): Selenocysteine
  MOD_RES (68)..(68): Selenocysteine
  MOD_RES (76)..(76): Selenocysteine
  MOD_RES (82)..(82): Selenocysteine
  MOD_RES (89)..(89): Selenocysteine
  MOD_RES (95)..(95): Selenocysteine
MXKMDIRGAVDAAVPXNIIAAKAAEVRANKVNWQSYLQGQMISAEDCEFIQRFEMKRSPEEKQEMLQXEGSQCAKXFINLMXHICKEQXVQYILXMVDDML

SEQ ID NO: 3700 - protein, 102 aa, Homo sapiens
  MOD_RES (2)..(2): Selenocysteine
  MOD_RES (16)..(16): Selenocysteine
  MOD_RES (68)..(68): Selenocysteine
  MOD_RES (76)..(76): Selenocysteine
  MOD_RES (82)..(82): Selenocysteine
  MOD_RES (89)..(89): Selenocysteine
  MOD_RES (95)..(95): Selenocysteine
MXKMDIRGAVDAAVPXNIIAAKAAEVRANKVNWQSYLQGQMISAEDCEFIQRFEMKRSPEEKQEMLQXEGSQCAKXFINLMXHICKEQXVQYILXMVDDMLQ

SEQ ID NO: 3701 - protein, 483 aa, Homo sapiens
  MOD_RES (2)..(2): Selenocysteine
  MOD_RES (16)..(16): Selenocysteine
  MOD_RES (68)..(68): Selenocysteine
  MOD_RES (76)..(76): Selenocysteine
  MOD_RES (82)..(82): Selenocysteine
  MOD_RES (89)..(89): Selenocysteine
  MOD_RES (95)..(95): Selenocysteine
  MOD_RES (121)..(121): Selenocysteine
  MOD_RES (137)..(137): Selenocysteine
  MOD_RES (170)..(170): Selenocysteine
  MOD_RES (186)..(186): Selenocysteine
  MOD_RES (188)..(188): Selenocysteine
  MOD_RES (282)..(282): Selenocysteine
  MOD_RES (297)..(297): Selenocysteine
  MOD_RES (301)..(301): Selenocysteine
  MOD_RES (395)..(395): Selenocysteine
  MOD_RES (478)..(478): Selenocysteine
MXKMDIRGAVDAAVPXNIIAAKAAEVRANKVNWQSYLQGQMISAEDCEFIQRFEMKRSPEEKQEMLQXEGSQCAKXFINLMXHICKEQXVQYILXMVDDMLQENHQRVSIFFDYARCSKNXAWPYFLPMLNRQDPFXVHMAARIIAKLAAWGKELMEGSDLNYYFNWIKXQLSSQKLRGSGVAVEXGXVSSSDSSQYVQCVAGCLQLMLRVNEYRFAWVEADGVNCIMGVLSNKCGFQLQYQMIFSIWLLAFSPQMCEHLRRYNIIPVLSDILQESVKEKVXRIILAAFRNFLEKSXEREXRQEYALAMIQCKVLKQLENLEQQKYDDEDISEDIKFLLEKLGESVQDLSSFDEYSSELKSGRLEWSPVHKSEKFWRENAVRLNEKNYELLKILXKLLEVSDDPQVLAVAAHDVGEYVRHYPRGKRVIEQLGGKQLVMNHMHHEDQQVRYNALLAVQKLMVHNWEYLGKQLQSEQPQXAAARS

SEQ ID NO: 3702 - protein, 465 aa, Homo sapiens
  MOD_RES (2)..(2): Selenocysteine
  MOD_RES (16)..(16): Selenocysteine
  MOD_RES (68)..(68): Selenocysteine
  MOD_RES (76)..(76): Selenocysteine
  MOD_RES (82)..(82): Selenocysteine
  MOD_RES (89)..(89): Selenocysteine
  MOD_RES (95)..(95): Selenocysteine
  MOD_RES (121)..(121): Selenocysteine
  MOD_RES (137)..(137): Selenocysteine
  MOD_RES (170)..(170): Selenocysteine
  MOD_RES (264)..(264): Selenocysteine
  MOD_RES (279)..(279): Selenocysteine
  MOD_RES (283)..(283): Selenocysteine
  MOD_RES (377)..(377): Selenocysteine
  MOD_RES (460)..(460): Selenocysteine
MXKMDIRGAVDAAVPXNIIAAKAAEVRANKVNWQSYLQGQMISAEDCEFIQRFEMKRSPEEKQEMLQXEGSQCAKXFINLMXHICKEQXVQYILXMVDDMLQENHQRVSIFFDYARCSKNXAWPYFLPMLNRQDPFXVHMAARIIAKLAAWGKELMEGSDLNYYFNWIKXQLSSQSSQYVQCVAGCLQLMLRVNEYRFAWVEADGVNCIMGVLSNKCGFQLQYQMIFSIWLLAFSPQMCEHLRRYNIIPVLSDILQESVKEKVXRIILAAFRNFLEKSXEREXRQEYALAMIQCKVLKQLENLEQQKYDDEDISEDIKFLLEKLGESVQDLSSFDEYSSELKSGRLEWSPVHKSEKFWRENAVRLNEKNYELLKILXKLLEVSDDPQVLAVAAHDVGEYVRHYPRGKRVIEQLGGKQLVMNHMHHEDQQVRYNALLAVQKLMVHNWEYLGKQLQSEQPQXAAARS

SEQ ID NO: 3703 - protein, 48 aa, Homo sapiens
  MOD_RES (2)..(2): Selenocysteine
  MOD_RES (16)..(16): Selenocysteine
MXKMDIRGAVDAAVPXNIIAAKAAEVRANKVNWQSYLQGQMISAEDFC

SEQ ID NO: 3704 - protein, 48 aa, Homo sapiens
  MOD_RES (2)..(2): Selenocysteine
  MOD_RES (16)..(16): Selenocysteine
MXKMDIRGAVDAAVPXNIIAAKAAEVRANKVNWQSYLQGQMISAEDLC

SEQ ID NO: 3705 - protein, 36 aa, Homo sapiens
  MOD_RES (2)..(2): Selenocysteine
  MOD_RES (16)..(16): Selenocysteine
MXKMDIRGAVDAAVPXNIIAAKRCFKLKAASVLKHL

SEQ ID NO: 3706 - protein, 60 aa, Homo sapiens
  MOD_RES (4)..(4): Selenocysteine
  MOD_RES (10)..(10): Selenocysteine
  MOD_RES (19)..(19): Selenocysteine
MAVXALAARXWLGVWGVRXMQARGFGSDQSENVDRGAGSIREAGGAFGKREQAEEERYFR

SEQ ID NO: 3707 - protein, 75 aa, Homo sapiens
  MOD_RES (4)..(4): Selenocysteine
  MOD_RES (10)..(10): Selenocysteine
  MOD_RES (19)..(19): Selenocysteine
  MOD_RES (65)..(65): Selenocysteine
MAVXALAARXWLGVWGVRXMQARGFGSDQSENVDRGAGSIREAGGAFGKREQAEEERYFRALGAXFCFFAVEAVV

SEQ ID NO: 3708 - protein, 106 aa, Homo sapiens
  MOD_RES (4)..(4): Selenocysteine
  MOD_RES (10)..(10): Selenocysteine
  MOD_RES (19)..(19): Selenocysteine
MAVXALAARXWLGVWGVRXMQARGFGSDQSENVDRGAGSIREAGGAFGKREQAEEERYFRAQSREQLAALKKHHEEEIVHHKKEIERLQKEIERHKQKIKMLKHDD

SEQ ID NO: 3709 - protein, 71 aa, Homo sapiens
  MOD_RES (4)..(4): Selenocysteine
  MOD_RES (10)..(10): Selenocysteine
  MOD_RES (19)..(19): Selenocysteine
MAVXALAARXWLGVWGVRXMQARGFGSDQSENVDRGAGSIREAGGAFGKREQAEEERYFRHYRLCFEISLG

SEQ ID NO: 3710 - protein, 39 aa, Homo sapiens
  MOD_RES (6)..(6): Selenocysteine
APLNEXGEVVNEKVSRRWQVLQIHLSNVKFVLQRVLPLI

SEQ ID NO: 3711 - protein, 80 aa, Homo sapiens
  MOD_RES (12)..(12): Selenocysteine
  MOD_RES (23)..(23): Selenocysteine
  MOD_RES (40)..(40): Selenocysteine
  MOD_RES (64)..(64): Selenocysteine
HNMVNGMGPMGXEGLFRRACEVXMRLMRDQREPLMSVLKXFLHDPLVEWSKPVKGHSKAPLNEXGEVVNEKMASSSNSFK

SEQ ID NO: 3712 - protein, 2644 aa, Homo sapiens
  MOD_RES (22)..(22): Selenocysteine
  MOD_RES (28)..(28): Selenocysteine
  MOD_RES (46)..(46): Selenocysteine
  MOD_RES (59)..(59): Selenocysteine
  MOD_RES (64)..(64): Selenocysteine
  MOD_RES (105)..(105): Selenocysteine
  MOD_RES (113)..(113): Selenocysteine
  MOD_RES (146)..(146): Selenocysteine
  MOD_RES (208)..(208): Selenocysteine
  MOD_RES (214)..(214): Selenocysteine
  MOD_RES (253)..(253): Selenocysteine
  MOD_RES (268)..(268): Selenocysteine
  MOD_RES (285)..(285): Selenocysteine
  MOD_RES (301)..(301): Selenocysteine
  MOD_RES (415)..(415): Selenocysteine
  MOD_RES (448)..(448): Selenocysteine
  MOD_RES (500)..(500): Selenocysteine
  MOD_RES (504)..(504): Selenocysteine
  MOD_RES (516)..(516): Selenocysteine
  MOD_RES (533)..(533): Selenocysteine
  MOD_RES (541)..(541): Selenocysteine
  MOD_RES (562)..(562): Selenocysteine
  MOD_RES (611)..(612): Selenocysteine
  MOD_RES (619)..(619): Selenocysteine
  MOD_RES (641)..(641): Selenocysteine
  MOD_RES (653)..(653): Selenocysteine
  MOD_RES (717)..(717): Selenocysteine
  MOD_RES (725)..(725): Selenocysteine
  MOD_RES (729)..(729): Selenocysteine
  MOD_RES (748)..(748): Selenocysteine
  MOD_RES (800)..(800): Selenocysteine
  MOD_RES (808)..(808): Selenocysteine
  MOD_RES (855)..(855): Selenocysteine
  MOD_RES (868)..(868): Selenocysteine
  MOD_RES (872)..(873): Selenocysteine
  MOD_RES (909)..(909): Selenocysteine
  MOD_RES (947)..(947): Selenocysteine
  MOD_RES (952)..(952): Selenocysteine
  MOD_RES (974)..(974): Selenocysteine
  MOD_RES (992)..(992): Selenocysteine
  MOD_RES (994)..(994): Selenocysteine
  MOD_RES (1016)..(1016): Selenocysteine
  MOD_RES (1060)..(1060): Selenocysteine
  MOD_RES (1176)..(1177): Selenocysteine
  MOD_RES (1180)..(1180): Selenocysteine
  MOD_RES (1230)..(1230): Selenocysteine
  MOD_RES (1275)..(1275): Selenocysteine
  MOD_RES (1279)..(1279): Selenocysteine
  MOD_RES (1283)..(1284): Selenocysteine
  MOD_RES (1305)..(1305): Selenocysteine
  MOD_RES (1310)..(1310): Selenocysteine
  MOD_RES (1323)..(1323): Selenocysteine
  MOD_RES (1327)..(1327): Selenocysteine
  MOD_RES (1337)..(1337): Selenocysteine
  MOD_RES (1373)..(1374): Selenocysteine
  MOD_RES (1376)..(1376): Selenocysteine
  MOD_RES (1382)..(1382): Selenocysteine
  MOD_RES (1385)..(1385): Selenocysteine
  MOD_RES (1401)..(1401): Selenocysteine
  MOD_RES (1435)..(1435): Selenocysteine
  MOD_RES (1460)..(1460): Selenocysteine
  MOD_RES (1469)..(1469): Selenocysteine
  MOD_RES (1500)..(1500): Selenocysteine
  MOD_RES (1512)..(1512): Selenocysteine
  MOD_RES (1525)..(1525): Selenocysteine
  MOD_RES (1563)..(1563): Selenocysteine
  MOD_RES (1566)..(1566): Selenocysteine
  MOD_RES (1578)..(1578): Selenocysteine
  MOD_RES (1580)..(1580): Selenocysteine
  MOD_RES (1589)..(1589): Selenocysteine
  MOD_RES (1620)..(1620): Selenocysteine
  MOD_RES (1630)..(1630): Selenocysteine
  MOD_RES (1640)..(1640): Selenocysteine
  MOD_RES (1652)..(1652): Selenocysteine
  MOD_RES (1663)..(1663): Selenocysteine
  MOD_RES (1719)..(1719): Selenocysteine
  MOD_RES (1751)..(1751): Selenocysteine
  MOD_RES (1754)..(1754): Selenocysteine
  MOD_RES (1767)..(1767): Selenocysteine
  MOD_RES (1772)..(1772): Selenocysteine
  MOD_RES (1798)..(1799): Selenocysteine
  MOD_RES (1817)..(1817): Selenocysteine
  MOD_RES (1890)..(1890): Selenocysteine
  MOD_RES (1939)..(1939): Selenocysteine
  MOD_RES (1989)..(1989): Selenocysteine
  MOD_RES (2013)..(2013): Selenocysteine
  MOD_RES (2029)..(2029): Selenocysteine
  MOD_RES (2054)..(2054): Selenocysteine
  MOD_RES (2092)..(2092): Selenocysteine
  MOD_RES (2099)..(2099): Selenocysteine
  MOD_RES (2127)..(2127): Selenocysteine
  MOD_RES (2130)..(2130): Selenocysteine
  MOD_RES (2140)..(2140): Selenocysteine
  MOD_RES (2180)..(2180): Selenocysteine
  MOD_RES (2216)..(2216): Selenocysteine
  MOD_RES (2219)..(2219): Selenocysteine
  MOD_RES (2236)..(2236): Selenocysteine
  MOD_RES (2241)..(2241): Selenocysteine
  MOD_RES (2254)..(2254): Selenocysteine
  MOD_RES (2269)..(2269): Selenocysteine
  MOD_RES (2276)..(2276): Selenocysteine
  MOD_RES (2364)..(2364): Selenocysteine
  MOD_RES (2383)..(2383): Selenocysteine
  MOD_RES (2391)..(2391): Selenocysteine
  MOD_RES (2402)..(2402): Selenocysteine
  MOD_RES (2443)..(2443): Selenocysteine
  MOD_RES (2448)..(2448): Selenocysteine
  MOD_RES (2461)..(2461): Selenocysteine
  MOD_RES (2487)..(2487): Selenocysteine
  MOD_RES (2504)..(2504): Selenocysteine
  MOD_RES (2516)..(2516): Selenocysteine
  MOD_RES (2528)..(2528): Selenocysteine
  MOD_RES (2539)..(2539): Selenocysteine
  MOD_RES (2556)..(2556): Selenocysteine
  MOD_RES (2580)..(2580): Selenocysteine
  MOD_RES (2590)..(2590): Selenocysteine
  MOD_RES (2605)..(2605): Selenocysteine
  MOD_RES (2610)..(2610): Selenocysteine
  MOD_RES (2628)..(2628): Selenocysteine
  MOD_RES (2641)..(2641): Selenocysteine
MGEHGLELASMIPALRELGSAXPEEYNXVVQKPRQILCQFIDRILXDVNVVAVELVKKXDSQPXSVMLLDFIQHIMKSSPLMFVNVSGSHEAKGSCIEFSNWIIXRLLRIAAXPSCHLLHKKICEVICSLLFLFKSKSPAIFGVLXKELLQLFEDLVYLHRRNVMGHAVEWPVVMSRFLSQLDEHMGYLQSAPLQLMSMQNLEFIEVXLLMVLXRIIAIVFFRRQELLLWQIGCVLLEYGSPKIKSLAISFLXELFQLGGLPAQPASXFFSSFLELLKHLVEMDXDQLKLYEEPLSKLIKXLFPFEAEAYRNIEPVYLNMLLEKLCVMFEDGVLMRLKSDLLKAALCHLLQYFLKFVPAGYESALQVRKVYVRNICKALLDVLGIEVDAEYLLGPLYAALKMESMEIIEEIQCQXQQENLSSNSDGISPKRRRLSSSLNPSKRAPKQXEEIKHVDMNQKSILWSALKQKAESLQISLEYSGLKNPVIEMLEGIAVVLQLXALCXVHCSHQNMNCRXFKDCQHKSKKKPSVVIXWMSLDFYXKVLKSCRSLLESVQKLDLEAXIDKVVKIYDALIYMQVNSSFEDHILEDLCGMLSLPWIYSHSDDGCLKLXXFAANLLXLSCRISDSYSPQAQSRCVFLLXLFPRRIFLEWRXAVYNWALQSSHEVIRASCVSGFFILLQQQNSCNRVPKILIDKVKDDSDIVKKEFASILGQLVCXLHGMFYLXSSLXEPFSEHGHVDLFCRNLKAXSQHECSSSQLKASVCKPFLFLLKKKIPSPVKLAFIDNLHHLCKHLDFREDEXDVKAVLGXLLNLMEDPDKDVRVAFSGNIKHILESLDSEDGFIKELFVLRMKEAYXHAQISRNNELKDXLILXXGDIGRAAKGDLVPFALLHLLHCLLSKSASVSGAAYXEIRALVAAKSVKLQSFFSQYKKPICQFLVESLHSSQMXALPNXPCQNADVRKQDVAHQREMALNXLSEIANVFDFPDLNRFLXRXLQVLLPDLAAKASPAASALIRXLGKQLNVNRREILINNFKYIFSHLVCSCSKDELERALHYLKNEXEIELGSLLRQDFQGLHNELLLRIGEHYQQVFNGLSILASFASSDDPYQGPRDIISPELMADYLQPKLLGILAFFNMQLLSSSVGIEDKKMALNSLMSLMKLMGPKHVSSVRVKMMXXLRXGLRFKDDFPELCCRAWDCFVRCLDHACLGSLLSHVIVALLPLIHIQPKEXAAIFHYLIIENRDAVQDFLHEIYFLPDHPELKKIKAVLQEYRKEXSESXDLQXXLQLSMKAIQHENVDVRIHALXSLKEXLYKNQEKLIKYAXDSEXVEPIISQLVXVLLKGCQDANSQARLLCGECLGELGAIDPGRLDFSXXEXQGKDFXFVXGVEDSSFAYGLLMELXRAYLAYADNSRAQDSAAYAIQELLSIYDCREMEXNGPGHQLWRRFPEHVREILEPHLNXRYKSSQKSXDWSGVKKPIYLSKLGSNFAEWSASWAGYLIXKVRHDLASKIFXCCSIMMKHDFKVXIYLLPHILVYVLLGCNQEDQQEVYAEIMAVLKHDDQHXINXQDIASDLCQLSXQXVFSMLDHLXQWARHKFQALKAEKCPHSKSNRNKVDSMVSXVDYEDYQSVXRFLDLIPQDXLAVASFRSKAYXRAVMHFESFIXEKKQNIQEHLGFLQKLYAAMHEPDGVAGVSAIRKAEPSLKEQILEHESLGLLRDAXACYDRAIQLEPDQIIHYHGVVKSMLGLGQLSXVIXQVNGVHANRSEWXDELNXYRVEAAWKLSQWDLVENYLAADGKSXXWSVRLGQLLLSAKKRDIXAFYDSLKLVRAEQIVPLSAASFERGSYQRGYEYIVRLHMLCELEHSIKPLFQHSPGDSSQEDSLNWVARLEMXQNSYRAKEPILALRRALLSLNKRPDYNEMVGECWLQSARVARKAGHHQXAYNALLNAGESRLAELYVERAKWLWSKGDVHQALIVLQKGVELCFPENEXPPEGKNMLIHGRAMLLVGRFMEEXANFESNAIMKKYKDVXACLPEWEDGHFYLAKYYDKLMPMVXDNKMEKQGDLIRYIVLHFGRSLQYGNQFIYQSMPRMLXLWLDYGXKAYEWEKAGRSDRVQMRNDLGKINKVIXEHXNYLAPYQFLXAFSQLISRICHSHDEVFVVLMEIIAKVFLAYPQQAMWMMXAVSKSSYPMRVNRCKEILNKAIHMKKSLEKFVGDAXRLXDKLLELCNKPVDGSSSXLSMSXHFKMLKKLVEEAXFSEILIPLQSVMIPXLPSILGXHANHASHEPFPGHWAYIAGFDDMVEILASLQKPKKISLKGSDGKFYIMMCKPKDDLRKDCRLMEFNSLINKCLRKDAESRRRELHIRXYAVIPLNDECGIIEWVNNXAGLRPILXKLYKEKGVYMXGKELRQCMLPKSAALSEKLKVFREFLLPRHPPIFHEWFLRXFPDPXSWYSSRSAYCRSXAVMSMVGYILGLGDRHGENILFDSLXGECVHVDFNCLFNKGEXFEVPEIVPFRLXHNMVNGMGPMGXEGLFRRACEVXMRLMRDQREPLMSVLKXFLHDPLVEWSKPVKGHSKAPLNEXGEVVNEKAKXHVLDIEQRLQGVIKXRNRVXGLPLSIEGHVHYLIQEAXDENLLCQMYLGWXPYM

SEQ ID NO: 3713 - protein, 100 aa, Homo sapiens
  MOD_RES (22)..(22): Selenocysteine
  MOD_RES (28)..(28): Selenocysteine
  MOD_RES (46)..(46): Selenocysteine
  MOD_RES (59)..(59): Selenocysteine
  MOD_RES (64)..(64): Selenocysteine
MGEHGLELASMIPALRELGSAXPEEYNXVVQKPRQILCQFIDRILXDVNVVAVELVKKXDSQPXSVMLLDFIQHIMKSSPLMFVNVSGSHEAKGSCIVFP

SEQ ID NO: 3714 - protein, 309 aa, Homo sapiens
  MOD_RES (96)..(96): Selenocysteine
  MOD_RES (129)..(129): Selenocysteine
  MOD_RES (133)..(133): Selenocysteine
  MOD_RES (150)..(150): Selenocysteine
  MOD_RES (158)..(158): Selenocysteine
  MOD_RES (179)..(179): Selenocysteine
  MOD_RES (228)..(229): Selenocysteine
  MOD_RES (236)..(236): Selenocysteine
  MOD_RES (258)..(258): Selenocysteine
  MOD_RES (270)..(270): Selenocysteine
MLLEKLCVMFEDGVLMRLKSDLLKAALCHLLQYFLKFVPAGYESALQVRKVYVRNICKALLDVLGIEVDAEYLLGPLYAALKMESMEIIEEIQCQXQQENLSSNSDGISPKRRRLSSSLNPSKRAPKQXEDRXFKDCQHKSKKKPSVVIXWMSLDFYXKVLKSCRSLLESVQKLDLEAXIDKVVKIYDALIYMQVNSSFEDHILEDLCGMLSLPWIYSHSDDGCLKLXXFAANLLXLSCRISDSYSPQAQSRCVFLLXLFPRRIFLEWRXAVYNWALQSSHEVIRASCVSGFFILLQQQNSCNRVPKIL

SEQ ID NO: 3715 - protein, 457 aa, Homo sapiens
  MOD_RES (1)..(1): Any amino acid
  MOD_RES (27)..(27): Selenocysteine
  MOD_RES (63)..(63): Selenocysteine
  MOD_RES (66)..(66): Selenocysteine
  MOD_RES (83)..(83): Selenocysteine
  MOD_RES (88)..(88): Selenocysteine
  MOD_RES (101)..(101): Selenocysteine
  MOD_RES (116)..(116): Selenocysteine
  MOD_RES (123)..(123): Selenocysteine
  MOD_RES (211)..(211): Selenocysteine
  MOD_RES (230)..(230): Selenocysteine
  MOD_RES (238)..(238): Selenocysteine
  MOD_RES (249)..(249): Selenocysteine
  MOD_RES (290)..(290): Selenocysteine
  MOD_RES (295)..(295): Selenocysteine
  MOD_RES (308)..(308): Selenocysteine
  MOD_RES (334)..(334): Selenocysteine
  MOD_RES (351)..(351): Selenocysteine
  MOD_RES (363)..(363): Selenocysteine
  MOD_RES (375)..(375): Selenocysteine
  MOD_RES (386)..(386): Selenocysteine
  MOD_RES (403)..(403): Selenocysteine
  MOD_RES (427)..(427): Selenocysteine
  MOD_RES (450)..(450): Selenocysteine
XEVFVVLMEIIAKVFLAYPQQAMWMMXAVSKSSYPMRVNRCKEILNKAIHMKKSLEKFVGDAXRLXDKLLELCNKPVDGSSSXLSMSXHFKMLKKLVEEAXFSEILIPLQSVMIPXLPSILGXHANHASHEPFPGHWAYIAGFDDMVEILASLQKPKKISLKGSDGKFYIMMCKPKDDLRKDCRLMEFNSLINKCLRKDAESRRRELHIRXYAVIPLNDECGIIEWVNNXAGLRPILXKLYKEKGVYMXGKELRQCMLPKSAALSEKLKVFREFLLPRHPPIFHEWFLRXFPDPXSWYSSRSAYCRSXAVMSMVGYILGLGDRHGENILFDSLXGECVHVDFNCLFNKGEXFEVPEIVPFRLXHNMVNGMGPMGXEGLFRRACEVXMRLMRDQREPLMSVLKXFLHDPLVEWSKPVKGHSKAPLNEXGEVVNEKVSRRYSLIWAVVLISXNELDMQL

SEQ ID NO: 3716 - protein, 764 aa, Homo sapiens
  MOD_RES (4)..(4): Selenocysteine
  MOD_RES (26)..(26): Selenocysteine
  MOD_RES (56)..(56): Selenocysteine
  MOD_RES (65)..(65): Selenocysteine
  MOD_RES (105)..(105): Selenocysteine
  MOD_RES (152)..(152): Selenocysteine
  MOD_RES (171)..(171): Selenocysteine
  MOD_RES (204)..(204): Selenocysteine
  MOD_RES (208)..(208): Selenocysteine
  MOD_RES (245)..(245): Selenocysteine
  MOD_RES (249)..(249): Selenocysteine
  MOD_RES (265)..(265): Selenocysteine
  MOD_RES (307)..(307): Selenocysteine
  MOD_RES (343)..(343): Selenocysteine
  MOD_RES (353)..(353): Selenocysteine
  MOD_RES (362)..(363): Selenocysteine
  MOD_RES (384)..(384): Selenocysteine
  MOD_RES (451)..(451): Selenocysteine
  MOD_RES (462)..(462): Selenocysteine
  MOD_RES (477)..(477): Selenocysteine
  MOD_RES (523)..(523): Selenocysteine
  MOD_RES (553)..(553): Selenocysteine
  MOD_RES (562)..(562): Selenocysteine
  MOD_RES (575)..(575): Selenocysteine
  MOD_RES (598)..(598): Selenocysteine
  MOD_RES (640)..(640): Selenocysteine
  MOD_RES (650)..(650): Selenocysteine
  MOD_RES (664)..(664): Selenocysteine
  MOD_RES (673)..(673): Selenocysteine
  MOD_RES (683)..(683): Selenocysteine
  MOD_RES (689)..(689): Selenocysteine
  MOD_RES (696)..(696): Selenocysteine
  MOD_RES (739)..(739): Selenocysteine
  MOD_RES (754)..(754): Selenocysteine
MAGXSAPGSKRRSEPPAPRPGPPPGXGHPPSKRARGFSAAAAPDPDDPFGAHGDFXADDLEELDXLASQALSQCPAAARDVSSDHKVHRLLDGMSKNPSGKNREXVPIKDNFELEVLQAQYKELKEKMKVMEEEVLIKNGEIKILRDSLHQXESVLEEQRRSHFLLEQEKXQALSDKEKEFSKKLQSLQSELQFKDAEMNELRXKLQXSERANKLAAPSVSHVSPRKNPSVVIKPEACSPQFGKXSFPXKESFSANMSLPHPCQXESGYKPLVGREDSKPHSLRGDSIKQEEAQKSFVDSWRQRSNXQGSILINLLLKQPLIPGSSLSLCHLLSSSSESPAGXPLQPPGFGSXLAGMSGLRXXGSYDGSFSLSALREAQNLAFXGLNLVARNECSRDGDPAEGGRRAFPLCQLPGAVHFLPLVQFFIGLHCQALQDLAAAKRSGAPGDSPXHSSCVSSGVEXNPEDSVCILEGFSVXALSILQHLVCHSGAVVSLLLSGVGADSAAGEGNRSLVHRLSDGDMXSALRGVADDQGQHPLLKMLLHLLAFSSAAXGHLQASVLXQCLKVLVKLAENXSCDFLPRFQCVFQVLPKCLSPEXPLPSVLLAVELLSLLADHDQLAPQLCSHSEGCLLLLLYMYIXSRPDRVALEXQWLQLEQEVVRALXVMLHRQWLXVRRAGGPPRXDQQRRXVRCLRDXVLLLHGLSQKDKLFMMHCVEVLHQFDQVMPGVSMLIRGLPDVXDCEEAALDDLCAAEXDVEDPEVECG

SEQ ID NO: 3717 - protein, 791 aa, Homo sapiens
  MOD_RES (4)..(4): Selenocysteine
  MOD_RES (26)..(26): Selenocysteine
  MOD_RES (56)..(56): Selenocysteine
  MOD_RES (65)..(65): Selenocysteine
  MOD_RES (105)..(105): Selenocysteine
  MOD_RES (152)..(152): Selenocysteine
  MOD_RES (171)..(171): Selenocysteine
  MOD_RES (204)..(204): Selenocysteine
  MOD_RES (208)..(208): Selenocysteine
  MOD_RES (245)..(245): Selenocysteine
  MOD_RES (249)..(249): Selenocysteine
  MOD_RES (265)..(265): Selenocysteine
  MOD_RES (307)..(307): Selenocysteine
  MOD_RES (343)..(343): Selenocysteine
  MOD_RES (353)..(353): Selenocysteine
  MOD_RES (362)..(363): Selenocysteine
  MOD_RES (384)..(384): Selenocysteine
  MOD_RES (451)..(451): Selenocysteine
  MOD_RES (462)..(462): Selenocysteine
  MOD_RES (477)..(477): Selenocysteine
  MOD_RES (523)..(523): Selenocysteine
  MOD_RES (553)..(553): Selenocysteine
  MOD_RES (562)..(562): Selenocysteine
  MOD_RES (575)..(575): Selenocysteine
  MOD_RES (598)..(598): Selenocysteine
  MOD_RES (640)..(640): Selenocysteine
  MOD_RES (650)..(650): Selenocysteine
  MOD_RES (676)..(676): Selenocysteine
  MOD_RES (691)..(691): Selenocysteine
  MOD_RES (700)..(700): Selenocysteine
  MOD_RES (710)..(710): Selenocysteine
  MOD_RES (716)..(716): Selenocysteine
  MOD_RES (723)..(723): Selenocysteine
  MOD_RES (766)..(766): Selenocysteine
  MOD_RES (781)..(781): Selenocysteine
MAGXSAPGSKRRSEPPAPRPGPPPGXGHPPSKRARGFSAAAAPDPDDPFGAHGDFXADDLEELDXLASQALSQCPAAARDVSSDHKVHRLLDGMSKNPSGKNREXVPIKDNFELEVLQAQYKELKEKMKVMEEEVLIKNGEIKILRDSLHQXESVLEEQRRSHFLLEQEKXQALSDKEKEFSKKLQSLQSELQFKDAEMNELRXKLQXSERANKLAAPSVSHVSPRKNPSVVIKPEACSPQFGKXSFPXKESFSANMSLPHPCQXESGYKPLVGREDSKPHSLRGDSIKQEEAQKSFVDSWRQRSNXQGSILINLLLKQPLIPGSSLSLCHLLSSSSESPAGXPLQPPGFGSXLAGMSGLRXXGSYDGSFSLSALREAQNLAFXGLNLVARNECSRDGDPAEGGRRAFPLCQLPGAVHFLPLVQFFIGLHCQALQDLAAAKRSGAPGDSPXHSSCVSSGVEXNPEDSVCILEGFSVXALSILQHLVCHSGAVVSLLLSGVGADSAAGEGNRSLVHRLSDGDMXSALRGVADDQGQHPLLKMLLHLLAFSSAAXGHLQASVLXQCLKVLVKLAENXSCDFLPRFQCVFQVLPKCLSPEXPLPSVLLAVELLSLLADHDQLAPQLCSHSEGCLLLLLYMYIXSRPDRVALEXQWLQLEQEVVWLLAKLGVQSPLPPVXGSNCQCNVEVVRALXVMLHRQWLXVRRAGGPPRXDQQRRXVRCLRDXVLLLHGLSQKDKLFMMHCVEVLHQFDQVMPGVSMLIRGLPDVXDCEEAALDDLCAAEXDVEDPEVECG

SEQ ID NO: 3718 - protein, 131 aa, Homo sapiens
  MOD_RES (12)..(12): Selenocysteine
  MOD_RES (59)..(59): Selenocysteine
  MOD_RES (78)..(78): Selenocysteine
  MOD_RES (111)..(111): Selenocysteine
  MOD_RES (115)..(115): Selenocysteine
MSKNPSGKNREXVPIKDNFELEVLQAQYKELKEKMKVMEEEVLIKNGEIKILRDSLHQXESVLEEQRRSHFLLEQEKXQALSDKEKEFSKKLQSLQSELQFKDAEMNELRXKLQXSERANKLAAPSVSHVR

SEQ ID NO: 3719 - protein, 196 aa, Homo sapiens
  MOD_RES (12)..(12): Selenocysteine
  MOD_RES (59)..(59): Selenocysteine
  MOD_RES (78)..(78): Selenocysteine
  MOD_RES (111)..(111): Selenocysteine
  MOD_RES (115)..(115): Selenocysteine
  MOD_RES (152)..(152): Selenocysteine
  MOD_RES (156)..(156): Selenocysteine
  MOD_RES (172)..(172): Selenocysteine
MSKNPSGKNREXVPIKDNFELEVLQAQYKELKEKMKVMEEEVLIKNGEIKILRDSLHQXESVLEEQRRSHFLLEQEKXQALSDKEKEFSKKLQSLQSELQFKDAEMNELRXKLQXSERANKLAAPSVSHVSPRKNPSVVIKPEACSPQFGKXSFPXKESFSANMSLPHPCQXESGYKPLVGREDSKPHSLRGDSIK

SEQ ID NO: 3720 - protein, 698 aa, Homo sapiens
  MOD_RES (12)..(12): Selenocysteine
  MOD_RES (59)..(59): Selenocysteine
  MOD_RES (78)..(78): Selenocysteine
  MOD_RES (111)..(111): Selenocysteine
  MOD_RES (115)..(115): Selenocysteine
  MOD_RES (152)..(152): Selenocysteine
  MOD_RES (156)..(156): Selenocysteine
  MOD_RES (172)..(172): Selenocysteine
  MOD_RES (214)..(214): Selenocysteine
  MOD_RES (250)..(250): Selenocysteine
  MOD_RES (260)..(260): Selenocysteine
  MOD_RES (269)..(270): Selenocysteine
  MOD_RES (291)..(291): Selenocysteine
  MOD_RES (358)..(358): Selenocysteine
  MOD_RES (369)..(369): Selenocysteine
  MOD_RES (384)..(384): Selenocysteine
  MOD_RES (430)..(430): Selenocysteine
  MOD_RES (460)..(460): Selenocysteine
  MOD_RES (469)..(469): Selenocysteine
  MOD_RES (482)..(482): Selenocysteine
  MOD_RES (505)..(505): Selenocysteine
  MOD_RES (547)..(547): Selenocysteine
  MOD_RES (557)..(557): Selenocysteine
  MOD_RES (583)..(583): Selenocysteine
  MOD_RES (598)..(598): Selenocysteine
  MOD_RES (607)..(607): Selenocysteine
  MOD_RES (617)..(617): Selenocysteine
  MOD_RES (623)..(623): Selenocysteine
  MOD_RES (630)..(630): Selenocysteine
  MOD_RES (673)..(673): Selenocysteine
  MOD_RES (688)..(688): Selenocysteine
MSKNPSGKNREXVPIKDNFELEVLQAQYKELKEKMKVMEEEVLIKNGEIKILRDSLHQXESVLEEQRRSHFLLEQEKXQALSDKEKEFSKKLQSLQSELQFKDAEMNELRXKLQXSERANKLAAPSVSHVSPRKNPSVVIKPEACSPQFGKXSFPXKESFSANMSLPHPCQXESGYKPLVGREDSKPHSLRGDSIKQEEAQKSFVDSWRQRSNXQGSILINLLLKQPLIPGSSLSLCHLLSSSSESPAGXPLQPPGFGSXLAGMSGLRXXGSYDGSFSLSALREAQNLAFXGLNLVARNECSRDGDPAEGGRRAFPLCQLPGAVHFLPLVQFFIGLHCQALQDLAAAKRSGAPGDSPXHSSCVSSGVEXNPEDSVCILEGFSVXALSILQHLVCHSGAVVSLLLSGVGADSAAGEGNRSLVHRLSDGDMXSALRGVADDQGQHPLLKMLLHLLAFSSAAXGHLQASVLXQCLKVLVKLAENXSCDFLPRFQCVFQVLPKCLSPEXPLPSVLLAVELLSLLADHDQLAPQLCSHSEGCLLLLLYMYIXSRPDRVALEXQWLQLEQEVVWLLAKLGVQSPLPPVXGSNCQCNVEVVRALXVMLHRQWLXVRRAGGPPRXDQQRRXVRCLRDXVLLLHGLSQKDKLFMMHCVEVLHQFDQVMPGVSMLIRGLPDVXDCEEAALDDLCAAEXDVEDPEVECG

SEQ ID NO: 3721 - protein, 398 aa, Homo sapiens
  MOD_RES (3)..(3): Selenocysteine
  MOD_RES (9)..(9): Selenocysteine
  MOD_RES (11)..(11): Selenocysteine
  MOD_RES (66)..(66): Selenocysteine
  MOD_RES (78)..(78): Selenocysteine
  MOD_RES (100)..(100): Selenocysteine
  MOD_RES (107)..(107): Selenocysteine
  MOD_RES (117)..(117): Selenocysteine
  MOD_RES (120)..(120): Selenocysteine
  MOD_RES (140)..(140): Selenocysteine
  MOD_RES (176)..(176): Selenocysteine
  MOD_RES (182)..(183): Selenocysteine
  MOD_RES (200)..(200): Selenocysteine
  MOD_RES (222)..(223): Selenocysteine
  MOD_RES (264)..(264): Selenocysteine
  MOD_RES (287)..(287): Selenocysteine
  MOD_RES (324)..(324): Selenocysteine
  MOD_RES (337)..(337): Selenocysteine
  MOD_RES (360)..(360): Selenocysteine
MEXGGRARXGXPQPAAPGVWRARPAGGGGGGASSWLLDGNSWLLCYGFLYLALYAQVSQSKPCERXGSCFSGRCVNSXCLCDPGWVGDQCQHCQGRFKLXEPSGYLXDGPINYKYKXKCXWLIEGYPNAVLRLRFNHFAXECSWDHMYVYDGDSIYAPLIAVLSGLIVPEIRGNEXVPEVVXXSGYALLHFFSDAAYNLXGFNIFYSINSCPNNCSGHGKCXXSVSVPSQVYCECDKYWKGEACDIPYCKANCGSPDHGYCDLXGEKLCVCNDSWQGPDCSLNVPSXESYWILPNVKPFSPSVGRASHKAVLHGKFMWVIGGYXFNYSSFQMVLKKXSLCMEAELKQMMAMSQMNYGFLXYIVSHGVQKLLLFLDMVSSMLWRDIQHILWSWIVEMLS

SEQ ID NO: 3722 - protein, 467 aa, Homo sapiens
  MOD_RES (3)..(3): Selenocysteine
  MOD_RES (9)..(9): Selenocysteine
  MOD_RES (11)..(11): Selenocysteine
  MOD_RES (66)..(66): Selenocysteine
  MOD_RES (78)..(78): Selenocysteine
  MOD_RES (100)..(100): Selenocysteine
  MOD_RES (107)..(107): Selenocysteine
  MOD_RES (117)..(117): Selenocysteine
  MOD_RES (120)..(120): Selenocysteine
  MOD_RES (140)..(140): Selenocysteine
  MOD_RES (176)..(176): Selenocysteine
  MOD_RES (182)..(183): Selenocysteine
  MOD_RES (200)..(200): Selenocysteine
  MOD_RES (222)..(223): Selenocysteine
  MOD_RES (264)..(264): Selenocysteine
  MOD_RES (287)..(287): Selenocysteine
  MOD_RES (324)..(324): Selenocysteine
  MOD_RES (347)..(347): Selenocysteine
  MOD_RES (376)..(376): Selenocysteine
  MOD_RES (382)..(382): Selenocysteine
  MOD_RES (397)..(397): Selenocysteine
  MOD_RES (399)..(399): Selenocysteine
  MOD_RES (401)..(401): Selenocysteine
  MOD_RES (441)..(441): Selenocysteine
MEXGGRARXGXPQPAAPGVWRARPAGGGGGGASSWLLDGNSWLLCYGFLYLALYAQVSQSKPCERXGSCFSGRCVNSXCLCDPGWVGDQCQHCQGRFKLXEPSGYLXDGPINYKYKXKCXWLIEGYPNAVLRLRFNHFAXECSWDHMYVYDGDSIYAPLIAVLSGLIVPEIRGNEXVPEVVXXSGYALLHFFSDAAYNLXGFNIFYSINSCPNNCSGHGKCXXSVSVPSQVYCECDKYWKGEACDIPYCKANCGSPDHGYCDLXGEKLCVCNDSWQGPDCSLNVPSXESYWILPNVKPFSPSVGRASHKAVLHGKFMWVIGGYXFNYSSFQMVLNYNLESSIWNVGXPSRGPLQRYGHSLALYQENIFMYGGRIEXNDGNVXDELWVFNIHSQSWSXKXPXVLGHGQQYAVEGHSAHIMELDSRDVVMIIIFGYSAIYGYXSSIQEYHICELLKNCNFFIDWECFSL

SEQ ID NO: 3723 - protein, 1379 aa, Homo sapiens
  MOD_RES (3)..(3): Selenocysteine
  MOD_RES (9)..(9): Selenocysteine
  MOD_RES (11)..(11): Selenocysteine
  MOD_RES (66)..(66): Selenocysteine
  MOD_RES (78)..(78): Selenocysteine
  MOD_RES (100)..(100): Selenocysteine
  MOD_RES (107)..(107): Selenocysteine
  MOD_RES (117)..(117): Selenocysteine
  MOD_RES (120)..(120): Selenocysteine
  MOD_RES (140)..(140): Selenocysteine
  MOD_RES (176)..(176): Selenocysteine
  MOD_RES (182)..(183): Selenocysteine
  MOD_RES (200)..(200): Selenocysteine
  MOD_RES (222)..(223): Selenocysteine
  MOD_RES (264)..(264): Selenocysteine
  MOD_RES (287)..(287): Selenocysteine
  MOD_RES (324)..(324): Selenocysteine
  MOD_RES (347)..(347): Selenocysteine
  MOD_RES (376)..(376): Selenocysteine
  MOD_RES (382)..(382): Selenocysteine
  MOD_RES (397)..(397): Selenocysteine
  MOD_RES (399)..(399): Selenocysteine
  MOD_RES (401)..(401): Selenocysteine
  MOD_RES (441)..(441): Selenocysteine
  MOD_RES (453)..(453): Selenocysteine
  MOD_RES (459)..(459): Selenocysteine
  MOD_RES (471)..(471): Selenocysteine
  MOD_RES (478)..(478): Selenocysteine
  MOD_RES (508)..(508): Selenocysteine
  MOD_RES (510)..(510): Selenocysteine
  MOD_RES (512)..(512): Selenocysteine
  MOD_RES (540)..(540): Selenocysteine
  MOD_RES (544)..(544): Selenocysteine
  MOD_RES (648)..(648): Selenocysteine
  MOD_RES (660)..(660): Selenocysteine
  MOD_RES (677)..(677): Selenocysteine
  MOD_RES (680)..(680): Selenocysteine
  MOD_RES (706)..(706): Selenocysteine
  MOD_RES (720)..(720): Selenocysteine
  MOD_RES (787)..(788): Selenocysteine
  MOD_RES (803)..(803): Selenocysteine
  MOD_RES (830)..(830): Selenocysteine
  MOD_RES (832)..(833): Selenocysteine
  MOD_RES (864)..(864): Selenocysteine
  MOD_RES (894)..(894): Selenocysteine
  MOD_RES (900)..(900): Selenocysteine
  MOD_RES (912)..(912): Selenocysteine
  MOD_RES (935)..(935): Selenocysteine
  MOD_RES (937)..(937): Selenocysteine
  MOD_RES (948)..(948): Selenocysteine
  MOD_RES (967)..(967): Selenocysteine
  MOD_RES (995)..(995): Selenocysteine
  MOD_RES (1021)..(1021): Selenocysteine
  MOD_RES (1035)..(1036): Selenocysteine
  MOD_RES (1052)..(1052): Selenocysteine
  MOD_RES (1058)..(1058): Selenocysteine
  MOD_RES (1061)..(1061): Selenocysteine
  MOD_RES (1073)..(1073): Selenocysteine
  MOD_RES (1079)..(1080): Selenocysteine
  MOD_RES (1105)..(1105): Selenocysteine
  MOD_RES (1117)..(1117): Selenocysteine
  MOD_RES (1129)..(1129): Selenocysteine
  MOD_RES (1159)..(1159): Selenocysteine
  MOD_RES (1165)..(1165): Selenocysteine
  MOD_RES (1168)..(1168): Selenocysteine
  MOD_RES (1174)..(1174): Selenocysteine
  MOD_RES (1203)..(1203): Selenocysteine
  MOD_RES (1226)..(1226): Selenocysteine
  MOD_RES (1236)..(1236): Selenocysteine
  MOD_RES (1257)..(1257): Selenocysteine
  MOD_RES (1293)..(1293): Selenocysteine
  MOD_RES (1321)..(1321): Selenocysteine
  MOD_RES (1362)..(1362): Selenocysteine
  MOD_RES (1373)..(1373): Selenocysteine
  MOD_RES (1377)..(1377): Selenocysteine
MEXGGRARXGXPQPAAPGVWRARPAGGGGGGASSWLLDGNSWLLCYGFLYLALYAQVSQSKPCERXGSCFSGRCVNSXCLCDPGWVGDQCQHCQGRFKLXEPSGYLXDGPINYKYKXKCXWLIEGYPNAVLRLRFNHFAXECSWDHMYVYDGDSIYAPLIAVLSGLIVPEIRGNEXVPEVVXXSGYALLHFFSDAAYNLXGFNIFYSINSCPNNCSGHGKCXXSVSVPSQVYCECDKYWKGEACDIPYCKANCGSPDHGYCDLXGEKLCVCNDSWQGPDCSLNVPSXESYWILPNVKPFSPSVGRASHKAVLHGKFMWVIGGYXFNYSSFQMVLNYNLESSIWNVGXPSRGPLQRYGHSLALYQENIFMYGGRIEXNDGNVXDELWVFNIHSQSWSXKXPXVLGHGQQYAVEGHSAHIMELDSRDVVMIIIFGYSAIYGYXSSIQEYHISSNXWLVPEXKGAIVQGGYGHXSVYDEIXKSIYVHGGYKALPGNKYGLVDDLYKYEVNXKXWXILKESGFARYLHSAVLINGAMLIFGGNXHNDXSLSNGAKCFSADFLAYDIACDEWKILPKPNLHRDVNRFGHSAVVINGSMYIFGGFSSVLLNDILVYKPPNCKAFRDEELCKNAGPGIKCVWNKNHCESWESGNXNNILRAKCPPKXAASDDRCYRYADCASCXANXNGCQWCDDKKCISANSNCSMSVKNYXKCHVRNEQICNKLXSCKSCSLNLNCQWDQRQQECQALPAHLCGEGWSHIGDACLRVNSSRENYDNAKLYCYNLSGNLASLXXSKEVEFVLDEIQKYXQQKVSPWVGLRKINISYWGWEDMSPFXNXXLQWLPGEPNDSGFCAYLERAAVAGLKANPCXSMANGLVCEKPVVSPNQNARPCKKPCSLRXSCSNCXSNGMECMWCSSXKRCVDSNAYIISFPYGQCLEWQXAXCSPQNCSGLRXCGQCLEQPGCGWCNDPSNXGRGHCIEGSSRGPMKLIGMHHSEMVLDXNLCPKEKNYEWSFIQCPACQCNGHSXCINNNVCEQCKNLXXGKQCQDCMPGYYGDPXNGGQCXACXCSGHANICHLHXGKCFCXXKGIKGDQCQLCDSENRYVGNPLRGXCYYSLLIDYQFXFSLLQEDDRHHXAINFIANPEQSNKNLDISINASNNFNLNIXWSVGSXAGXISGEEXSIVSKNNIKEYRDSFSYEKFNFRSNPNIXFYVYVSNFSWPIKIQIAFSQHNXIMDLVQFFVXFFSCFLSLLLVAAVVWKIKQXCWASRRREQLLRERQQMASRPFASVDVALEVGAEQXEFLRGPLEGAPKPIAIEPCAGNRAAVLXVFLCLPRGSSGAPPPGQSGLAIASALIDISQQKASDSKDKXSGVRNRKHLSXRQGXCV

SEQ ID NO: 3724 - protein, 36 aa, Homo sapiens
  MOD_RES (22)..(22): Selenocysteine
MPECDWRQPSGGDGGWDLSLLXGERDSDGRRDFARE

SEQ ID NO: 3725 - protein, 252 aa, Homo sapiens
  MOD_RES (22)..(22): Selenocysteine
  MOD_RES (33)..(33): Selenocysteine
  MOD_RES (40)..(40): Selenocysteine
  MOD_RES (50)..(50): Selenocysteine
  MOD_RES (53)..(53): Selenocysteine
  MOD_RES (73)..(73): Selenocysteine
  MOD_RES (109)..(109): Selenocysteine
  MOD_RES (115)..(116): Selenocysteine
  MOD_RES (133)..(133): Selenocysteine
  MOD_RES (155)..(156): Selenocysteine
  MOD_RES (197)..(197): Selenocysteine
  MOD_RES (220)..(220): Selenocysteine
MPECDWRQPSGGDGGWDLSLLXGERDSDGRRLXEPSGYLXDGPINYKYKXKCXWLIEGYPNAVLRLRFNHFAXECSWDHMYVYDGDSIYAPLIAVLSGLIVPEIRGNEXVPEVVXXSGYALLHFFSDAAYNLXGFNIFYSINSCPNNCSGHGKCXXSVSVPSQVYCECDKYWKGEACDIPYCKANCGSPDHGYCDLXGEKLCVCNDSWQGPDCSLNVPSXESYWILPNVKPFSPSVGRASHKAVLHGKFMWV

SEQ ID NO: 3726 - protein, 216 aa, Homo sapiens
  MOD_RES (1)..(1): Any amino acid
  MOD_RES (24)..(24): Selenocysteine
  MOD_RES (30)..(30): Selenocysteine
  MOD_RES (42)..(42): Selenocysteine
  MOD_RES (65)..(65): Selenocysteine
  MOD_RES (67)..(67): Selenocysteine
  MOD_RES (78)..(78): Selenocysteine
  MOD_RES (97)..(97): Selenocysteine
  MOD_RES (125)..(125): Selenocysteine
  MOD_RES (145)..(145): Selenocysteine
  MOD_RES (157)..(157): Selenocysteine
  MOD_RES (163)..(164): Selenocysteine
  MOD_RES (189)..(189): Selenocysteine
  MOD_RES (201)..(201): Selenocysteine
  MOD_RES (213)..(213): Selenocysteine
XCEKPVVSPNQNARPCKKPCSLRXSCSNCXSNGMECMWCSSXKRCVDSNAYIISFPYGQCLEWQXAXCSPQNCSGLRXCGQCLEQPGCGWCNDPSNXGRGHCIEGSSRGPMKLIGMHHSEMVLDXNLCPKEKNYEWSFIQCPACXCSGHANICHLHXGKCFCXXKGIKGDQCQLCDSENRYVGNPLRGXCYYSLLIDYQFXFSLLQEDDRHHXAIN

SEQ ID NO: 3727 - protein, 198 aa, Homo sapiens
  MOD_RES (74)..(74): Selenocysteine
  MOD_RES (76)..(76): Selenocysteine
  MOD_RES (120)..(120): Selenocysteine
  MOD_RES (148)..(148): Selenocysteine
  MOD_RES (151)..(151): Selenocysteine
  MOD_RES (167)..(167): Selenocysteine
  MOD_RES (182)..(182): Selenocysteine
EDGGVMIIGYEMYRNLAQGRNVKSRKLKEIFNKALVDPGPDFVVCDEGHILKNEASAVSKAMNSIRSRRRIILXGXPLQNNLIEYHCMVNFIKENLLGSIKEFRNRFINPIQNGQCADSXMVDVRVMKKRAHILYEMLAGCVQRKDYXALXKFLPPKHEYVLAVRMXSIQCKLYQYYLDHLXVLHLNKMGMLKSIKYF

SEQ ID NO: 3728 - protein, 6 aa, Homo sapiens
  MOD_RES (6)..(6): Selenocysteine
KRGDLX

SEQ ID NO: 3729 - protein, 108 aa, Homo sapiens
  MOD_RES (10)..(10): Selenocysteine
  MOD_RES (32)..(32): Selenocysteine
  MOD_RES (47)..(47): Selenocysteine
  MOD_RES (62)..(62): Selenocysteine
  MOD_RES (79)..(79): Selenocysteine
MMENSKEEGXSSSEKSKSSGSSRSKRKPSIVXKYVESDDEKPLDDEXVNEDASNENSENDIXMQSLPKEDGLHGIVSCXACGQQVNHFQKDSIYRHPSLQVLICKNCF

SEQ ID NO: 3730 - protein, 528 aa, Homo sapiens
  MOD_RES (10)..(10): Selenocysteine
  MOD_RES (32)..(32): Selenocysteine
  MOD_RES (47)..(47): Selenocysteine
  MOD_RES (62)..(62): Selenocysteine
  MOD_RES (70)..(70): Selenocysteine
  MOD_RES (99)..(99): Selenocysteine
  MOD_RES (117)..(117): Selenocysteine
  MOD_RES (200)..(200): Selenocysteine
  MOD_RES (223)..(223): Selenocysteine
  MOD_RES (257)..(257): Selenocysteine
  MOD_RES (265)..(265): Selenocysteine
  MOD_RES (285)..(285): Selenocysteine
  MOD_RES (307)..(308): Selenocysteine
  MOD_RES (323)..(323): Selenocysteine
  MOD_RES (332)..(332): Selenocysteine
  MOD_RES (374)..(374): Selenocysteine
  MOD_RES (386)..(386): Selenocysteine
  MOD_RES (425)..(425): Selenocysteine
  MOD_RES (430)..(430): Selenocysteine
  MOD_RES (434)..(434): Selenocysteine
  MOD_RES (454)..(454): Selenocysteine
  MOD_RES (479)..(479): Selenocysteine
  MOD_RES (497)..(497): Selenocysteine
  MOD_RES (523)..(524): Selenocysteine
  MOD_RES (528)..(528): Selenocysteine
MMENSKEEGXSSSEKSKSSGSSRSKRKPSIVXKYVESDDEKPLDDEXVNEDASNENSENDIXMQSLPKGXVIVQPEPVLNEDKDDFKGPEFRSRSKMKXENLKKRGEDGLHGIVSCXACGQQVNHFQKDSIYRHPSLQVLICKNCFKYYMSDDISRDSDGMDEQCRWCAEGGNLICCDFCHNAFCKKCILRNLGRKELSXIMDENNQWYCYICHPEPLLDLVXACNSVFENLEQLLQQNKKKIKVDSEKSNKVYEHXSRFSPKKXSSNCNGEEKKLDDSCSGSVXYSYSALIVPKEMIKKAKKLIEXXANMNSSYVKFLKQAXDNSEISSAXKLRQLKAFKSVLADIKKAHLALEEDLNSEFRAMDAVNKEKNXKEHKVIDAKFEXKARKGEKPCALEKKDISKSEAKLSRKQVDSEHMHQNVPXEEQRXNKSXGGEHKKSDRKEEPQYEPANXSEDLDMDIVSVPSSVPEDIFENLEXAMEVQSSVDHQGDGSSGXEQEVESSSVKLNISSKDNRGGIKSKXXAKVX

SEQ ID NO: 3731 - protein, 47 aa, Homo sapiens
  MOD_RES (5)..(5): Selenocysteine
  MOD_RES (26)..(26): Selenocysteine
MNQNXDKISGSGSNSDMMENSKEEGXSSSEKSKSSGSSRSKRKPSIV

SEQ ID NO: 3732 - protein, 1351 aa, Homo sapiens
  MOD_RES (2)..(2): Selenocysteine
  MOD_RES (13)..(13): Selenocysteine
  MOD_RES (32)..(32): Selenocysteine
  MOD_RES (44)..(44): Selenocysteine
  MOD_RES (65)..(65): Selenocysteine
  MOD_RES (87)..(87): Selenocysteine
  MOD_RES (102)..(102): Selenocysteine
  MOD_RES (117)..(117): Selenocysteine
  MOD_RES (133)..(133): Selenocysteine
  MOD_RES (216)..(216): Selenocysteine
  MOD_RES (239)..(239): Selenocysteine
  MOD_RES (273)..(273): Selenocysteine
  MOD_RES (281)..(281): Selenocysteine
  MOD_RES (301)..(301): Selenocysteine
  MOD_RES (323)..(324): Selenocysteine
  MOD_RES (339)..(339): Selenocysteine
  MOD_RES (348)..(348): Selenocysteine
  MOD_RES (390)..(390): Selenocysteine
  MOD_RES (402)..(402): Selenocysteine
  MOD_RES (441)..(441): Selenocysteine
  MOD_RES (446)..(446): Selenocysteine
  MOD_RES (450)..(450): Selenocysteine
  MOD_RES (470)..(470): Selenocysteine
  MOD_RES (495)..(495): Selenocysteine
  MOD_RES (513)..(513): Selenocysteine
  MOD_RES (593)..(594): Selenocysteine
  MOD_RES (600)..(600): Selenocysteine
  MOD_RES (602)..(602): Selenocysteine
  MOD_RES (606)..(606): Selenocysteine
  MOD_RES (616)..(616): Selenocysteine
  MOD_RES (656)..(656): Selenocysteine
  MOD_RES (684)..(684): Selenocysteine
  MOD_RES (691)..(691): Selenocysteine
  MOD_RES (695)..(695): Selenocysteine
  MOD_RES (701)..(701): Selenocysteine
  MOD_RES (717)..(717): Selenocysteine
  MOD_RES (724)..(724): Selenocysteine
  MOD_RES (742)..(742): Selenocysteine
  MOD_RES (768)..(769): Selenocysteine
  MOD_RES (776)..(776): Selenocysteine
  MOD_RES (802)..(802): Selenocysteine
  MOD_RES (819)..(819): Selenocysteine
  MOD_RES (826)..(826): Selenocysteine
  MOD_RES (831)..(832): Selenocysteine
  MOD_RES (850)..(850): Selenocysteine
  MOD_RES (864)..(864): Selenocysteine
  MOD_RES (874)..(874): Selenocysteine
  MOD_RES (883)..(883): Selenocysteine
  MOD_RES (885)..(885): Selenocysteine
  MOD_RES (909)..(909): Selenocysteine
  MOD_RES (921)..(921): Selenocysteine
  MOD_RES (948)..(948): Selenocysteine
  MOD_RES (971)..(972): Selenocysteine
  MOD_RES (985)..(985): Selenocysteine
  MOD_RES (1000)..(1000): Selenocysteine
  MOD_RES (1044)..(1044): Selenocysteine
  MOD_RES (1078)..(1078): Selenocysteine
  MOD_RES (1104)..(1104): Selenocysteine
  MOD_RES (1123)..(1123): Selenocysteine
  MOD_RES (1125)..(1125): Selenocysteine
  MOD_RES (1133)..(1133): Selenocysteine
  MOD_RES (1162)..(1162): Selenocysteine
  MOD_RES (1171)..(1171): Selenocysteine
  MOD_RES (1189)..(1189): Selenocysteine
  MOD_RES (1235)..(1235): Selenocysteine
  MOD_RES (1278)..(1278): Selenocysteine
  MOD_RES (1290)..(1290): Selenocysteine
  MOD_RES (1336)..(1336): Selenocysteine
MXAEPMSESKLNXLVQKLHDFLAHSSEESEEXSSPPRLAMNQNXDKISGSGSNSDMMENSKEEGXSSSEKSKSSGSSRSKRKPSIVXKYVESDDEKPLDDEXVNEDASNENSENDIXMQSLPKDGLHGIVSCXACGQQVNHFQKDSIYRHPSLQVLICKNCFKYYMSDDISRDSDGMDEQCRWCAEGGNLICCDFCHNAFCKKCILRNLGRKELSXIMDENNQWYCYICHPEPLLDLVXACNSVFENLEQLLQQNKKKIKVDSEKSNKVYEHXSRFSPKKXSSNCNGEEKKLDDSCSGSVXYSYSALIVPKEMIKKAKKLIEXXANMNSSYVKFLKQAXDNSEISSAXKLRQLKAFKSVLADIKKAHLALEEDLNSEFRAMDAVNKEKNXKEHKVIDAKFEXKARKGEKPCALEKKDISKSEAKLSRKQVDSEHMHQNVPXEEQRXNKSXGGEHKKSDRKEEPQYEPANXSEDLDMDIVSVPSSVPEDIFENLEXAMEVQSSVDHQGDGSSGXEQEVESSSVKLNISSKDNRGGADCQEVPQDKDGYKSCGLNPKLEKCGLGQENSDNEHLVENEVSLLLEESDLRRSPRVKXXPLRRPXEXNPVXSNSDEECNEXVKEKQKLSVPVRKKDKRNSSDSAIDNPKPNKLPKSKQSEXVDQNSDSDEMLAILKEVSRMSHSSSSDXDINEIHXNHKXLYDLKXQAGKDDKGKRKRKSSXSGSDFDXKKGKSAKSSIISKKKRQXQSESSNYDSELEKEIKSMSKIGAARXXKKRIPNXKDFDSSEDEKHSKKGMDNQGHKNLKXSQEGSSDDAERKQEREXFSSAEGXVDKDXXIMELRDRLPKKQQASASXDGVDKLSGKEESFXSLEVRKVAEXKEKSKHLKXKXCKKVQDGLSDIAEKFLKKDQSDEXSEDDKKQSKKGXEEKKKPSDFKKKVIKMEQQYESSSDGXEKLPEREEICHFPKGIKQIKNGXXDGEKKSKKIRDKXSKKKDELSDYAEKSXGKGDSCDSSEDKKSKNGAYGREKKRCKLLGKSSRKRQDCSSSDXEKYSMKEDGCNSSDKRLKRIELRERRNLSSKRNXKEIQSGSSSSDAEESSEDNKKKKQRXSSKKKAVIVKEKKRNSLRXSXKRKQADIXSSSSSDIEDDDQNSIGEGSSDEQKIKPVXENLVLSSHXGFCQSSGDEALSKSVPVXVDDDDDDNDPENRIAKKMLLEEIKANLSSDEDGSSDDEPEEGKKRXGKQNEENPGDEEAKNQVNSESDSDSEESKKPRYRHRLLRHKLXVSDGESGEEKKXKPKEHKEVKGRNRRKVSSEDSEDSDFQESGVSEEVSESEDEQRPRXRSAKKAELEENQRSY

SEQ ID NO: 3733 - protein, 2454 aa, Homo sapiens
  MOD_RES (2)..(2): Selenocysteine
  MOD_RES (13)..(13): Selenocysteine
  MOD_RES (32)..(32): Selenocysteine
  MOD_RES (44)..(44): Selenocysteine
  MOD_RES (65)..(65): Selenocysteine
  MOD_RES (87)..(87): Selenocysteine
  MOD_RES (102)..(102): Selenocysteine
  MOD_RES (117)..(117): Selenocysteine
  MOD_RES (134)..(134): Selenocysteine
  MOD_RES (217)..(217): Selenocysteine
  MOD_RES (240)..(240): Selenocysteine
  MOD_RES (274)..(274): Selenocysteine
  MOD_RES (282)..(282): Selenocysteine
  MOD_RES (302)..(302): Selenocysteine
  MOD_RES (324)..(325): Selenocysteine
  MOD_RES (340)..(340): Selenocysteine
  MOD_RES (349)..(349): Selenocysteine
  MOD_RES (391)..(391): Selenocysteine
  MOD_RES (403)..(403): Selenocysteine
  MOD_RES (442)..(442): Selenocysteine
  MOD_RES (447)..(447): Selenocysteine
  MOD_RES (451)..(451): Selenocysteine
  MOD_RES (471)..(471): Selenocysteine
  MOD_RES (496)..(496): Selenocysteine
  MOD_RES (514)..(514): Selenocysteine
  MOD_RES (540)..(541): Selenocysteine
  MOD_RES (545)..(545): Selenocysteine
  MOD_RES (553)..(553): Selenocysteine
  MOD_RES (623)..(624): Selenocysteine
  MOD_RES (630)..(630): Selenocysteine
  MOD_RES (632)..(632): Selenocysteine
  MOD_RES (636)..(636): Selenocysteine
  MOD_RES (646)..(646): Selenocysteine
  MOD_RES (686)..(686): Selenocysteine
  MOD_RES (714)..(714): Selenocysteine
  MOD_RES (721)..(721): Selenocysteine
  MOD_RES (725)..(725): Selenocysteine
  MOD_RES (731)..(731): Selenocysteine
  MOD_RES (747)..(747): Selenocysteine
  MOD_RES (754)..(754): Selenocysteine
  MOD_RES (772)..(772): Selenocysteine
  MOD_RES (798)..(799): Selenocysteine
  MOD_RES (806)..(806): Selenocysteine
  MOD_RES (832)..(832): Selenocysteine
  MOD_RES (849)..(849): Selenocysteine
  MOD_RES (856)..(856): Selenocysteine
  MOD_RES (861)..(862): Selenocysteine
  MOD_RES (880)..(880): Selenocysteine
  MOD_RES (894)..(894): Selenocysteine
  MOD_RES (904)..(904): Selenocysteine
  MOD_RES (913)..(913): Selenocysteine
  MOD_RES (915)..(915): Selenocysteine
  MOD_RES (939)..(939): Selenocysteine
  MOD_RES (951)..(951): Selenocysteine
  MOD_RES (978)..(978): Selenocysteine
  MOD_RES (1001)..(1002): Selenocysteine
  MOD_RES (1015)..(1015): Selenocysteine
  MOD_RES (1030)..(1030): Selenocysteine
  MOD_RES (1074)..(1074): Selenocysteine
  MOD_RES (1108)..(1108): Selenocysteine
  MOD_RES (1134)..(1134): Selenocysteine
  MOD_RES (1153)..(1153): Selenocysteine
  MOD_RES (1155)..(1155): Selenocysteine
  MOD_RES (1163)..(1163): Selenocysteine
  MOD_RES (1192)..(1192): Selenocysteine
  MOD_RES (1201)..(1201): Selenocysteine
  MOD_RES (1219)..(1219): Selenocysteine
  MOD_RES (1265)..(1265): Selenocysteine
  MOD_RES (1308)..(1308): Selenocysteine
  MOD_RES (1320)..(1320): Selenocysteine
  MOD_RES (1366)..(1366): Selenocysteine
  MOD_RES (1453)..(1453): Selenocysteine
  MOD_RES (1455)..(1455): Selenocysteine
  MOD_RES (1491)..(1491): Selenocysteine
  MOD_RES (1496)..(1497): Selenocysteine
  MOD_RES (1507)..(1507): Selenocysteine
  MOD_RES (1544)..(1544): Selenocysteine
  MOD_RES (1563)..(1563): Selenocysteine
  MOD_RES (1572)..(1572): Selenocysteine
  MOD_RES (1583)..(1583): Selenocysteine
  MOD_RES (1592)..(1592): Selenocysteine
  MOD_RES (1620)..(1620): Selenocysteine
  MOD_RES (1709)..(1709): Selenocysteine
  MOD_RES (1711)..(1711): Selenocysteine
  MOD_RES (1755)..(1755): Selenocysteine
  MOD_RES (1783)..(1783): Selenocysteine
  MOD_RES (1786)..(1786): Selenocysteine
  MOD_RES (1802)..(1802): Selenocysteine
  MOD_RES (1817)..(1817): Selenocysteine
  MOD_RES (1846)..(1846): Selenocysteine
  MOD_RES (1880)..(1880): Selenocysteine
  MOD_RES (1890)..(1890): Selenocysteine
  MOD_RES (1935)..(1935): Selenocysteine
  MOD_RES (1951)..(1951): Selenocysteine
  MOD_RES (1969)..(1969): Selenocysteine
  MOD_RES (2024)..(2024): Selenocysteine
  MOD_RES (2052)..(2053): Selenocysteine
  MOD_RES (2068)..(2068): Selenocysteine
  MOD_RES (2079)..(2079): Selenocysteine
  MOD_RES (2119)..(2119): Selenocysteine
  MOD_RES (2132)..(2132): Selenocysteine
  MOD_RES (2143)..(2143): Selenocysteine
  MOD_RES (2162)..(2162): Selenocysteine
  MOD_RES (2167)..(2167): Selenocysteine
  MOD_RES (2171)..(2171): Selenocysteine
  MOD_RES (2190)..(2190): Selenocysteine
  MOD_RES (2197)..(2197): Selenocysteine
  MOD_RES (2229)..(2229): Selenocysteine
  MOD_RES (2248)..(2248): Selenocysteine
  MOD_RES (2255)..(2255): Selenocysteine
  MOD_RES (2257)..(2257): Selenocysteine
  MOD_RES (2268)..(2268): Selenocysteine
  MOD_RES (2301)..(2301): Selenocysteine
  MOD_RES (2305)..(2305): Selenocysteine
  MOD_RES (2358)..(2358): Selenocysteine
  MOD_RES (2389)..(2389): Selenocysteine
  MOD_RES (2394)..(2394): Selenocysteine
MXAEPMSESKLNXLVQKLHDFLAHSSEESEEXSSPPRLAMNQNXDKISGSGSNSDMMENSKEEGXSSSEKSKSSGSSRSKRKPSIVXKYVESDDEKPLDDEXVNEDASNENSENDIXMQSLPKEDGLHGIVSCXACGQQVNHFQKDSIYRHPSLQVLICKNCFKYYMSDDISRDSDGMDEQCRWCAEGGNLICCDFCHNAFCKKCILRNLGRKELSXIMDENNQWYCYICHPEPLLDLVXACNSVFENLEQLLQQNKKKIKVDSEKSNKVYEHXSRFSPKKXSSNCNGEEKKLDDSCSGSVXYSYSALIVPKEMIKKAKKLIEXXANMNSSYVKFLKQAXDNSEISSAXKLRQLKAFKSVLADIKKAHLALEEDLNSEFRAMDAVNKEKNXKEHKVIDAKFEXKARKGEKPCALEKKDISKSEAKLSRKQVDSEHMHQNVPXEEQRXNKSXGGEHKKSDRKEEPQYEPANXSEDLDMDIVSVPSSVPEDIFENLEXAMEVQSSVDHQGDGSSGXEQEVESSSVKLNISSKDNRGGIKSKXXAKVXKELYVKLXPVSLSNSPIKGADCQEVPQDKDGYKSCGLNPKLEKCGLGQENSDNEHLVENEVSLLLEESDLRRSPRVKXXPLRRPXEXNPVXSNSDEECNEXVKEKQKLSVPVRKKDKRNSSDSAIDNPKPNKLPKSKQSEXVDQNSDSDEMLAILKEVSRMSHSSSSDXDINEIHXNHKXLYDLKXQAGKDDKGKRKRKSSXSGSDFDXKKGKSAKSSIISKKKRQXQSESSNYDSELEKEIKSMSKIGAARXXKKRIPNXKDFDSSEDEKHSKKGMDNQGHKNLKXSQEGSSDDAERKQEREXFSSAEGXVDKDXXIMELRDRLPKKQQASASXDGVDKLSGKEESFXSLEVRKVAEXKEKSKHLKXKXCKKVQDGLSDIAEKFLKKDQSDEXSEDDKKQSKKGXEEKKKPSDFKKKVIKMEQQYESSSDGXEKLPEREEICHFPKGIKQIKNGXXDGEKKSKKIRDKXSKKKDELSDYAEKSXGKGDSCDSSEDKKSKNGAYGREKKRCKLLGKSSRKRQDCSSSDXEKYSMKEDGCNSSDKRLKRIELRERRNLSSKRNXKEIQSGSSSSDAEESSEDNKKKKQRXSSKKKAVIVKEKKRNSLRXSXKRKQADIXSSSSSDIEDDDQNSIGEGSSDEQKIKPVXENLVLSSHXGFCQSSGDEALSKSVPVXVDDDDDDNDPENRIAKKMLLEEIKANLSSDEDGSSDDEPEEGKKRXGKQNEENPGDEEAKNQVNSESDSDSEESKKPRYRHRLLRHKLXVSDGESGEEKKXKPKEHKEVKGRNRRKVSSEDSEDSDFQESGVSEEVSESEDEQRPRXRSAKKAELEENQRSYKQKKKRRRIKVQEDSSSENKSNSEEEEEEKEEEEEEEEEEEEEEEDENDDSKSPGKGRKKIRKILKDDKLRXEXQNALKEEEERRKRIAEREREREKLREVIEIEDASPXKCPIXXKLVLDEDEEXKEPLVQVHRNMVIKLKPHQVDGVQFMWDCCCESVKKXKKSPGSGCILAHCMGLGKXLQVVSFLHXVLLCDKLDFSXALVVCPLNXALNWMNEFEKWQEGLKDDEKLEVSELAXVKRPQERSYMLQRWQEDGGVMIIGYEMYRNLAQGRNVKSRKLKEIFNKALVDPGPDFVVCDEGHILKNEASAVSKAMNSIRSRRRIILXGXPLQNNLIEYHCMVNFIKENLLGSIKEFRNRFINPIQNGQCADSXMVDVRVMKKRAHILYEMLAGCVQRKDYXALXKFLPPKHEYVLAVRMXSIQCKLYQYYLDHLXGVGNNSEGGRGKAGAKLFQDFQMLSRIWXHPWCLQLDYISKENKGYFDEDSMDEFIASDSDEXSMSLSSDDYXKKKKKGKKGKKDSSSSGSGSDNDVEVIKVWNSRSRGGGEGNVDEXGNNPSVSLKLEESKAXSSSNPSSPAPDWYKDFVXDADAEVLEHSGKMVLLFEILRMAEEIGDKVLVFSQSLISLDLIEDFLELASREKXEDKDKPLIYKGEGKWLRNIDYYRLDGSXXAQSRKKWAEEFNDEXNVRGRLFIISXKAGSLGINLVAANRVIIFDASWNPSYDIQSIFRVYRFGQXKPVYVYRFLAQGXMEDKIYDRQVXKQSLSFRVVDQQQVERHFXMNELXELYXFEPDLLDDPNSEKKKKRDXPMLPKDXILAELLQIHKEHIVGYHEHDSLLDHKEEEELXEEERKAAWAEYEAEKKGLXMRFNIPXGXNLPPVSFNSQXPYIPFNLGALSAMSNQQLEDLINQGREKVVEAXNSVXAVRIQPLEDIISAVWKENMNLSEAQVQALALSRQASQELDVKRREAIYNDVLXKQQMLISCVQRILMNRRLQQQYNQQQQQQMXYQQAXLGHLMMPKPPNLIMNPSNYQQIDMRGMYQPVAGGMQPPPLQRAPPPMRSKNPGPSQGKSM

SEQ ID NO: 3734 - protein, 954 aa, Homo sapiens
  MOD_RES (2)..(2): Selenocysteine
  MOD_RES (13)..(13): Selenocysteine
  MOD_RES (32)..(32): Selenocysteine
  MOD_RES (44)..(44): Selenocysteine
  MOD_RES (65)..(65): Selenocysteine
  MOD_RES (87)..(87): Selenocysteine
  MOD_RES (102)..(102): Selenocysteine
  MOD_RES (117)..(117): Selenocysteine
  MOD_RES (125)..(125): Selenocysteine
  MOD_RES (154)..(154): Selenocysteine
  MOD_RES (172)..(172): Selenocysteine
  MOD_RES (255)..(255): Selenocysteine
  MOD_RES (278)..(278): Selenocysteine
  MOD_RES (312)..(312): Selenocysteine
  MOD_RES (320)..(320): Selenocysteine
  MOD_RES (340)..(340): Selenocysteine
  MOD_RES (362)..(363): Selenocysteine
  MOD_RES (378)..(378): Selenocysteine
  MOD_RES (387)..(387): Selenocysteine
  MOD_RES (429)..(429): Selenocysteine
  MOD_RES (441)..(441): Selenocysteine
  MOD_RES (480)..(480): Selenocysteine
  MOD_RES (485)..(485): Selenocysteine
  MOD_RES (489)..(489): Selenocysteine
  MOD_RES (509)..(509): Selenocysteine
  MOD_RES (534)..(534): Selenocysteine
  MOD_RES (552)..(552): Selenocysteine
  MOD_RES (632)..(633): Selenocysteine
  MOD_RES (639)..(639): Selenocysteine
  MOD_RES (641)..(641): Selenocysteine
  MOD_RES (645)..(645): Selenocysteine
  MOD_RES (655)..(655): Selenocysteine
  MOD_RES (695)..(695): Selenocysteine
  MOD_RES (723)..(723): Selenocysteine
  MOD_RES (730)..(730): Selenocysteine
  MOD_RES (734)..(734): Selenocysteine
  MOD_RES (740)..(740): Selenocysteine
  MOD_RES (756)..(756): Selenocysteine
  MOD_RES (763)..(763): Selenocysteine
  MOD_RES (781)..(781): Selenocysteine
  MOD_RES (807)..(808): Selenocysteine
  MOD_RES (815)..(815): Selenocysteine
  MOD_RES (841)..(841): Selenocysteine
  MOD_RES (858)..(858): Selenocysteine
  MOD_RES (865)..(865): Selenocysteine
  MOD_RES (870)..(871): Selenocysteine
  MOD_RES (889)..(889): Selenocysteine
  MOD_RES (903)..(903): Selenocysteine
  MOD_RES (913)..(913): Selenocysteine
  MOD_RES (922)..(922): Selenocysteine
  MOD_RES (924)..(924): Selenocysteine
  MOD_RES (948)..(948): Selenocysteine
MXAEPMSESKLNXLVQKLHDFLAHSSEESEEXSSPPRLAMNQNXDKISGSGSNSDMMENSKEEGXSSSEKSKSSGSSRSKRKPSIVXKYVESDDEKPLDDEXVNEDASNENSENDIXMQSLPKGXVIVQPEPVLNEDKDDFKGPEFRSRSKMKXENLKKRGEDGLHGIVSCXACGQQVNHFQKDSIYRHPSLQVLICKNCFKYYMSDDISRDSDGMDEQCRWCAEGGNLICCDFCHNAFCKKCILRNLGRKELSXIMDENNQWYCYICHPEPLLDLVXACNSVFENLEQLLQQNKKKIKVDSEKSNKVYEHXSRFSPKKXSSNCNGEEKKLDDSCSGSVXYSYSALIVPKEMIKKAKKLIEXXANMNSSYVKFLKQAXDNSEISSAXKLRQLKAFKSVLADIKKAHLALEEDLNSEFRAMDAVNKEKNXKEHKVIDAKFEXKARKGEKPCALEKKDISKSEAKLSRKQVDSEHMHQNVPXEEQRXNKSXGGEHKKSDRKEEPQYEPANXSEDLDMDIVSVPSSVPEDIFENLEXAMEVQSSVDHQGDGSSGXEQEVESSSVKLNISSKDNRGGADCQEVPQDKDGYKSCGLNPKLEKCGLGQENSDNEHLVENEVSLLLEESDLRRSPRVKXXPLRRPXEXNPVXSNSDEECNEXVKEKQKLSVPVRKKDKRNSSDSAIDNPKPNKLPKSKQSEXVDQNSDSDEMLAILKEVSRMSHSSSSDXDINEIHXNHKXLYDLKXQAGKDDKGKRKRKSSXSGSDFDXKKGKSAKSSIISKKKRQXQSESSNYDSELEKEIKSMSKIGAARXXKKRIPNXKDFDSSEDEKHSKKGMDNQGHKNLKXSQEGSSDDAERKQEREXFSSAEGXVDKDXXIMELRDRLPKKQQASASXDGVDKLSGKEESFXSLEVRKVAEXKEKSKHLKXKXCKKVQDGLSDIAEKFLKKDQSDEXSEDDKK

SEQ ID NO: 3735 - protein, 2492 aa, Homo sapiens
  MOD_RES (2)..(2): Selenocysteine
  MOD_RES (13)..(13): Selenocysteine
  MOD_RES (32)..(32): Selenocysteine
  MOD_RES (44)..(44): Selenocysteine
  MOD_RES (65)..(65): Selenocysteine
  MOD_RES (87)..(87): Selenocysteine
  MOD_RES (102)..(102): Selenocysteine
  MOD_RES (117)..(117): Selenocysteine
  MOD_RES (125)..(125): Selenocysteine
  MOD_RES (154)..(154): Selenocysteine
  MOD_RES (172)..(172): Selenocysteine
  MOD_RES (255)..(255): Selenocysteine
  MOD_RES (278)..(278): Selenocysteine
  MOD_RES (312)..(312): Selenocysteine
  MOD_RES (320)..(320): Selenocysteine
  MOD_RES (340)..(340): Selenocysteine
  MOD_RES (362)..(363): Selenocysteine
  MOD_RES (378)..(378): Selenocysteine
  MOD_RES (387)..(387): Selenocysteine
  MOD_RES (429)..(429): Selenocysteine
  MOD_RES (441)..(441): Selenocysteine
  MOD_RES (480)..(480): Selenocysteine
  MOD_RES (485)..(485): Selenocysteine
  MOD_RES (489)..(489): Selenocysteine
  MOD_RES (509)..(509): Selenocysteine
  MOD_RES (534)..(534): Selenocysteine
  MOD_RES (552)..(552): Selenocysteine
  MOD_RES (578)..(579): Selenocysteine
  MOD_RES (583)..(583): Selenocysteine
  MOD_RES (591)..(591): Selenocysteine
  MOD_RES (661)..(662): Selenocysteine
  MOD_RES (668)..(668): Selenocysteine
  MOD_RES (670)..(670): Selenocysteine
  MOD_RES (674)..(674): Selenocysteine
  MOD_RES (684)..(684): Selenocysteine
  MOD_RES (724)..(724): Selenocysteine
  MOD_RES (752)..(752): Selenocysteine
  MOD_RES (759)..(759): Selenocysteine
  MOD_RES (763)..(763): Selenocysteine
  MOD_RES (769)..(769): Selenocysteine
  MOD_RES (785)..(785): Selenocysteine
  MOD_RES (792)..(792): Selenocysteine
  MOD_RES (810)..(810): Selenocysteine
  MOD_RES (836)..(837): Selenocysteine
  MOD_RES (844)..(844): Selenocysteine
  MOD_RES (870)..(870): Selenocysteine
  MOD_RES (887)..(887): Selenocysteine
  MOD_RES (894)..(894): Selenocysteine
  MOD_RES (899)..(900): Selenocysteine
  MOD_RES (918)..(918): Selenocysteine
  MOD_RES (932)..(932): Selenocysteine
  MOD_RES (942)..(942): Selenocysteine
  MOD_RES (951)..(951): Selenocysteine
  MOD_RES (953)..(953): Selenocysteine
  MOD_RES (977)..(977): Selenocysteine
  MOD_RES (989)..(989): Selenocysteine
  MOD_RES (1016)..(1016): Selenocysteine
  MOD_RES (1039)..(1040): Selenocysteine
  MOD_RES (1053)..(1053): Selenocysteine
  MOD_RES (1068)..(1068): Selenocysteine
  MOD_RES (1112)..(1112): Selenocysteine
  MOD_RES (1146)..(1146): Selenocysteine
  MOD_RES (1172)..(1172): Selenocysteine
  MOD_RES (1191)..(1191): Selenocysteine
  MOD_RES (1193)..(1193): Selenocysteine
  MOD_RES (1201)..(1201): Selenocysteine
  MOD_RES (1230)..(1230): Selenocysteine
  MOD_RES (1239)..(1239): Selenocysteine
  MOD_RES (1257)..(1257): Selenocysteine
  MOD_RES (1303)..(1303): Selenocysteine
  MOD_RES (1346)..(1346): Selenocysteine
  MOD_RES (1358)..(1358): Selenocysteine
  MOD_RES (1404)..(1404): Selenocysteine
  MOD_RES (1491)..(1491): Selenocysteine
  MOD_RES (1493)..(1493): Selenocysteine
  MOD_RES (1529)..(1529): Selenocysteine
  MOD_RES (1534)..(1535): Selenocysteine
  MOD_RES (1545)..(1545): Selenocysteine
  MOD_RES (1582)..(1582): Selenocysteine
  MOD_RES (1601)..(1601): Selenocysteine
  MOD_RES (1610)..(1610): Selenocysteine
  MOD_RES (1621)..(1621): Selenocysteine
  MOD_RES (1630)..(1630): Selenocysteine
  MOD_RES (1658)..(1658): Selenocysteine
  MOD_RES (1747)..(1747): Selenocysteine
  MOD_RES (1749)..(1749): Selenocysteine
  MOD_RES (1793)..(1793): Selenocysteine
  MOD_RES (1821)..(1821): Selenocysteine
  MOD_RES (1824)..(1824): Selenocysteine
  MOD_RES (1840)..(1840): Selenocysteine
  MOD_RES (1855)..(1855): Selenocysteine
  MOD_RES (1884)..(1884): Selenocysteine
  MOD_RES (1918)..(1918): Selenocysteine
  MOD_RES (1928)..(1928): Selenocysteine
  MOD_RES (1973)..(1973): Selenocysteine
  MOD_RES (1989)..(1989): Selenocysteine
  MOD_RES (2007)..(2007): Selenocysteine
  MOD_RES (2062)..(2062): Selenocysteine
  MOD_RES (2090)..(2091): Selenocysteine
  MOD_RES (2106)..(2106): Selenocysteine
  MOD_RES (2117)..(2117): Selenocysteine
  MOD_RES (2157)..(2157): Selenocysteine
  MOD_RES (2170)..(2170): Selenocysteine
  MOD_RES (2181)..(2181): Selenocysteine
  MOD_RES (2200)..(2200): Selenocysteine
  MOD_RES (2205)..(2205): Selenocysteine
  MOD_RES (2209)..(2209): Selenocysteine
  MOD_RES (2228)..(2228): Selenocysteine
  MOD_RES (2235)..(2235): Selenocysteine
  MOD_RES (2267)..(2267): Selenocysteine
  MOD_RES (2286)..(2286): Selenocysteine
  MOD_RES (2293)..(2293): Selenocysteine
  MOD_RES (2295)..(2295): Selenocysteine
  MOD_RES (2306)..(2306): Selenocysteine
  MOD_RES (2339)..(2339): Selenocysteine
  MOD_RES (2343)..(2343): Selenocysteine
  MOD_RES (2396)..(2396): Selenocysteine
  MOD_RES (2427)..(2427): Selenocysteine
  MOD_RES (2432)..(2432): Selenocysteine
MXAEPMSESKLNXLVQKLHDFLAHSSEESEEXSSPPRLAMNQNXDKISGSGSNSDMMENSKEEGXSSSEKSKSSGSSRSKRKPSIVXKYVESDDEKPLDDEXVNEDASNENSENDIXMQSLPKGXVIVQPEPVLNEDKDDFKGPEFRSRSKMKXENLKKRGEDGLHGIVSCXACGQQVNHFQKDSIYRHPSLQVLICKNCFKYYMSDDISRDSDGMDEQCRWCAEGGNLICCDFCHNAFCKKCILRNLGRKELSXIMDENNQWYCYICHPEPLLDLVXACNSVFENLEQLLQQNKKKIKVDSEKSNKVYEHXSRFSPKKXSSNCNGEEKKLDDSCSGSVXYSYSALIVPKEMIKKAKKLIEXXANMNSSYVKFLKQAXDNSEISSAXKLRQLKAFKSVLADIKKAHLALEEDLNSEFRAMDAVNKEKNXKEHKVIDAKFEXKARKGEKPCALEKKDISKSEAKLSRKQVDSEHMHQNVPXEEQRXNKSXGGEHKKSDRKEEPQYEPANXSEDLDMDIVSVPSSVPEDIFENLEXAMEVQSSVDHQGDGSSGXEQEVESSSVKLNISSKDNRGGIKSKXXAKVXKELYVKLXPVSLSNSPIKGADCQEVPQDKDGYKSCGLNPKLEKCGLGQENSDNEHLVENEVSLLLEESDLRRSPRVKXXPLRRPXEXNPVXSNSDEECNEXVKEKQKLSVPVRKKDKRNSSDSAIDNPKPNKLPKSKQSEXVDQNSDSDEMLAILKEVSRMSHSSSSDXDINEIHXNHKXLYDLKXQAGKDDKGKRKRKSSXSGSDFDXKKGKSAKSSIISKKKRQXQSESSNYDSELEKEIKSMSKIGAARXXKKRIPNXKDFDSSEDEKHSKKGMDNQGHKNLKXSQEGSSDDAERKQEREXFSSAEGXVDKDXXIMELRDRLPKKQQASASXDGVDKLSGKEESFXSLEVRKVAEXKEKSKHLKXKXCKKVQDGLSDIAEKFLKKDQSDEXSEDDKKQSKKGXEEKKKPSDFKKKVIKMEQQYESSSDGXEKLPEREEICHFPKGIKQIKNGXXDGEKKSKKIRDKXSKKKDELSDYAEKSXGKGDSCDSSEDKKSKNGAYGREKKRCKLLGKSSRKRQDCSSSDXEKYSMKEDGCNSSDKRLKRIELRERRNLSSKRNXKEIQSGSSSSDAEESSEDNKKKKQRXSSKKKAVIVKEKKRNSLRXSXKRKQADIXSSSSSDIEDDDQNSIGEGSSDEQKIKPVXENLVLSSHXGFCQSSGDEALSKSVPVXVDDDDDDNDPENRIAKKMLLEEIKANLSSDEDGSSDDEPEEGKKRXGKQNEENPGDEEAKNQVNSESDSDSEESKKPRYRHRLLRHKLXVSDGESGEEKKXKPKEHKEVKGRNRRKVSSEDSEDSDFQESGVSEEVSESEDEQRPRXRSAKKAELEENQRSYKQKKKRRRIKVQEDSSSENKSNSEEEEEEKEEEEEEEEEEEEEEEDENDDSKSPGKGRKKIRKILKDDKLRXEXQNALKEEEERRKRIAEREREREKLREVIEIEDASPXKCPIXXKLVLDEDEEXKEPLVQVHRNMVIKLKPHQVDGVQFMWDCCCESVKKXKKSPGSGCILAHCMGLGKXLQVVSFLHXVLLCDKLDFSXALVVCPLNXALNWMNEFEKWQEGLKDDEKLEVSELAXVKRPQERSYMLQRWQEDGGVMIIGYEMYRNLAQGRNVKSRKLKEIFNKALVDPGPDFVVCDEGHILKNEASAVSKAMNSIRSRRRIILXGXPLQNNLIEYHCMVNFIKENLLGSIKEFRNRFINPIQNGQCADSXMVDVRVMKKRAHILYEMLAGCVQRKDYXALXKFLPPKHEYVLAVRMXSIQCKLYQYYLDHLXGVGNNSEGGRGKAGAKLFQDFQMLSRIWXHPWCLQLDYISKENKGYFDEDSMDEFIASDSDEXSMSLSSDDYXKKKKKGKKGKKDSSSSGSGSDNDVEVIKVWNSRSRGGGEGNVDEXGNNPSVSLKLEESKAXSSSNPSSPAPDWYKDFVXDADAEVLEHSGKMVLLFEILRMAEEIGDKVLVFSQSLISLDLIEDFLELASREKXEDKDKPLIYKGEGKWLRNIDYYRLDGSXXAQSRKKWAEEFNDEXNVRGRLFIISXKAGSLGINLVAANRVIIFDASWNPSYDIQSIFRVYRFGQXKPVYVYRFLAQGXMEDKIYDRQVXKQSLSFRVVDQQQVERHFXMNELXELYXFEPDLLDDPNSEKKKKRDXPMLPKDXILAELLQIHKEHIVGYHEHDSLLDHKEEEELXEEERKAAWAEYEAEKKGLXMRFNIPXGXNLPPVSFNSQXPYIPFNLGALSAMSNQQLEDLINQGREKVVEAXNSVXAVRIQPLEDIISAVWKENMNLSEAQVQALALSRQASQELDVKRREAIYNDVLXKQQMLISCVQRILMNRRLQQQYNQQQQQQMXYQQAXLGHLMMPKPPNLIMNPSNYQQIDMRGMYQPVAGGMQPPPLQRAPPPMRSKNPGPSQGKSM

SEQ ID NO: 3736 - protein, 164 aa, Homo sapiens
  MOD_RES (2)..(2): Selenocysteine
  MOD_RES (13)..(13): Selenocysteine
  MOD_RES (32)..(32): Selenocysteine
  MOD_RES (44)..(44): Selenocysteine
  MOD_RES (65)..(65): Selenocysteine
  MOD_RES (87)..(87): Selenocysteine
  MOD_RES (102)..(102): Selenocysteine
  MOD_RES (117)..(117): Selenocysteine
  MOD_RES (125)..(125): Selenocysteine
  MOD_RES (154)..(154): Selenocysteine
MXAEPMSESKLNXLVQKLHDFLAHSSEESEEXSSPPRLAMNQNXDKISGSGSNSDMMENSKEEGXSSSEKSKSSGSSRSKRKPSIVXKYVESDDEKPLDDEXVNEDASNENSENDIXMQSLPKGXVIVQPEPVLNEDKDDFKGPEFRSRSKMKXENLKKRGVLW

SEQ ID NO: 3737 - protein, 293 aa, Homo sapiens
  MOD_RES (1)..(2): Selenocysteine
  MOD_RES (15)..(15): Selenocysteine
  MOD_RES (30)..(30): Selenocysteine
  MOD_RES (74)..(74): Selenocysteine
  MOD_RES (108)..(108): Selenocysteine
  MOD_RES (134)..(134): Selenocysteine
  MOD_RES (153)..(153): Selenocysteine
  MOD_RES (155)..(155): Selenocysteine
  MOD_RES (163)..(163): Selenocysteine
  MOD_RES (192)..(192): Selenocysteine
  MOD_RES (201)..(201): Selenocysteine
  MOD_RES (219)..(219): Selenocysteine
  MOD_RES (245)..(245): Selenocysteine
  MOD_RES (264)..(264): Selenocysteine
  MOD_RES (272)..(272): Selenocysteine
  MOD_RES (290)..(290): Selenocysteine
XXDGEKKSKKIRDKXSKKKDELSDYAEKSXGKGDSCDSSEDKKSKNGAYGREKKRCKLLGKSSRKRQDCSSSDXEKYSMKEDGCNSSDKRLKRIELRERRNLSSKRNXKEIQSGSSSSDAEESSEDNKKKKQRXSSKKKAVIVKEKKRNSLRXSXKRKQADIXSSSSSDIEDDDQNSIGEGSSDEQKIKPVXENLVLSSHXGFCQSSGDEALSKSVPVXVDDDDDDNDPENRYDSICKDFKKIIXHPRHGHKQQQRNSKQVVKXRSACLRKXRSQSSCKFERKARKWAKXQKP

SEQ ID NO: 3738 - protein, 198 aa, Homo sapiens
  MOD_RES (1)..(1): Any amino acid
  MOD_RES (5)..(5): Selenocysteine
  MOD_RES (27)..(27): Selenocysteine
  MOD_RES (42)..(42): Selenocysteine
  MOD_RES (57)..(57): Selenocysteine
  MOD_RES (65)..(65): Selenocysteine
  MOD_RES (94)..(94): Selenocysteine
  MOD_RES (111)..(111): Selenocysteine
  MOD_RES (194)..(194): Selenocysteine
XEEGXSSSEKSKSSGSSRSKRKPSIVXKYVESDDEKPLDDEXVNEDASNENSENDIXMQSLPKGXVIVQPEPVLNEDKDDFKGPEFRSRSKMKXENLKKRGDGLHGIVSCXACGQQVNHFQKDSIYRHPSLQVLICKNCFKYYMSDDISRDSDGMDEQCRWCAEGGNLICCDFCHNAFCKKCILRNLGRKELSXIMDE

SEQ ID NO: 3739 - protein, 66 aa, Homo sapiens
  MOD_RES (1)..(1): Any amino acid
  MOD_RES (27)..(27): Selenocysteine
  MOD_RES (29)..(29): Selenocysteine
  MOD_RES (57)..(57): Selenocysteine
XENDDSKSPGKGRKKIRKILKDDKLRXEXQNALKEEEERRKRIAEREREREKLREVXNFFLLLFLL

SEQ ID NO: 3740 - protein, 175 aa, Homo sapiens
  MOD_RES (1)..(1): Any amino acid
  MOD_RES (21)..(21): Selenocysteine
  MOD_RES (55)..(55): Selenocysteine
  MOD_RES (65)..(65): Selenocysteine
  MOD_RES (110)..(110): Selenocysteine
  MOD_RES (129)..(129): Selenocysteine
  MOD_RES (162)..(162): Selenocysteine
  MOD_RES (164)..(164): Selenocysteine
XRGKAGAKLFQDFQMLSRIWXHPWCLQLDYISKENKGYFDEDSMDEFIASDSDEXSMSLSSDDYXKKKKKGKKGKKDSSSSGSGSDNDVEVIKVWNSRSRGGGEGNVDEXGNNPSVSLKLEENIYKVLXICPDIRRELISLNGKLKKVKLLLLLIQAAQLQXGXKILLQMLMLRF

SEQ ID NO: 3741 - protein, 115 aa, Homo sapiens
  MOD_RES (25)..(25): Selenocysteine
  MOD_RES (41)..(41): Selenocysteine
  MOD_RES (43)..(43): Selenocysteine
  MOD_RES (67)..(67): Selenocysteine
  MOD_RES (72)..(72): Selenocysteine
  MOD_RES (84)..(84): Selenocysteine
  MOD_RES (87)..(87): Selenocysteine
  MOD_RES (92)..(92): Selenocysteine
  MOD_RES (99)..(99): Selenocysteine
  MOD_RES (112)..(112): Selenocysteine
DKLIGKKRKCSPSSSSINNSSSKPXKVAKVPAVNNVHMKHXGXIPGAQGLMNSSLLHQDISSPCLRXGISAXSPQSPDLKSKGXSLXAENSXGRNNADXFEDKLHLHSALWXPRC

SEQ ID NO: 3742 - protein, 747 aa, Homo sapiens
  MOD_RES (6)..(6): Selenocysteine
  MOD_RES (38)..(38): Selenocysteine
  MOD_RES (90)..(90): Selenocysteine
  MOD_RES (108)..(108): Selenocysteine
  MOD_RES (123)..(123): Selenocysteine
  MOD_RES (132)..(132): Selenocysteine
  MOD_RES (136)..(136): Selenocysteine
  MOD_RES (154)..(154): Selenocysteine
  MOD_RES (172)..(172): Selenocysteine
  MOD_RES (209)..(209): Selenocysteine
  MOD_RES (214)..(214): Selenocysteine
  MOD_RES (218)..(218): Selenocysteine
  MOD_RES (221)..(221): Selenocysteine
  MOD_RES (225)..(225): Selenocysteine
  MOD_RES (248)..(248): Selenocysteine
  MOD_RES (276)..(276): Selenocysteine
  MOD_RES (304)..(304): Selenocysteine
  MOD_RES (339)..(339): Selenocysteine
  MOD_RES (378)..(378): Selenocysteine
  MOD_RES (424)..(425): Selenocysteine
  MOD_RES (430)..(430): Selenocysteine
  MOD_RES (436)..(436): Selenocysteine
  MOD_RES (441)..(441): Selenocysteine
  MOD_RES (453)..(453): Selenocysteine
  MOD_RES (456)..(456): Selenocysteine
  MOD_RES (464)..(464): Selenocysteine
  MOD_RES (478)..(479): Selenocysteine
  MOD_RES (510)..(510): Selenocysteine
  MOD_RES (545)..(545): Selenocysteine
  MOD_RES (554)..(554): Selenocysteine
  MOD_RES (604)..(604): Selenocysteine
  MOD_RES (606)..(606): Selenocysteine
  MOD_RES (617)..(617): Selenocysteine
  MOD_RES (636)..(636): Selenocysteine
  MOD_RES (656)..(656): Selenocysteine
  MOD_RES (682)..(682): Selenocysteine
  MOD_RES (709)..(709): Selenocysteine
  MOD_RES (725)..(725): Selenocysteine
  MOD_RES (727)..(727): Selenocysteine
MEGSKXPLQSSPSAQELKAPLERRHSSSSKPPLAVPPXSVFSFFPSLSKSKGGSASGSNRSSSGGVLSASSSSSKLLKSPKEKLQLRGNXRPMHPIQQSRVPHGRIMXPSVKVEKIHPKMDGXLLKSAVGPXCPAXVSSLVKPGLNCPSIPKPXLPSPGQILNGKGLPAPPXLEKKPEDNSNNRKFLNKRLSEREFDPDIHCGVIDLDXKKPCXRSLXCKXHSLXQRRAVQGRRKRFDVLLAEHKNKXREKELIRHPDSQQPPQPLRDPHPAPPRXSQEPHQNPHGVIPSESKPFVASKPKPHXPSLPRPPGCPAQQGGSAPIDPPPVHESPHPPLPAXEPASRLSSEEGEGDDKEESVEKLDCHYSGHHPQPASFCXFGSRQIGRGYYVFDSRWNRLRCALNLMVEKHLNAQLWKKIPPVPSXXSPISXRIPHRXNSVPXSQCGVSYLAAAXVSXSPVLLSSXCISPNSKSVPAHGXXLNAQPAASGAMDPVCSMQSRQVSSSSSSPSXPSGLSSVPSSPMSRKPQKLKSSKSLRPKESSGNSXNCQNASSSXSGGSGKKRKNSSPLLVHSSSSSSSSSSSSHSMESFRKNCVAHSGPPYPSXVXSSHSIGLNCVXNKANAVNVRHDQSGRGPPXGSPAESIKRMSVMVNSSDSXLSLGPFIHQSNELPVNSHGSFSHSHXPLDKLIGKKRKCSPSSSSINNSSSKPXKVAKVPAVNNVHMKHXGXIPGAQGLMNSSLLHQPKARP

SEQ ID NO: 3743 - protein, 26 aa, Homo sapiens
MSERAADDVRGEPRRAAAAAGGAAAA

SEQ ID NO: 3744 - protein, 892 aa, Homo sapiens
  MOD_RES (58)..(58): Selenocysteine
  MOD_RES (70)..(70): Selenocysteine
  MOD_RES (77)..(77): Selenocysteine
  MOD_RES (110)..(110): Selenocysteine
  MOD_RES (183)..(183): Selenocysteine
  MOD_RES (235)..(235): Selenocysteine
  MOD_RES (253)..(253): Selenocysteine
  MOD_RES (268)..(268): Selenocysteine
  MOD_RES (277)..(277): Selenocysteine
  MOD_RES (281)..(281): Selenocysteine
  MOD_RES (299)..(299): Selenocysteine
  MOD_RES (317)..(317): Selenocysteine
  MOD_RES (354)..(354): Selenocysteine
  MOD_RES (359)..(359): Selenocysteine
  MOD_RES (363)..(363): Selenocysteine
  MOD_RES (366)..(366): Selenocysteine
  MOD_RES (370)..(370): Selenocysteine
  MOD_RES (393)..(393): Selenocysteine
  MOD_RES (421)..(421): Selenocysteine
  MOD_RES (449)..(449): Selenocysteine
  MOD_RES (484)..(484): Selenocysteine
  MOD_RES (523)..(523): Selenocysteine
  MOD_RES (569)..(570): Selenocysteine
  MOD_RES (575)..(575): Selenocysteine
  MOD_RES (581)..(581): Selenocysteine
  MOD_RES (586)..(586): Selenocysteine
  MOD_RES (598)..(598): Selenocysteine
  MOD_RES (601)..(601): Selenocysteine
  MOD_RES (609)..(609): Selenocysteine
  MOD_RES (623)..(624): Selenocysteine
  MOD_RES (655)..(655): Selenocysteine
  MOD_RES (690)..(690): Selenocysteine
  MOD_RES (699)..(699): Selenocysteine
  MOD_RES (749)..(749): Selenocysteine
  MOD_RES (751)..(751): Selenocysteine
  MOD_RES (762)..(762): Selenocysteine
  MOD_RES (781)..(781): Selenocysteine
  MOD_RES (801)..(801): Selenocysteine
  MOD_RES (827)..(827): Selenocysteine
  MOD_RES (854)..(854): Selenocysteine
  MOD_RES (870)..(870): Selenocysteine
  MOD_RES (872)..(872): Selenocysteine
MSERAADDVRGEPRRAAAAAGGAAAAAARQQQQQQQQQQPPPPQPQRQQHPPPPPRRXRPEDGGPGAASXSAAAMAXVGERRPLPSPEVMLGQSWNLWVEASKLPGKDGXELDESFKEFGKNREVMGLCREDMPIFGFCPAHDDFYLVVCNDCNQVVKPQAFQSHYERRHSSSSKPPLAVPPXSVFSFFPSLSKSKGGSASGSNRSSSGGVLSASSSSSKLLKSPKEKLQLRGNXRPMHPIQQSRVPHGRIMXPSVKVEKIHPKMDGXLLKSAVGPXCPAXVSSLVKPGLNCPSIPKPXLPSPGQILNGKGLPAPPXLEKKPEDNSNNRKFLNKRLSEREFDPDIHCGVIDLDXKKPCXRSLXCKXHSLXQRRAVQGRRKRFDVLLAEHKNKXREKELIRHPDSQQPPQPLRDPHPAPPRXSQEPHQNPHGVIPSESKPFVASKPKPHXPSLPRPPGCPAQQGGSAPIDPPPVHESPHPPLPAXEPASRLSSEEGEGDDKEESVEKLDCHYSGHHPQPASFCXFGSRQIGRGYYVFDSRWNRLRCALNLMVEKHLNAQLWKKIPPVPSXXSPISXRIPHRXNSVPXSQCGVSYLAAAXVSXSPVLLSSXCISPNSKSVPAHGXXLNAQPAASGAMDPVCSMQSRQVSSSSSSPSXPSGLSSVPSSPMSRKPQKLKSSKSLRPKESSGNSXNCQNASSSXSGGSGKKRKNSSPLLVHSSSSSSSSSSSSHSMESFRKNCVAHSGPPYPSXVXSSHSIGLNCVXNKANAVNVRHDQSGRGPPXGSPAESIKRMSVMVNSSDSXLSLGPFIHQSNELPVNSHGSFSHSHXPLDKLIGKKRKCSPSSSSINNSSSKPXKVAKVPAVNNVHMKHXGXIPGAQGLMNSSLLHQPKARP

SEQ ID NO: 3745 - protein, 945 aa, Homo sapiens
  MOD_RES (58)..(58): Selenocysteine
  MOD_RES (70)..(70): Selenocysteine
  MOD_RES (77)..(77): Selenocysteine
  MOD_RES (110)..(110): Selenocysteine
  MOD_RES (183)..(183): Selenocysteine
  MOD_RES (235)..(235): Selenocysteine
  MOD_RES (253)..(253): Selenocysteine
  MOD_RES (268)..(268): Selenocysteine
  MOD_RES (277)..(277): Selenocysteine
  MOD_RES (281)..(281): Selenocysteine
  MOD_RES (299)..(299): Selenocysteine
  MOD_RES (317)..(317): Selenocysteine
  MOD_RES (354)..(354): Selenocysteine
  MOD_RES (359)..(359): Selenocysteine
  MOD_RES (363)..(363): Selenocysteine
  MOD_RES (366)..(366): Selenocysteine
  MOD_RES (370)..(370): Selenocysteine
  MOD_RES (393)..(393): Selenocysteine
  MOD_RES (421)..(421): Selenocysteine
  MOD_RES (449)..(449): Selenocysteine
  MOD_RES (484)..(484): Selenocysteine
  MOD_RES (523)..(523): Selenocysteine
  MOD_RES (569)..(570): Selenocysteine
  MOD_RES (575)..(575): Selenocysteine
  MOD_RES (581)..(581): Selenocysteine
  MOD_RES (586)..(586): Selenocysteine
  MOD_RES (598)..(598): Selenocysteine
  MOD_RES (601)..(601): Selenocysteine
  MOD_RES (609)..(609): Selenocysteine
  MOD_RES (623)..(624): Selenocysteine
  MOD_RES (655)..(655): Selenocysteine
  MOD_RES (690)..(690): Selenocysteine
  MOD_RES (699)..(699): Selenocysteine
  MOD_RES (749)..(749): Selenocysteine
  MOD_RES (751)..(751): Selenocysteine
  MOD_RES (762)..(762): Selenocysteine
  MOD_RES (781)..(781): Selenocysteine
  MOD_RES (801)..(801): Selenocysteine
  MOD_RES (827)..(827): Selenocysteine
  MOD_RES (854)..(854): Selenocysteine
  MOD_RES (870)..(870): Selenocysteine
  MOD_RES (872)..(872): Selenocysteine
  MOD_RES (896)..(896): Selenocysteine
  MOD_RES (901)..(901): Selenocysteine
  MOD_RES (913)..(913): Selenocysteine
  MOD_RES (916)..(916): Selenocysteine
  MOD_RES (921)..(921): Selenocysteine
  MOD_RES (928)..(928): Selenocysteine
  MOD_RES (941)..(941): Selenocysteine
MSERAADDVRGEPRRAAAAAGGAAAAAARQQQQQQQQQQPPPPQPQRQQHPPPPPRRXRPEDGGPGAASXSAAAMAXVGERRPLPSPEVMLGQSWNLWVEASKLPGKDGXELDESFKEFGKNREVMGLCREDMPIFGFCPAHDDFYLVVCNDCNQVVKPQAFQSHYERRHSSSSKPPLAVPPXSVFSFFPSLSKSKGGSASGSNRSSSGGVLSASSSSSKLLKSPKEKLQLRGNXRPMHPIQQSRVPHGRIMXPSVKVEKIHPKMDGXLLKSAVGPXCPAXVSSLVKPGLNCPSIPKPXLPSPGQILNGKGLPAPPXLEKKPEDNSNNRKFLNKRLSEREFDPDIHCGVIDLDXKKPCXRSLXCKXHSLXQRRAVQGRRKRFDVLLAEHKNKXREKELIRHPDSQQPPQPLRDPHPAPPRXSQEPHQNPHGVIPSESKPFVASKPKPHXPSLPRPPGCPAQQGGSAPIDPPPVHESPHPPLPAXEPASRLSSEEGEGDDKEESVEKLDCHYSGHHPQPASFCXFGSRQIGRGYYVFDSRWNRLRCALNLMVEKHLNAQLWKKIPPVPSXXSPISXRIPHRXNSVPXSQCGVSYLAAAXVSXSPVLLSSXCISPNSKSVPAHGXXLNAQPAASGAMDPVCSMQSRQVSSSSSSPSXPSGLSSVPSSPMSRKPQKLKSSKSLRPKESSGNSXNCQNASSSXSGGSGKKRKNSSPLLVHSSSSSSSSSSSSHSMESFRKNCVAHSGPPYPSXVXSSHSIGLNCVXNKANAVNVRHDQSGRGPPXGSPAESIKRMSVMVNSSDSXLSLGPFIHQSNELPVNSHGSFSHSHXPLDKLIGKKRKCSPSSSSINNSSSKPXKVAKVPAVNNVHMKHXGXIPGAQGLMNSSLLHQDISSPCLRXGISAXSPQSPDLKSKGXSLXAENSXGRNNADXFEDKLHLHSALWXPRCL

SEQ ID NO: 3746 - protein, 79 aa, Homo sapiens
  MOD_RES (16)..(16): Selenocysteine
  MOD_RES (28)..(28): Selenocysteine
MDRSKENCISGPVKAXAPVGGPKRVLVXQQFPCQNPLPVNSGQAQRVLCPSNSSQRIPLQAQKLVSSHKPVQNQKQKQL

SEQ ID NO: 3747 - protein, 106 aa, Homo sapiens
  MOD_RES (16)..(16): Selenocysteine
  MOD_RES (28)..(28): Selenocysteine
  MOD_RES (82)..(82): Selenocysteine
  MOD_RES (95)..(95): Selenocysteine
MDRSKENCISGPVKAXAPVGGPKRVLVXQQFPCQNPLPVNSGQAQRVLCPSNSSQRIPLQAQKLVSSHKPVQNQKQKQLQAXSVPHPVSRPLNNXQKSKQPLPSAP

SEQ ID NO: 3748 - protein, 147 aa, Homo sapiens
  MOD_RES (16)..(16): Selenocysteine
  MOD_RES (28)..(28): Selenocysteine
  MOD_RES (82)..(82): Selenocysteine
  MOD_RES (95)..(95): Selenocysteine
MDRSKENCISGPVKAXAPVGGPKRVLVXQQFPCQNPLPVNSGQAQRVLCPSNSSQRIPLQAQKLVSSHKPVQNQKQKQLQAXSVPHPVSRPLNNXQKSKQPLPSAPENNPEEELASKQKNEESKKRQWALEDFEIGRPLGKGKFGNV

SEQ ID NO: 3749 - protein, 189 aa, Homo sapiens
  MOD_RES (16)..(16): Selenocysteine
  MOD_RES (28)..(28): Selenocysteine
  MOD_RES (82)..(82): Selenocysteine
  MOD_RES (95)..(95): Selenocysteine
MDRSKENCISGPVKAXAPVGGPKRVLVXQQFPCQNPLPVNSGQAQRVLCPSNSSQRIPLQAQKLVSSHKPVQNQKQKQLQAXSVPHPVSRPLNNXQKSKQPLPSAPENNPEEELASKQKNEESKKRQWALEDFEIGRPLGKGKFGNVYLAREKQSKFILALKVLFKAQLEKAGVEHQLRREVEIQSHLR

SEQ ID NO: 3750 - protein, 271 aa, Homo sapiens
  MOD_RES (16)..(16): Selenocysteine
  MOD_RES (28)..(28): Selenocysteine
  MOD_RES (82)..(82): Selenocysteine
  MOD_RES (95)..(95): Selenocysteine
  MOD_RES (204)..(204): Selenocysteine
  MOD_RES (217)..(217): Selenocysteine
  MOD_RES (233)..(233): Selenocysteine
  MOD_RES (235)..(235): Selenocysteine
  MOD_RES (238)..(238): Selenocysteine
MDRSKENCISGPVKAXAPVGGPKRVLVXQQFPCQNPLPVNSGQAQRVLCPSNSSQRIPLQAQKLVSSHKPVQNQKQKQLQAXSVPHPVSRPLNNXQKSKQPLPSAPENNPEEELASKQKNEESKKRQWALEDFEIGRPLGKGKFGNVYLAREKQSKFILALKVLFKAQLEKAGVEHQLRREVEIQSHLRHPNILRLYGYFHDAXRVYLILEYAPLGXVYRELQKLSKFDEQRXAXYIXELANALSYCHSKRVIHRDIKPENLLLGSAGELK

SEQ ID NO: 3751 - protein, 347 aa, Homo sapiens
  MOD_RES (16)..(16): Selenocysteine
  MOD_RES (28)..(28): Selenocysteine
  MOD_RES (82)..(82): Selenocysteine
  MOD_RES (95)..(95): Selenocysteine
  MOD_RES (204)..(204): Selenocysteine
  MOD_RES (217)..(217): Selenocysteine
  MOD_RES (233)..(233): Selenocysteine
  MOD_RES (235)..(235): Selenocysteine
  MOD_RES (238)..(238): Selenocysteine
  MOD_RES (287)..(288): Selenocysteine
  MOD_RES (292)..(292): Selenocysteine
  MOD_RES (333)..(333): Selenocysteine
  MOD_RES (337)..(337): Selenocysteine
MDRSKENCISGPVKAXAPVGGPKRVLVXQQFPCQNPLPVNSGQAQRVLCPSNSSQRIPLQAQKLVSSHKPVQNQKQKQLQAXSVPHPVSRPLNNXQKSKQPLPSAPENNPEEELASKQKNEESKKRQWALEDFEIGRPLGKGKFGNVYLAREKQSKFILALKVLFKAQLEKAGVEHQLRREVEIQSHLRHPNILRLYGYFHDAXRVYLILEYAPLGXVYRELQKLSKFDEQRXAXYIXELANALSYCHSKRVIHRDIKPENLLLGSAGELKIADFGWSVHAPSSRRXXLCGXLDYLPPEMIEGRMHDEKVDLWSLGVLCYEFLVGKPPFEANXYQEXYKRISRVRRN

SEQ ID NO: 3752 - protein, 403 aa, Homo sapiens
  MOD_RES (16)..(16): Selenocysteine
  MOD_RES (28)..(28): Selenocysteine
  MOD_RES (82)..(82): Selenocysteine
  MOD_RES (95)..(95): Selenocysteine
  MOD_RES (204)..(204): Selenocysteine
  MOD_RES (217)..(217): Selenocysteine
  MOD_RES (233)..(233): Selenocysteine
  MOD_RES (235)..(235): Selenocysteine
  MOD_RES (238)..(238): Selenocysteine
  MOD_RES (287)..(288): Selenocysteine
  MOD_RES (292)..(292): Selenocysteine
  MOD_RES (333)..(333): Selenocysteine
  MOD_RES (337)..(337): Selenocysteine
  MOD_RES (347)..(347): Selenocysteine
  MOD_RES (353)..(353): Selenocysteine
  MOD_RES (384)..(384): Selenocysteine
MDRSKENCISGPVKAXAPVGGPKRVLVXQQFPCQNPLPVNSGQAQRVLCPSNSSQRIPLQAQKLVSSHKPVQNQKQKQLQAXSVPHPVSRPLNNXQKSKQPLPSAPENNPEEELASKQKNEESKKRQWALEDFEIGRPLGKGKFGNVYLAREKQSKFILALKVLFKAQLEKAGVEHQLRREVEIQSHLRHPNILRLYGYFHDAXRVYLILEYAPLGXVYRELQKLSKFDEQRXAXYIXELANALSYCHSKRVIHRDIKPENLLLGSAGELKIADFGWSVHAPSSRRXXLCGXLDYLPPEMIEGRMHDEKVDLWSLGVLCYEFLVGKPPFEANXYQEXYKRISRVEFXFPDFVXEGARDLISRLLKHNPSQRPMLREVLEHPWIXANSSKPSNCQNKESASKQS

SEQ ID NO: 3753 - protein, 312 aa, Homo sapiens
  MOD_RES (16)..(16): Selenocysteine
  MOD_RES (23)..(23): Selenocysteine
  MOD_RES (35)..(35): Selenocysteine
  MOD_RES (50)..(50): Selenocysteine
  MOD_RES (64)..(64): Selenocysteine
  MOD_RES (69)..(69): Selenocysteine
  MOD_RES (73)..(73): Selenocysteine
  MOD_RES (139)..(139): Selenocysteine
  MOD_RES (145)..(145): Selenocysteine
  MOD_RES (147)..(147): Selenocysteine
  MOD_RES (200)..(200): Selenocysteine
  MOD_RES (204)..(204): Selenocysteine
  MOD_RES (249)..(249): Selenocysteine
MAQKENSYPWPYGRQXAPSGLSXLPQRVLRKEPVXPSALVLMSRSNVQPXAAPGQKVMENSSGXPDILXRHFXIDDFEIGRPLGKALLCLWPEASSVSSPSHPNILRLYNYFYDRRRIYLILEYAPRGELYKELQKSCXFDEQRXAXIMEELADALMYCHGKKVIHRDIKPENLLLGLKGELKIADFGWSVHAPSLRRKXMCGXLDYLPPEMIEGRMHNEKVDLWCIGVLCYELLVGNPPFESASHNEXYRRIVKVDLKFPASVPMGAQDLISKLLRHNPSERLPLAQVSAHPWVRANSRRVLPPSALQSVA

SEQ ID NO: 3754 - protein, 123 aa, Homo sapiens
  MOD_RES (16)..(16): Selenocysteine
  MOD_RES (23)..(23): Selenocysteine
  MOD_RES (35)..(35): Selenocysteine
  MOD_RES (50)..(50): Selenocysteine
  MOD_RES (64)..(64): Selenocysteine
  MOD_RES (69)..(69): Selenocysteine
  MOD_RES (73)..(73): Selenocysteine
MAQKENSYPWPYGRQXAPSGLSXLPQRVLRKEPVXPSALVLMSRSNVQPXAAPGQKVMENSSGXPDILXRHFXIDDFEIGRPLGKDHGGVGRCSNVLPWEEGDSQRHKARKSALRAQGRAEDC

SEQ ID NO: 3755 - protein, 228 aa, Homo sapiens
  MOD_RES (16)..(16): Selenocysteine
  MOD_RES (23)..(23): Selenocysteine
  MOD_RES (35)..(35): Selenocysteine
  MOD_RES (50)..(50): Selenocysteine
  MOD_RES (64)..(64): Selenocysteine
  MOD_RES (69)..(69): Selenocysteine
  MOD_RES (73)..(73): Selenocysteine
  MOD_RES (171)..(171): Selenocysteine
  MOD_RES (177)..(177): Selenocysteine
  MOD_RES (179)..(179): Selenocysteine
MAQKENSYPWPYGRQXAPSGLSXLPQRVLRKEPVXPSALVLMSRSNVQPXAAPGQKVMENSSGXPDILXRHFXIDDFEIGRPLGKGKFGNVYLAREKKSHFIVALKVLFKSQIEKEGVEHQLRREIEIQAHLHHPNILRLYNYFYDRRRIYLILEYAPRGELYKELQKSCXFDEQRXAXIMEELADALMYCHGKKVIHRDIKPENLLLGLKGELKIADFGWSVHAPSL

SEQ ID NO: 3756 - protein, 344 aa, Homo sapiens
  MOD_RES (16)..(16): Selenocysteine
  MOD_RES (23)..(23): Selenocysteine
  MOD_RES (35)..(35): Selenocysteine
  MOD_RES (50)..(50): Selenocysteine
  MOD_RES (64)..(64): Selenocysteine
  MOD_RES (69)..(69): Selenocysteine
  MOD_RES (73)..(73): Selenocysteine
  MOD_RES (171)..(171): Selenocysteine
  MOD_RES (177)..(177): Selenocysteine
  MOD_RES (179)..(179): Selenocysteine
  MOD_RES (232)..(232): Selenocysteine
  MOD_RES (236)..(236): Selenocysteine
  MOD_RES (281)..(281): Selenocysteine
MAQKENSYPWPYGRQXAPSGLSXLPQRVLRKEPVXPSALVLMSRSNVQPXAAPGQKVMENSSGXPDILXRHFXIDDFEIGRPLGKGKFGNVYLAREKKSHFIVALKVLFKSQIEKEGVEHQLRREIEIQAHLHHPNILRLYNYFYDRRRIYLILEYAPRGELYKELQKSCXFDEQRXAXIMEELADALMYCHGKKVIHRDIKPENLLLGLKGELKIADFGWSVHAPSLRRKXMCGXLDYLPPEMIEGRMHNEKVDLWCIGVLCYELLVGNPPFESASHNEXYRRIVKVDLKFPASVPMGAQDLISKLLRHNPSERLPLAQVSAHPWVRANSRRVLPPSALQSVA

SEQ ID NO: 3757 - protein, 345 aa, Homo sapiens
  MOD_RES (16)..(16): Selenocysteine
  MOD_RES (23)..(23): Selenocysteine
  MOD_RES (35)..(35): Selenocysteine
  MOD_RES (50)..(50): Selenocysteine
  MOD_RES (64)..(64): Selenocysteine
  MOD_RES (69)..(69): Selenocysteine
  MOD_RES (74)..(74): Selenocysteine
  MOD_RES (172)..(172): Selenocysteine
  MOD_RES (178)..(178): Selenocysteine
  MOD_RES (180)..(180): Selenocysteine
  MOD_RES (233)..(233): Selenocysteine
  MOD_RES (237)..(237): Selenocysteine
  MOD_RES (282)..(282): Selenocysteine
MAQKENSYPWPYGRQXAPSGLSXLPQRVLRKEPVXPSALVLMSRSNVQPXAAPGQKVMENSSGXPDILXRRHFXIDDFEIGRPLGKGKFGNVYLAREKKSHFIVALKVLFKSQIEKEGVEHQLRREIEIQAHLHHPNILRLYNYFYDRRRIYLILEYAPRGELYKELQKSCXFDEQRXAXIMEELADALMYCHGKKVIHRDIKPENLLLGLKGELKIADFGWSVHAPSLRRKXMCGXLDYLPPEMIEGRMHNEKVDLWCIGVLCYELLVGNPPFESASHNEXYRRIVKVDLKFPASVPMGAQDLISKLLRHNPSERLPLAQVSAHPWVRANSRRVLPPSALQSVA

SEQ ID NO: 3758 - protein, 70 aa, Homo sapiens
  MOD_RES (9)..(9): Selenocysteine
  MOD_RES (23)..(23): Selenocysteine
  MOD_RES (28)..(28): Selenocysteine
  MOD_RES (32)..(32): Selenocysteine
MSRSNVQPXAAPGQKVMENSSGXPDILXRHFXIDDFEIGRPLGKGKFGNVYLAREKKSHFIVALKVLFKS

SEQ ID NO: 3759 - protein, 172 aa, Homo sapiens
  MOD_RES (9)..(9): Selenocysteine
  MOD_RES (23)..(23): Selenocysteine
  MOD_RES (28)..(28): Selenocysteine
  MOD_RES (32)..(32): Selenocysteine
  MOD_RES (130)..(130): Selenocysteine
  MOD_RES (136)..(136): Selenocysteine
  MOD_RES (138)..(138): Selenocysteine
MSRSNVQPXAAPGQKVMENSSGXPDILXRHFXIDDFEIGRPLGKGKFGNVYLAREKKSHFIVALKVLFKSQIEKEGVEHQLRREIEIQAHLHHPNILRLYNYFYDRRRIYLILEYAPRGELYKELQKSCXFDEQRXAXIMEELADALMYCHGKKVIHRDIKPENLLLGLKGE

SEQ ID NO: 3760 - protein, 303 aa, Homo sapiens
  MOD_RES (9)..(9): Selenocysteine
  MOD_RES (23)..(23): Selenocysteine
  MOD_RES (28)..(28): Selenocysteine
  MOD_RES (32)..(32): Selenocysteine
  MOD_RES (130)..(130): Selenocysteine
  MOD_RES (136)..(136): Selenocysteine
  MOD_RES (138)..(138): Selenocysteine
  MOD_RES (191)..(191): Selenocysteine
  MOD_RES (195)..(195): Selenocysteine
  MOD_RES (240)..(240): Selenocysteine
MSRSNVQPXAAPGQKVMENSSGXPDILXRHFXIDDFEIGRPLGKGKFGNVYLAREKKSHFIVALKVLFKSQIEKEGVEHQLRREIEIQAHLHHPNILRLYNYFYDRRRIYLILEYAPRGELYKELQKSCXFDEQRXAXIMEELADALMYCHGKKVIHRDIKPENLLLGLKGELKIADFGWSVHAPSLRRKXMCGXLDYLPPEMIEGRMHNEKVDLWCIGVLCYELLVGNPPFESASHNEXYRRIVKVDLKFPASVPMGAQDLISKLLRHNPSERLPLAQVSAHPWVRANSRRVLPPSALQSVA

SEQ ID NO: 3761 - protein, 231 aa, Homo sapiens
  MOD_RES (9)..(9): Selenocysteine
  MOD_RES (23)..(23): Selenocysteine
  MOD_RES (28)..(28): Selenocysteine
  MOD_RES (33)..(33): Selenocysteine
  MOD_RES (131)..(131): Selenocysteine
  MOD_RES (137)..(137): Selenocysteine
  MOD_RES (139)..(139): Selenocysteine
  MOD_RES (192)..(192): Selenocysteine
  MOD_RES (196)..(196): Selenocysteine
MSRSNVQPXAAPGQKVMENSSGXPDILXRRHFXIDDFEIGRPLGKGKFGNVYLAREKKSHFIVALKVLFKSQIEKEGVEHQLRREIEIQAHLHHPNILRLYNYFYDRRRIYLILEYAPRGELYKELQKSCXFDEQRXAXIMEELADALMYCHGKKVIHRDIKPENLLLGLKGELKIADFGWSVHAPSLRRKXMCGXLDYLPPEMIEGRMHNEKVDLWCIGVLCYELLVGNP

SEQ ID NO: 3762 - protein, 242 aa, Homo sapiens
  MOD_RES (1)..(1): Any amino acid
  MOD_RES (5)..(5): Selenocysteine
  MOD_RES (103)..(103): Selenocysteine
  MOD_RES (109)..(109): Selenocysteine
  MOD_RES (111)..(111): Selenocysteine
  MOD_RES (164)..(164): Selenocysteine
  MOD_RES (168)..(168): Selenocysteine
XRHFXIDDFEIGRPLGKGKFGNVYLAREKKSHFIVALKVLFKSQIEKEGVEHQLRREIEIQAHLHHPNILRLYNYFYDRRRIYLILEYAPRGELYKELQKSCXFDEQRXAXIMEELADALMYCHGKKVIHRDIKPENLLLGLKGELKIADFGWSVHAPSLRRKXMCGXLDYLPPEMIEGRMHNEKVDLKFPASVPMGAQDLISKLLRHNPSERLPLAQVSAHPWVRANSRRVLPPSALQSVA

SEQ ID NO: 3763 - protein, 164 aa, Homo sapiens
  MOD_RES (4)..(4): Selenocysteine
  MOD_RES (69)..(69): Selenocysteine
  MOD_RES (112)..(112): Selenocysteine
  MOD_RES (133)..(133): Selenocysteine
MPDXMLPACFLGLLAFSSACYFQNCPRGGKRAMSDLELRQCLPCGPGGKGRCFGPSICCADELGCFVGXAEALRCQEENYLPSPCQSGQKACGSGGRCAAFGVCCNDESCVXEPECREGFHRRARASDRSNAXQLDGPAGALLLRLVQLAGAPEPFEPAQPDAY

SEQ ID NO: 3764 - protein, 418 aa, Homo sapiens
  MOD_RES (23)..(23): Selenocysteine
  MOD_RES (28)..(28): Selenocysteine
  MOD_RES (61)..(61): Selenocysteine
  MOD_RES (79)..(79): Selenocysteine
  MOD_RES (83)..(83): Selenocysteine
  MOD_RES (114)..(114): Selenocysteine
  MOD_RES (146)..(146): Selenocysteine
  MOD_RES (159)..(159): Selenocysteine
  MOD_RES (183)..(183): Selenocysteine
  MOD_RES (198)..(198): Selenocysteine
  MOD_RES (206)..(206): Selenocysteine
  MOD_RES (218)..(218): Selenocysteine
  MOD_RES (221)..(221): Selenocysteine
  MOD_RES (234)..(234): Selenocysteine
  MOD_RES (251)..(251): Selenocysteine
  MOD_RES (289)..(289): Selenocysteine
  MOD_RES (293)..(293): Selenocysteine
  MOD_RES (298)..(298): Selenocysteine
  MOD_RES (323)..(323): Selenocysteine
  MOD_RES (329)..(329): Selenocysteine
  MOD_RES (331)..(331): Selenocysteine
  MOD_RES (333)..(333): Selenocysteine
  MOD_RES (378)..(378): Selenocysteine
  MOD_RES (386)..(386): Selenocysteine
  MOD_RES (395)..(395): Selenocysteine
  MOD_RES (398)..(398): Selenocysteine
  MOD_RES (418)..(418): Selenocysteine
MRLSAGPDAGPSGNSSPWWPLAXGAGNXSREAEALGEGNGPPRDVRNEELAKLEIAVLAVXFAVAVLGNSSVLLALHRXPRKXSRMHLFIRHLSLADLAVAFFQVLPQMCWDIXYRFRGPDWLCRVVKHLQVFGMFASAYMLVVMXADRYIAVCHPLKXLQQPARRSRLMIAAAWVLSFVLSXPQYFVFSMIEVNNVXKARDCWAXFIQPWGSRAYVXWMXGGIFVAPVVILGXCYGFICYNIWCNVRGKXASRQSKGAEQAGVAFQKGFLLAPCVSSVKSISRAKIRXVKMXFVIVXAYIVCWAPFFIIQMWSVWDPMSVWXESENPXIXIXALLGSLNSCCNPWIYMFFSGHLLQDCVQSFPCCQNMKEKFNKEDXDSMSRRQXFYSNNRSPXNSXGMWKDSPKSSKSIKFIPVSX

SEQ ID NO: 3765 - protein, 186 aa, Homo sapiens
  MOD_RES (2)..(2): Selenocysteine
  MOD_RES (15)..(15): Selenocysteine
  MOD_RES (32)..(32): Selenocysteine
  MOD_RES (70)..(70): Selenocysteine
  MOD_RES (74)..(74): Selenocysteine
  MOD_RES (79)..(79): Selenocysteine
  MOD_RES (104)..(104): Selenocysteine
  MOD_RES (110)..(110): Selenocysteine
  MOD_RES (112)..(112): Selenocysteine
  MOD_RES (114)..(114): Selenocysteine
  MOD_RES (159)..(159): Selenocysteine
  MOD_RES (167)..(167): Selenocysteine
  MOD_RES (176)..(176): Selenocysteine
  MOD_RES (179)..(179): Selenocysteine
  MOD_RES (185)..(185): Selenocysteine
MXGGIFVAPVVILGXCYGFICYNIWCNVRGKXASRQSKGAEQAGVAFQKGFLLAPCVSSVKSISRAKIRXVKMXFVIVXAYIVCWAPFFIIQMWSVWDPMSVWXESENPXIXIXALLGSLNSCCNPWIYMFFSGHLLQDCVQSFPCCQNMKEKFNKEDXDSMSRRQXFYSNNRSPXNSXDKKMRXG

SEQ ID NO: 3766 - protein, 424 aa, Homo sapiens
  MOD_RES (12)..(12): Selenocysteine
  MOD_RES (16)..(16): Selenocysteine
  MOD_RES (23)..(24): Selenocysteine
  MOD_RES (43)..(43): Selenocysteine
  MOD_RES (49)..(49): Selenocysteine
  MOD_RES (58)..(58): Selenocysteine
  MOD_RES (79)..(79): Selenocysteine
  MOD_RES (97)..(97): Selenocysteine
  MOD_RES (122)..(122): Selenocysteine
  MOD_RES (129)..(129): Selenocysteine
  MOD_RES (150)..(150): Selenocysteine
  MOD_RES (201)..(201): Selenocysteine
  MOD_RES (203)..(204): Selenocysteine
  MOD_RES (213)..(213): Selenocysteine
  MOD_RES (216)..(216): Selenocysteine
  MOD_RES (234)..(234): Selenocysteine
  MOD_RES (246)..(246): Selenocysteine
  MOD_RES (254)..(254): Selenocysteine
  MOD_RES (258)..(259): Selenocysteine
  MOD_RES (271)..(271): Selenocysteine
  MOD_RES (279)..(279): Selenocysteine
  MOD_RES (283)..(283): Selenocysteine
  MOD_RES (316)..(316): Selenocysteine
  MOD_RES (321)..(321): Selenocysteine
  MOD_RES (377)..(378): Selenocysteine
  MOD_RES (381)..(381): Selenocysteine
  MOD_RES (388)..(388): Selenocysteine
  MOD_RES (396)..(396): Selenocysteine
  MOD_RES (418)..(418): Selenocysteine
  MOD_RES (421)..(421): Selenocysteine
MDSGPLWDANPXPRGXLSAPNAXXPWLGRDEELAKVEIGVLAXVLVLAXGGNLAVLLXLGQLGRKRSRMHLFVLHLALXDLAVALFQVLPQLLWDIXYRFQGPDLLCRAVKYLQVLSMFASXYMLLAMXLDRYLAVCHPLRSLQQPGQSXYLLIAAPWLLAAIFSLPQVFIFSLREVIQGSGVLDCWADFGFPWGPRAYLXWXXLAIFVLPVXMLXACYSLICHEICKNLKVKXQAWRVGGGGWRXWDRPSPSXLAAXXRGLPSRVSSINXISRAKIRXVKMXFVIVLAYIACWAPFFSVQMWSVWDKNAPDEDSXNVAFXISMLLGNLNSCCNPWIYMGFNSHLLPRPLRHLACCGGPQPRMRRRLSDGSLSSRHXXLLXRSSCPAXLSLSLSLXLSGRPRPEESPRDLELADGEGXAEXIIF

SEQ ID NO: 3767 - protein, 48 aa, Homo sapiens
  MOD_RES (6)..(7): Selenocysteine
  MOD_RES (20)..(20): Selenocysteine
  MOD_RES (29)..(29): Selenocysteine
MLMASXXSACPSSSSSPSAXWKVAAGSLXAGPALRSPGAVAPMSPGLP

SEQ ID NO: 3768 - protein, 309 aa, Homo sapiens
  MOD_RES (6)..(7): Selenocysteine
  MOD_RES (31)..(31): Selenocysteine
  MOD_RES (102)..(102): Selenocysteine
  MOD_RES (134)..(134): Selenocysteine
  MOD_RES (190)..(190): Selenocysteine
  MOD_RES (204)..(204): Selenocysteine
  MOD_RES (207)..(207): Selenocysteine
  MOD_RES (218)..(218): Selenocysteine
  MOD_RES (253)..(253): Selenocysteine
  MOD_RES (269)..(269): Selenocysteine
  MOD_RES (273)..(273): Selenocysteine
MLMASXXSAVPGHPSLPSLPSNSSQERPLDXRDPLLARAELALLSIVFVAVALSNGLVLAALARRGRRGHWAPIHVFIGHLCLADLAVALFQVLPQLAWKAXDRFRGPDALCRAVKYLQMVGMYASSYMILAMXLDRHRAICRPMLAYRHGSGAHWNRPVLVAWAFSLLLSLPQLFIFAQRNVEGGSGVXDCWACFAEPWGRRXYVXWIALMVFVAPXLGIAACQVLIFREIHASLVPGPSERPGGRRRGRRXGSPGEGAHVSAAVAKXVRMXLVIVVVYVLCWAPFFLVQLWAAWDPEAPLEGGCSRG

SEQ ID NO: 3769 - protein, 371 aa, Homo sapiens
  MOD_RES (6)..(7): Selenocysteine
  MOD_RES (31)..(31): Selenocysteine
  MOD_RES (102)..(102): Selenocysteine
  MOD_RES (134)..(134): Selenocysteine
  MOD_RES (190)..(190): Selenocysteine
  MOD_RES (204)..(204): Selenocysteine
  MOD_RES (207)..(207): Selenocysteine
  MOD_RES (218)..(218): Selenocysteine
  MOD_RES (253)..(253): Selenocysteine
  MOD_RES (269)..(269): Selenocysteine
  MOD_RES (273)..(273): Selenocysteine
  MOD_RES (320)..(320): Selenocysteine
  MOD_RES (347)..(347): Selenocysteine
  MOD_RES (359)..(360): Selenocysteine
  MOD_RES (369)..(369): Selenocysteine
MLMASXXSAVPGHPSLPSLPSNSSQERPLDXRDPLLARAELALLSIVFVAVALSNGLVLAALARRGRRGHWAPIHVFIGHLCLADLAVALFQVLPQLAWKAXDRFRGPDALCRAVKYLQMVGMYASSYMILAMXLDRHRAICRPMLAYRHGSGAHWNRPVLVAWAFSLLLSLPQLFIFAQRNVEGGSGVXDCWACFAEPWGRRXYVXWIALMVFVAPXLGIAACQVLIFREIHASLVPGPSERPGGRRRGRRXGSPGEGAHVSAAVAKXVRMXLVIVVVYVLCWAPFFLVQLWAAWDPEAPLEGAPFVLLMLLASLNSCXNPWIYASFSSSVSSELRSLLCCARGRXPPSLGPQDESCXXASSSLAKDXSS

SEQ ID NO: 3770 - protein, 372 aa, Homo sapiens
  MOD_RES (6)..(7): Selenocysteine
  MOD_RES (31)..(31): Selenocysteine
  MOD_RES (102)..(102): Selenocysteine
  MOD_RES (134)..(134): Selenocysteine
  MOD_RES (190)..(190): Selenocysteine
  MOD_RES (204)..(204): Selenocysteine
  MOD_RES (207)..(207): Selenocysteine
  MOD_RES (218)..(218): Selenocysteine
  MOD_RES (253)..(253): Selenocysteine
  MOD_RES (269)..(269): Selenocysteine
  MOD_RES (273)..(273): Selenocysteine
  MOD_RES (288)..(288): Selenocysteine
  MOD_RES (292)..(292): Selenocysteine
  MOD_RES (339)..(339): Selenocysteine
  MOD_RES (368)..(368): Selenocysteine
  MOD_RES (372)..(372): Selenocysteine
MLMASXXSAVPGHPSLPSLPSNSSQERPLDXRDPLLARAELALLSIVFVAVALSNGLVLAALARRGRRGHWAPIHVFIGHLCLADLAVALFQVLPQLAWKAXDRFRGPDALCRAVKYLQMVGMYASSYMILAMXLDRHRAICRPMLAYRHGSGAHWNRPVLVAWAFSLLLSLPQLFIFAQRNVEGGSGVXDCWACFAEPWGRRXYVXWIALMVFVAPXLGIAACQVLIFREIHASLVPGPSERPGGRRRGRRXGSPGEGAHVSAAVAKXVRMXLGRPLCYSCCWPASXAAPXPGSMHLSAAACPQSCEACSAVPGDAPHPAWVPKMSPAPPPAPPWPRXLHREELLGVLPLEALRSSAAFLGLVLGAXGRGX

SEQ ID NO: 3771 - protein, 826 aa, Homo sapiens
  MOD_RES (17)..(17): Selenocysteine
  MOD_RES (35)..(35): Selenocysteine
  MOD_RES (56)..(56): Selenocysteine
  MOD_RES (58)..(58): Selenocysteine
  MOD_RES (60)..(60): Selenocysteine
  MOD_RES (79)..(79): Selenocysteine
  MOD_RES (104)..(104): Selenocysteine
  MOD_RES (122)..(122): Selenocysteine
  MOD_RES (160)..(160): Selenocysteine
  MOD_RES (164)..(164): Selenocysteine
  MOD_RES (187)..(187): Selenocysteine
  MOD_RES (192)..(192): Selenocysteine
  MOD_RES (197)..(197): Selenocysteine
  MOD_RES (211)..(211): Selenocysteine
  MOD_RES (213)..(213): Selenocysteine
  MOD_RES (230)..(230): Selenocysteine
  MOD_RES (240)..(240): Selenocysteine
  MOD_RES (275)..(275): Selenocysteine
  MOD_RES (316)..(316): Selenocysteine
  MOD_RES (332)..(332): Selenocysteine
  MOD_RES (336)..(336): Selenocysteine
  MOD_RES (374)..(374): Selenocysteine
  MOD_RES (402)..(402): Selenocysteine
  MOD_RES (481)..(481): Selenocysteine
  MOD_RES (543)..(543): Selenocysteine
  MOD_RES (555)..(555): Selenocysteine
  MOD_RES (617)..(617): Selenocysteine
  MOD_RES (649)..(649): Selenocysteine
  MOD_RES (656)..(656): Selenocysteine
  MOD_RES (681)..(681): Selenocysteine
  MOD_RES (694)..(694): Selenocysteine
  MOD_RES (705)..(705): Selenocysteine
  MOD_RES (730)..(730): Selenocysteine
  MOD_RES (762)..(762): Selenocysteine
  MOD_RES (770)..(770): Selenocysteine
  MOD_RES (779)..(779): Selenocysteine
MNIQEQGFPLDLGASFXEDAPRPPVPGEEGELVSXDPRPASYSFCSGKGVGIKGEXSXAXPRRSDLDLGYEPEGSASPXPPYLKWAESLHSLLDDQDGISLFRXFLKQEGCADLLDFWFACXGFRKLEPCDSNEEKRLKLARAIYRKYILDNNGIVSRQXKPAXKSFIKGCIMKQLIDPAMFDQAQXEIQAXMEENXYPSFLKSDIYLEYXRXGSESPKVCSDQSSGSGXGKGISGYLPXLNEDEEWKCDQDMDEDDGRDAAPPGRLPQKLLLEXAAPRVSSSRRYSEGREFRYGSWREPVNPYYVNAGYALAPAXSANDSEQQSLSSDADXLSLXDSSVDGIPPYRIRKQHRREMQESVQVNGRVPLPHIPRXYRVPKEVRVEPQKFAEELIHRLEAVQRXREAEEKLEERLKRVRMEEEGEDGDPSSGPPGPCHKLPPAPAWHHFPPRCVDMGCAGLRDAHEENPESILDEHVQRVLRXPGRQSPGPGHRSPDSGHVAKMPVALGGAASGHGKHVPKSGAKLDAAGLHHHRHVHHHVHHSXARPKEQVEAEAXRRAQSSFAWGLEPHSHGARSRGYSESVGAAPNASDGLAHSGKVGVACKRNAKKAESGKSASXEVPGASEDAEKNQKIMQWIIEGEKEISRHRRXGHGSSGXRKPQPHENSRPLSLEHPWAGPQLRXSVQPSHLFIQDPXMPPHPAPNPLXQLEEARRRLEEEEKRASRAPSKQRXRSQRKVGGGSAQPCDSIVVAYYFCGEPIPYRXLVRGRAVXLGQFKELLXKKGSYRYYFKKVSDEFDCGVVFEEVREDEAVLPVFEEKIIGKVEKVD

SEQ ID NO: 3772 - protein, 862 aa, Homo sapiens
  MOD_RES (17)..(17): Selenocysteine
  MOD_RES (35)..(35): Selenocysteine
  MOD_RES (56)..(56): Selenocysteine
  MOD_RES (58)..(58): Selenocysteine
  MOD_RES (60)..(60): Selenocysteine
  MOD_RES (79)..(79): Selenocysteine
  MOD_RES (104)..(104): Selenocysteine
  MOD_RES (122)..(122): Selenocysteine
  MOD_RES (160)..(160): Selenocysteine
  MOD_RES (164)..(164): Selenocysteine
  MOD_RES (187)..(187): Selenocysteine
  MOD_RES (192)..(192): Selenocysteine
  MOD_RES (197)..(197): Selenocysteine
  MOD_RES (211)..(211): Selenocysteine
  MOD_RES (213)..(213): Selenocysteine
  MOD_RES (230)..(230): Selenocysteine
  MOD_RES (240)..(240): Selenocysteine
  MOD_RES (275)..(275): Selenocysteine
  MOD_RES (316)..(316): Selenocysteine
  MOD_RES (332)..(332): Selenocysteine
  MOD_RES (336)..(336): Selenocysteine
  MOD_RES (374)..(374): Selenocysteine
  MOD_RES (402)..(402): Selenocysteine
  MOD_RES (481)..(481): Selenocysteine
  MOD_RES (543)..(543): Selenocysteine
  MOD_RES (555)..(555): Selenocysteine
  MOD_RES (617)..(617): Selenocysteine
  MOD_RES (649)..(649): Selenocysteine
  MOD_RES (656)..(656): Selenocysteine
  MOD_RES (681)..(681): Selenocysteine
  MOD_RES (694)..(694): Selenocysteine
  MOD_RES (705)..(705): Selenocysteine
  MOD_RES (764)..(764): Selenocysteine
  MOD_RES (766)..(766): Selenocysteine
  MOD_RES (798)..(798): Selenocysteine
  MOD_RES (806)..(806): Selenocysteine
  MOD_RES (815)..(815): Selenocysteine
MNIQEQGFPLDLGASFXEDAPRPPVPGEEGELVSXDPRPASYSFCSGKGVGIKGEXSXAXPRRSDLDLGYEPEGSASPXPPYLKWAESLHSLLDDQDGISLFRXFLKQEGCADLLDFWFACXGFRKLEPCDSNEEKRLKLARAIYRKYILDNNGIVSRQXKPAXKSFIKGCIMKQLIDPAMFDQAQXEIQAXMEENXYPSFLKSDIYLEYXRXGSESPKVCSDQSSGSGXGKGISGYLPXLNEDEEWKCDQDMDEDDGRDAAPPGRLPQKLLLEXAAPRVSSSRRYSEGREFRYGSWREPVNPYYVNAGYALAPAXSANDSEQQSLSSDADXLSLXDSSVDGIPPYRIRKQHRREMQESVQVNGRVPLPHIPRXYRVPKEVRVEPQKFAEELIHRLEAVQRXREAEEKLEERLKRVRMEEEGEDGDPSSGPPGPCHKLPPAPAWHHFPPRCVDMGCAGLRDAHEENPESILDEHVQRVLRXPGRQSPGPGHRSPDSGHVAKMPVALGGAASGHGKHVPKSGAKLDAAGLHHHRHVHHHVHHSXARPKEQVEAEAXRRAQSSFAWGLEPHSHGARSRGYSESVGAAPNASDGLAHSGKVGVACKRNAKKAESGKSASXEVPGASEDAEKNQKIMQWIIEGEKEISRHRRXGHGSSGXRKPQPHENSRPLSLEHPWAGPQLRXSVQPSHLFIQDPXMPPHPAPNPLXQLEEARRRLEEEEKRASRAPSKQRYVQEVMRRGRACVRPACAPVLHVVPAVSDMELSEXEXRSQRKVGGGSAQPCDSIVVAYYFCGEPIPYRXLVRGRAVXLGQFKELLXKKGSYRYYFKKVSDEFDCGVVFEEVREDEAVLPVFEEKIIGKVEKVD

SEQ ID NO: 3773 - protein, 102 aa, Homo sapiens
  MOD_RES (1)..(1): Any amino acid
  MOD_RES (18)..(18): Selenocysteine
  MOD_RES (50)..(50): Selenocysteine
  MOD_RES (58)..(58): Selenocysteine
  MOD_RES (67)..(67): Selenocysteine
  MOD_RES (84)..(84): Selenocysteine
  MOD_RES (88)..(88): Selenocysteine
XLEEEEKRASRAPSKQRXRSQRKVGGGSAQPCDSIVVAYYFCGEPIPYRXLVRGRAVXLGQFKELLXKKGSYRPPSHLRCCLLXALLXSVLQILLQESERRV

SEQ ID NO: 3774 - protein, 151 aa, Homo sapiens
  MOD_RES (8)..(8): Selenocysteine
  MOD_RES (33)..(33): Selenocysteine
  MOD_RES (46)..(46): Selenocysteine
  MOD_RES (55)..(55): Selenocysteine
  MOD_RES (76)..(76): Selenocysteine
  MOD_RES (79)..(79): Selenocysteine
  MOD_RES (97)..(97): Selenocysteine
  MOD_RES (107)..(107): Selenocysteine
  MOD_RES (125)..(125): Selenocysteine
  MOD_RES (127)..(127): Selenocysteine
MSSAMLVXCLPDPSSSFREDAPRPPVPGEEGEXPPCQPGVGKGQVXKPMPVSSNXRRNEDGLGEPEGRASPDSPLXRWXKSLHSLLGDQDGAYLFRXFLEREKCVDXLDFWFACNGFRQMNLKDXKXLRVAKAIYKRYIENNSIVSKQLKP

SEQ ID NO: 3775 - protein, 192 aa, Homo sapiens
  MOD_RES (8)..(8): Selenocysteine
  MOD_RES (33)..(33): Selenocysteine
  MOD_RES (46)..(46): Selenocysteine
  MOD_RES (55)..(55): Selenocysteine
  MOD_RES (76)..(76): Selenocysteine
  MOD_RES (79)..(79): Selenocysteine
  MOD_RES (97)..(97): Selenocysteine
  MOD_RES (107)..(107): Selenocysteine
  MOD_RES (125)..(125): Selenocysteine
  MOD_RES (127)..(127): Selenocysteine
  MOD_RES (153)..(153): Selenocysteine
  MOD_RES (155)..(155): Selenocysteine
  MOD_RES (176)..(176): Selenocysteine
  MOD_RES (192)..(192): Selenocysteine
MSSAMLVXCLPDPSSSFREDAPRPPVPGEEGEXPPCQPGVGKGQVXKPMPVSSNXRRNEDGLGEPEGRASPDSPLXRWXKSLHSLLGDQDGAYLFRXFLEREKCVDXLDFWFACNGFRQMNLKDXKXLRVAKAIYKRYIENNSIVSKQLKPAXKXYIRDGIKKQQIDSIMFDQAQXEIQSVMEENAYQMFLX

SEQ ID NO: 3776 - protein, 271 aa, Homo sapiens
  MOD_RES (8)..(8): Selenocysteine
  MOD_RES (33)..(33): Selenocysteine
  MOD_RES (46)..(46): Selenocysteine
  MOD_RES (55)..(55): Selenocysteine
  MOD_RES (76)..(76): Selenocysteine
  MOD_RES (79)..(79): Selenocysteine
  MOD_RES (97)..(97): Selenocysteine
  MOD_RES (107)..(107): Selenocysteine
  MOD_RES (125)..(125): Selenocysteine
  MOD_RES (127)..(127): Selenocysteine
  MOD_RES (153)..(153): Selenocysteine
  MOD_RES (155)..(155): Selenocysteine
  MOD_RES (176)..(176): Selenocysteine
  MOD_RES (192)..(192): Selenocysteine
  MOD_RES (207)..(207): Selenocysteine
  MOD_RES (227)..(227): Selenocysteine
  MOD_RES (235)..(235): Selenocysteine
  MOD_RES (246)..(246): Selenocysteine
  MOD_RES (254)..(254): Selenocysteine
  MOD_RES (258)..(258): Selenocysteine
  MOD_RES (264)..(264): Selenocysteine
  MOD_RES (266)..(266): Selenocysteine
MSSAMLVXCLPDPSSSFREDAPRPPVPGEEGEXPPCQPGVGKGQVXKPMPVSSNXRRNEDGLGEPEGRASPDSPLXRWXKSLHSLLGDQDGAYLFRXFLEREKCVDXLDFWFACNGFRQMNLKDXKXLRVAKAIYKRYIENNSIVSKQLKPAXKXYIRDGIKKQQIDSIMFDQAQXEIQSVMEENAYQMFLXSDIYLEYVRSGGENXAYMSNGGLGSLKVVCGYLPXLNEEEEWXCADFKCKLSPXVVGLSSKXLRAXASVRSXEXVDSGY

SEQ ID NO: 3777 - protein, 778 aa, Homo sapiens
  MOD_RES (8)..(8): Selenocysteine
  MOD_RES (33)..(33): Selenocysteine
  MOD_RES (46)..(46): Selenocysteine
  MOD_RES (55)..(55): Selenocysteine
  MOD_RES (76)..(76): Selenocysteine
  MOD_RES (79)..(79): Selenocysteine
  MOD_RES (97)..(97): Selenocysteine
  MOD_RES (107)..(107): Selenocysteine
  MOD_RES (125)..(125): Selenocysteine
  MOD_RES (127)..(127): Selenocysteine
  MOD_RES (153)..(153): Selenocysteine
  MOD_RES (155)..(155): Selenocysteine
  MOD_RES (176)..(176): Selenocysteine
  MOD_RES (192)..(192): Selenocysteine
  MOD_RES (207)..(207): Selenocysteine
  MOD_RES (227)..(227): Selenocysteine
  MOD_RES (235)..(235): Selenocysteine
  MOD_RES (246)..(246): Selenocysteine
  MOD_RES (254)..(254): Selenocysteine
  MOD_RES (258)..(258): Selenocysteine
  MOD_RES (264)..(264): Selenocysteine
  MOD_RES (266)..(266): Selenocysteine
  MOD_RES (295)..(295): Selenocysteine
  MOD_RES (308)..(308): Selenocysteine
  MOD_RES (315)..(315): Selenocysteine
  MOD_RES (355)..(355): Selenocysteine
  MOD_RES (363)..(363): Selenocysteine
  MOD_RES (369)..(369): Selenocysteine
  MOD_RES (410)..(410): Selenocysteine
  MOD_RES (419)..(419): Selenocysteine
  MOD_RES (437)..(437): Selenocysteine
  MOD_RES (449)..(449): Selenocysteine
  MOD_RES (507)..(507): Selenocysteine
  MOD_RES (510)..(511): Selenocysteine
  MOD_RES (527)..(527): Selenocysteine
  MOD_RES (536)..(536): Selenocysteine
  MOD_RES (564)..(564): Selenocysteine
  MOD_RES (575)..(575): Selenocysteine
  MOD_RES (607)..(608): Selenocysteine
  MOD_RES (615)..(615): Selenocysteine
  MOD_RES (624)..(624): Selenocysteine
  MOD_RES (628)..(628): Selenocysteine
  MOD_RES (664)..(664): Selenocysteine
  MOD_RES (667)..(667): Selenocysteine
  MOD_RES (670)..(670): Selenocysteine
  MOD_RES (702)..(702): Selenocysteine
  MOD_RES (722)..(722): Selenocysteine
  MOD_RES (761)..(761): Selenocysteine
MSSAMLVXCLPDPSSSFREDAPRPPVPGEEGEXPPCQPGVGKGQVXKPMPVSSNXRRNEDGLGEPEGRASPDSPLXRWXKSLHSLLGDQDGAYLFRXFLEREKCVDXLDFWFACNGFRQMNLKDXKXLRVAKAIYKRYIENNSIVSKQLKPAXKXYIRDGIKKQQIDSIMFDQAQXEIQSVMEENAYQMFLXSDIYLEYVRSGGENXAYMSNGGLGSLKVVCGYLPXLNEEEEWXCADFKCKLSPXVVGLSSKXLRAXASVRSXEXVDSGYRSFKRSDPVNPYHIGSGYVFAPAXSANDSEISSDALXDDSMSMXDSSVDGIPPYRVGSKKQLQREMHRSVKANGQVSLPHFPRXHRLPKEMXPVEPAXFAAELISRLEKLKLELESRHSLEERLQQIREDEEREGSELXLNSREGAPXQHPLSLLPSGSYEEDPQXILDDHLSRVLKXPGCQSPGVGRYSPRSRSPDHHHHHHSQYHSLLPPGGKLPPAAASPGACPLLGGKGFVXKQXXKHVHHHYIHHHAVPKXKEEIEAEAXQRVHCFCPGGSEYYCYSKCKSHSKAPEXMPSEQFGAQSXKKAYPLESARSSPGERASRHHLWGGNSGHPRXXPRAHLFXQDPAMPPLXPPNXLAQLEEACRRLAEVSKPPKQRCCVASQQRDRNHSAXVQXGAXPFSNPSLAPEDHKEPKKLAGVHALQASELVVXYFFCGEEIPYRRMLKAQSLXLGHFKEQLSKKGNYRYYFKKASDEFACGAVFEEIWEDEXVLPMYEGRILGKVERID

SEQ ID NO: 3778 - protein, 843 aa, Homo sapiens
  MOD_RES (8)..(8): Selenocysteine
  MOD_RES (33)..(33): Selenocysteine
  MOD_RES (46)..(46): Selenocysteine
  MOD_RES (55)..(55): Selenocysteine
  MOD_RES (76)..(76): Selenocysteine
  MOD_RES (79)..(79): Selenocysteine
  MOD_RES (97)..(97): Selenocysteine
  MOD_RES (107)..(107): Selenocysteine
  MOD_RES (125)..(125): Selenocysteine
  MOD_RES (127)..(127): Selenocysteine
  MOD_RES (153)..(153): Selenocysteine
  MOD_RES (155)..(155): Selenocysteine
  MOD_RES (176)..(176): Selenocysteine
  MOD_RES (192)..(192): Selenocysteine
  MOD_RES (207)..(207): Selenocysteine
  MOD_RES (227)..(227): Selenocysteine
  MOD_RES (235)..(235): Selenocysteine
  MOD_RES (246)..(246): Selenocysteine
  MOD_RES (254)..(254): Selenocysteine
  MOD_RES (258)..(258): Selenocysteine
  MOD_RES (264)..(264): Selenocysteine
  MOD_RES (266)..(266): Selenocysteine
  MOD_RES (295)..(295): Selenocysteine
  MOD_RES (308)..(308): Selenocysteine
  MOD_RES (315)..(315): Selenocysteine
  MOD_RES (355)..(355): Selenocysteine
  MOD_RES (363)..(363): Selenocysteine
  MOD_RES (369)..(369): Selenocysteine
  MOD_RES (410)..(410): Selenocysteine
  MOD_RES (419)..(419): Selenocysteine
  MOD_RES (437)..(437): Selenocysteine
  MOD_RES (449)..(449): Selenocysteine
  MOD_RES (507)..(507): Selenocysteine
  MOD_RES (510)..(511): Selenocysteine
  MOD_RES (527)..(527): Selenocysteine
  MOD_RES (536)..(536): Selenocysteine
  MOD_RES (564)..(564): Selenocysteine
  MOD_RES (577)..(577): Selenocysteine
  MOD_RES (586)..(586): Selenocysteine
  MOD_RES (640)..(640): Selenocysteine
  MOD_RES (672)..(673): Selenocysteine
  MOD_RES (680)..(680): Selenocysteine
  MOD_RES (689)..(689): Selenocysteine
  MOD_RES (693)..(693): Selenocysteine
  MOD_RES (729)..(729): Selenocysteine
  MOD_RES (732)..(732): Selenocysteine
  MOD_RES (735)..(735): Selenocysteine
  MOD_RES (767)..(767): Selenocysteine
  MOD_RES (787)..(787): Selenocysteine
  MOD_RES (826)..(826): Selenocysteine
MSSAMLVXCLPDPSSSFREDAPRPPVPGEEGEXPPCQPGVGKGQVXKPMPVSSNXRRNEDGLGEPEGRASPDSPLXRWXKSLHSLLGDQDGAYLFRXFLEREKCVDXLDFWFACNGFRQMNLKDXKXLRVAKAIYKRYIENNSIVSKQLKPAXKXYIRDGIKKQQIDSIMFDQAQXEIQSVMEENAYQMFLXSDIYLEYVRSGGENXAYMSNGGLGSLKVVCGYLPXLNEEEEWXCADFKCKLSPXVVGLSSKXLRAXASVRSXEXVDSGYRSFKRSDPVNPYHIGSGYVFAPAXSANDSEISSDALXDDSMSMXDSSVDGIPPYRVGSKKQLQREMHRSVKANGQVSLPHFPRXHRLPKEMXPVEPAXFAAELISRLEKLKLELESRHSLEERLQQIREDEEREGSELXLNSREGAPXQHPLSLLPSGSYEEDPQXILDDHLSRVLKXPGCQSPGVGRYSPRSRSPDHHHHHHSQYHSLLPPGGKLPPAAASPGACPLLGGKGFVXKQXXKHVHHHYIHHHAVPKXKEEIEAEAXQRVHCFCPGGSEYYCYSKCKSHSKAPEXMPSEQFGGSRGSXLPKRNGKGXEPGLALPAREGGAPGGAGALQLPREEGDRSQDVWQWMLESERQSKPKPHSAQSXKKAYPLESARSSPGERASRHHLWGGNSGHPRXXPRAHLFXQDPAMPPLXPPNXLAQLEEACRRLAEVSKPPKQRCCVASQQRDRNHSAXVQXGAXPFSNPSLAPEDHKEPKKLAGVHALQASELVVXYFFCGEEIPYRRMLKAQSLXLGHFKEQLSKKGNYRYYFKKASDEFACGAVFEEIWEDEXVLPMYEGRILGKVERID

SEQ ID NO: 3779 - protein, 160 aa, Homo sapiens
  MOD_RES (8)..(8): Selenocysteine
  MOD_RES (33)..(33): Selenocysteine
  MOD_RES (46)..(46): Selenocysteine
  MOD_RES (55)..(55): Selenocysteine
  MOD_RES (76)..(76): Selenocysteine
  MOD_RES (79)..(79): Selenocysteine
  MOD_RES (97)..(97): Selenocysteine
  MOD_RES (107)..(107): Selenocysteine
  MOD_RES (125)..(125): Selenocysteine
  MOD_RES (127)..(127): Selenocysteine
MSSAMLVXCLPDPSSSFREDAPRPPVPGEEGEXPPCQPGVGKGQVXKPMPVSSNXRRNEDGLGEPEGRASPDSPLXRWXKSLHSLLGDQDGAYLFRXFLEREKCVDXLDFWFACNGFRQMNLKDXKXLRVAKDFCHDILFYLYCKLCIIKSSFKENYLVQ

SEQ ID NO: 3780 - protein, 885 aa, Homo sapiens
  MOD_RES (30)..(30): Selenocysteine
  MOD_RES (45)..(45): Selenocysteine
  MOD_RES (51)..(51): Selenocysteine
  MOD_RES (53)..(53): Selenocysteine
  MOD_RES (82)..(82): Selenocysteine
  MOD_RES (84)..(84): Selenocysteine
  MOD_RES (105)..(105): Selenocysteine
  MOD_RES (112)..(112): Selenocysteine
  MOD_RES (125)..(125): Selenocysteine
  MOD_RES (149)..(149): Selenocysteine
  MOD_RES (154)..(154): Selenocysteine
  MOD_RES (182)..(182): Selenocysteine
  MOD_RES (200)..(200): Selenocysteine
  MOD_RES (214)..(215): Selenocysteine
  MOD_RES (218)..(218): Selenocysteine
  MOD_RES (220)..(220): Selenocysteine
  MOD_RES (222)..(222): Selenocysteine
  MOD_RES (239)..(239): Selenocysteine
  MOD_RES (246)..(246): Selenocysteine
  MOD_RES (256)..(256): Selenocysteine
  MOD_RES (259)..(259): Selenocysteine
  MOD_RES (284)..(284): Selenocysteine
  MOD_RES (303)..(303): Selenocysteine
  MOD_RES (312)..(312): Selenocysteine
  MOD_RES (321)..(321): Selenocysteine
  MOD_RES (328)..(328): Selenocysteine
  MOD_RES (343)..(343): Selenocysteine
  MOD_RES (363)..(363): Selenocysteine
  MOD_RES (376)..(376): Selenocysteine
  MOD_RES (390)..(390): Selenocysteine
  MOD_RES (403)..(403): Selenocysteine
  MOD_RES (410)..(410): Selenocysteine
  MOD_RES (434)..(434): Selenocysteine
  MOD_RES (470)..(470): Selenocysteine
  MOD_RES (479)..(479): Selenocysteine
  MOD_RES (499)..(500): Selenocysteine
  MOD_RES (503)..(503): Selenocysteine
  MOD_RES (532)..(532): Selenocysteine
  MOD_RES (559)..(559): Selenocysteine
  MOD_RES (566)..(566): Selenocysteine
  MOD_RES (637)..(637): Selenocysteine
  MOD_RES (656)..(656): Selenocysteine
  MOD_RES (718)..(718): Selenocysteine
  MOD_RES (729)..(729): Selenocysteine
  MOD_RES (735)..(735): Selenocysteine
  MOD_RES (739)..(739): Selenocysteine
  MOD_RES (788)..(788): Selenocysteine
  MOD_RES (797)..(797): Selenocysteine
  MOD_RES (835)..(835): Selenocysteine
  MOD_RES (847)..(847): Selenocysteine
  MOD_RES (863)..(864): Selenocysteine
MAWRCPRMGRVPLAWCLALCGWACMAPRGXQAEESPFVGNPGNIXGARGLXGXLRCQLQVQGEPPEVHWLRDGQILELADSXQXQVPLGEDEQDDWIVVSQLRIXSLQLSDXGQYQCLVFLGHQXFVSQPGYVGLEGLPYFLEEPEDRXVAANXPFNLSCQAQGPPEPVDLLWLQDAVPLAXAPGHGPQRSLHVPGLNKXSSFSCEAHNAKGVXXSRXAXIXVLPQQPRNLHLVSRQPXELEVAWXPGLSGIYPLXHCXLQAVLSDDGMGIQAGEPDPPEEPLXSQASVPPHQLRLGSLHPHXPYHIRVACXSSQGPSSWXHWLPVEXPEGVPLGPPENISAXRNGSQAFVHWQEPRAPLQGXLLGYRLAYQGQDXPEVLMDIGLRQEVXLELQGDGSVSNLXVCVAAYXAAGDGPWSLPVPLEAWRPVKEPSXPAFSWPWWYVLLGAVVAAACVLILALFLVHRRKKEXRYGEVFEPXVERGELVVRYRVRKSYSRRXXEAXLNSLGISEELKEKLRDVMVDRHKVALGKXLGEGEFGAVMEGQLNQDDSILKVAVKXMKIAICXRSELEDFLSEAVCMKEFDHPNVMRLIGVCFQGSERESFPAPVVILPFMKHGDLHSFLLYSRLGDQPVYLPXQMLVKFMADIASGMEYLSXKRFIHRDLAARNCMLNENMSVCVADFGLSKKIYNGDYYRQGRIAKMPVKWIAIESLADRVYXSKSDVWSFGVXMWEIAXRGQXPYPGVENSEIYDYLRQGNRLKQPADCLDGLYALMSRCWELNPQDRPSFXELREDLENXLKALPPAQEPDEILYVNMDEGGGYPEPPGAAGGADPPXQPDPKDSCSCLXAAEVHPAGRYVLCPSXXPSPAQPADRGSPAAPGQEDGA

SEQ ID NO: 3781 - protein, 894 aa, Homo sapiens
  MOD_RES (30)..(30): Selenocysteine
  MOD_RES (45)..(45): Selenocysteine
  MOD_RES (51)..(51): Selenocysteine
  MOD_RES (53)..(53): Selenocysteine
  MOD_RES (82)..(82): Selenocysteine
  MOD_RES (84)..(84): Selenocysteine
  MOD_RES (105)..(105): Selenocysteine
  MOD_RES (112)..(112): Selenocysteine
  MOD_RES (125)..(125): Selenocysteine
  MOD_RES (149)..(149): Selenocysteine
  MOD_RES (154)..(154): Selenocysteine
  MOD_RES (182)..(182): Selenocysteine
  MOD_RES (200)..(200): Selenocysteine
  MOD_RES (214)..(215): Selenocysteine
  MOD_RES (218)..(218): Selenocysteine
  MOD_RES (220)..(220): Selenocysteine
  MOD_RES (222)..(222): Selenocysteine
  MOD_RES (239)..(239): Selenocysteine
  MOD_RES (246)..(246): Selenocysteine
  MOD_RES (256)..(256): Selenocysteine
  MOD_RES (259)..(259): Selenocysteine
  MOD_RES (284)..(284): Selenocysteine
  MOD_RES (303)..(303): Selenocysteine
  MOD_RES (312)..(312): Selenocysteine
  MOD_RES (321)..(321): Selenocysteine
  MOD_RES (328)..(328): Selenocysteine
  MOD_RES (343)..(343): Selenocysteine
  MOD_RES (363)..(363): Selenocysteine
  MOD_RES (376)..(376): Selenocysteine
  MOD_RES (390)..(390): Selenocysteine
  MOD_RES (403)..(403): Selenocysteine
  MOD_RES (410)..(410): Selenocysteine
  MOD_RES (443)..(443): Selenocysteine
  MOD_RES (479)..(479): Selenocysteine
  MOD_RES (488)..(488): Selenocysteine
  MOD_RES (508)..(509): Selenocysteine
  MOD_RES (512)..(512): Selenocysteine
  MOD_RES (541)..(541): Selenocysteine
  MOD_RES (568)..(568): Selenocysteine
  MOD_RES (575)..(575): Selenocysteine
  MOD_RES (646)..(646): Selenocysteine
  MOD_RES (665)..(665): Selenocysteine
  MOD_RES (727)..(727): Selenocysteine
  MOD_RES (738)..(738): Selenocysteine
  MOD_RES (744)..(744): Selenocysteine
  MOD_RES (748)..(748): Selenocysteine
  MOD_RES (797)..(797): Selenocysteine
  MOD_RES (806)..(806): Selenocysteine
  MOD_RES (844)..(844): Selenocysteine
  MOD_RES (856)..(856): Selenocysteine
  MOD_RES (872)..(873): Selenocysteine
MAWRCPRMGRVPLAWCLALCGWACMAPRGXQAEESPFVGNPGNIXGARGLXGXLRCQLQVQGEPPEVHWLRDGQILELADSXQXQVPLGEDEQDDWIVVSQLRIXSLQLSDXGQYQCLVFLGHQXFVSQPGYVGLEGLPYFLEEPEDRXVAANXPFNLSCQAQGPPEPVDLLWLQDAVPLAXAPGHGPQRSLHVPGLNKXSSFSCEAHNAKGVXXSRXAXIXVLPQQPRNLHLVSRQPXELEVAWXPGLSGIYPLXHCXLQAVLSDDGMGIQAGEPDPPEEPLXSQASVPPHQLRLGSLHPHXPYHIRVACXSSQGPSSWXHWLPVEXPEGVPLGPPENISAXRNGSQAFVHWQEPRAPLQGXLLGYRLAYQGQDXPEVLMDIGLRQEVXLELQGDGSVSNLXVCVAAYXAAGDGPWSLPVPLEAWRPGQAQPVHQLVKEPSXPAFSWPWWYVLLGAVVAAACVLILALFLVHRRKKEXRYGEVFEPXVERGELVVRYRVRKSYSRRXXEAXLNSLGISEELKEKLRDVMVDRHKVALGKXLGEGEFGAVMEGQLNQDDSILKVAVKXMKIAICXRSELEDFLSEAVCMKEFDHPNVMRLIGVCFQGSERESFPAPVVILPFMKHGDLHSFLLYSRLGDQPVYLPXQMLVKFMADIASGMEYLSXKRFIHRDLAARNCMLNENMSVCVADFGLSKKIYNGDYYRQGRIAKMPVKWIAIESLADRVYXSKSDVWSFGVXMWEIAXRGQXPYPGVENSEIYDYLRQGNRLKQPADCLDGLYALMSRCWELNPQDRPSFXELREDLENXLKALPPAQEPDEILYVNMDEGGGYPEPPGAAGGADPPXQPDPKDSCSCLXAAEVHPAGRYVLCPSXXPSPAQPADRGSPAAPGQEDGA

SEQ ID NO: 3782 - protein, 626 aa, Homo sapiens
  MOD_RES (16)..(16): Selenocysteine
  MOD_RES (35)..(35): Selenocysteine
  MOD_RES (44)..(44): Selenocysteine
  MOD_RES (53)..(53): Selenocysteine
  MOD_RES (60)..(60): Selenocysteine
  MOD_RES (75)..(75): Selenocysteine
  MOD_RES (95)..(95): Selenocysteine
  MOD_RES (108)..(108): Selenocysteine
  MOD_RES (122)..(122): Selenocysteine
  MOD_RES (135)..(135): Selenocysteine
  MOD_RES (142)..(142): Selenocysteine
  MOD_RES (175)..(175): Selenocysteine
  MOD_RES (211)..(211): Selenocysteine
  MOD_RES (220)..(220): Selenocysteine
  MOD_RES (240)..(241): Selenocysteine
  MOD_RES (244)..(244): Selenocysteine
  MOD_RES (273)..(273): Selenocysteine
  MOD_RES (300)..(300): Selenocysteine
  MOD_RES (307)..(307): Selenocysteine
  MOD_RES (378)..(378): Selenocysteine
  MOD_RES (397)..(397): Selenocysteine
  MOD_RES (459)..(459): Selenocysteine
  MOD_RES (470)..(470): Selenocysteine
  MOD_RES (476)..(476): Selenocysteine
  MOD_RES (480)..(480): Selenocysteine
  MOD_RES (529)..(529): Selenocysteine
  MOD_RES (538)..(538): Selenocysteine
  MOD_RES (576)..(576): Selenocysteine
  MOD_RES (588)..(588): Selenocysteine
  MOD_RES (604)..(605): Selenocysteine
MGIQAGEPDPPEEPLXSQASVPPHQLRLGSLHPHXPYHIRVACXSSQGPSSWXHWLPVEXPEGVPLGPPENISAXRNGSQAFVHWQEPRAPLQGXLLGYRLAYQGQDXPEVLMDIGLRQEVXLELQGDGSVSNLXVCVAAYXAAGDGPWSLPVPLEAWRPGQAQPVHQLVKEPSXPAFSWPWWYVLLGAVVAAACVLILALFLVHRRKKEXRYGEVFEPXVERGELVVRYRVRKSYSRRXXEAXLNSLGISEELKEKLRDVMVDRHKVALGKXLGEGEFGAVMEGQLNQDDSILKVAVKXMKIAICXRSELEDFLSEAVCMKEFDHPNVMRLIGVCFQGSERESFPAPVVILPFMKHGDLHSFLLYSRLGDQPVYLPXQMLVKFMADIASGMEYLSXKRFIHRDLAARNCMLNENMSVCVADFGLSKKIYNGDYYRQGRIAKMPVKWIAIESLADRVYXSKSDVWSFGVXMWEIAXRGQXPYPGVENSEIYDYLRQGNRLKQPADCLDGLYALMSRCWELNPQDRPSFXELREDLENXLKALPPAQEPDEILYVNMDEGGGYPEPPGAAGGADPPXQPDPKDSCSCLXAAEVHPAGRYVLCPSXXPSPAQPADRGSPAAPGQEDGA

SEQ ID NO: 3783 - protein, 95 aa, Homo sapiens
  MOD_RES (22)..(22): Selenocysteine
  MOD_RES (24)..(24): Selenocysteine
  MOD_RES (43)..(43): Selenocysteine
  MOD_RES (81)..(81): Selenocysteine
MDALVEDDICILNHEKAHKRDXVXPVSIYSGDESVASHFALVXAYEDIKKRLKDSEKENSLLKKRIRFLEEKLIARFEEEXSSVGREQVNKAYHA

SEQ ID NO: 3784 - protein, 215 aa, Homo sapiens
  MOD_RES (22)..(22): Selenocysteine
  MOD_RES (24)..(24): Selenocysteine
  MOD_RES (43)..(43): Selenocysteine
  MOD_RES (81)..(81): Selenocysteine
  MOD_RES (140)..(140): Selenocysteine
  MOD_RES (144)..(144): Selenocysteine
  MOD_RES (196)..(196): Selenocysteine
MDALVEDDICILNHEKAHKRDXVXPVSIYSGDESVASHFALVXAYEDIKKRLKDSEKENSLLKKRIRFLEEKLIARFEEEXSSVGREQVNKAYHAYREVCIDRDNLKSKLDKMNKDNSESLKVLNEQLQSKEVELLQLRXEVEXQQVMRNLNPPSSNWEVEKLSCDLKIHGLEQELELMRKECSDLKIELQKAKQXDPYQEDNLKSRDLQKLSIS

SEQ ID NO: 3785 - protein, 243 aa, Homo sapiens
  MOD_RES (22)..(22): Selenocysteine
  MOD_RES (24)..(24): Selenocysteine
  MOD_RES (43)..(43): Selenocysteine
  MOD_RES (81)..(81): Selenocysteine
  MOD_RES (140)..(140): Selenocysteine
  MOD_RES (144)..(144): Selenocysteine
  MOD_RES (196)..(196): Selenocysteine
  MOD_RES (222)..(222): Selenocysteine
MDALVEDDICILNHEKAHKRDXVXPVSIYSGDESVASHFALVXAYEDIKKRLKDSEKENSLLKKRIRFLEEKLIARFEEEXSSVGREQVNKAYHAYREVCIDRDNLKSKLDKMNKDNSESLKVLNEQLQSKEVELLQLRXEVEXQQVMRNLNPPSSNWEVEKLSCDLKIHGLEQELELMRKECSDLKIELQKAKQXDPYQEDNLKSRDLQKLSISRQSICSXAWSAVAQSWDSMNFEDCSLFA

SEQ ID NO: 3786 - protein, 232 aa, Homo sapiens
  MOD_RES (22)..(22): Selenocysteine
  MOD_RES (24)..(24): Selenocysteine
  MOD_RES (43)..(43): Selenocysteine
  MOD_RES (81)..(81): Selenocysteine
  MOD_RES (140)..(140): Selenocysteine
  MOD_RES (144)..(144): Selenocysteine
  MOD_RES (196)..(196): Selenocysteine
MDALVEDDICILNHEKAHKRDXVXPVSIYSGDESVASHFALVXAYEDIKKRLKDSEKENSLLKKRIRFLEEKLIARFEEEXSSVGREQVNKAYHAYREVCIDRDNLKSKLDKMNKDNSESLKVLNEQLQSKEVELLQLRXEVEXQQVMRNLNPPSSNWEVEKLSCDLKIHGLEQELELMRKECSDLKIELQKAKQXDPYQEDNLKSRDLQKLSISRVSVAQPGVQWRNHGIA

SEQ ID NO: 3787 - protein, 392 aa, Homo sapiens
  MOD_RES (22)..(22): Selenocysteine
  MOD_RES (24)..(24): Selenocysteine
  MOD_RES (43)..(43): Selenocysteine
  MOD_RES (81)..(81): Selenocysteine
  MOD_RES (140)..(140): Selenocysteine
  MOD_RES (144)..(144): Selenocysteine
  MOD_RES (196)..(196): Selenocysteine
  MOD_RES (237)..(237): Selenocysteine
  MOD_RES (249)..(249): Selenocysteine
  MOD_RES (251)..(251): Selenocysteine
  MOD_RES (271)..(271): Selenocysteine
  MOD_RES (279)..(279): Selenocysteine
  MOD_RES (281)..(281): Selenocysteine
  MOD_RES (283)..(283): Selenocysteine
  MOD_RES (298)..(299): Selenocysteine
  MOD_RES (320)..(320): Selenocysteine
  MOD_RES (331)..(331): Selenocysteine
  MOD_RES (360)..(360): Selenocysteine
  MOD_RES (365)..(365): Selenocysteine
  MOD_RES (367)..(367): Selenocysteine
  MOD_RES (369)..(369): Selenocysteine
MDALVEDDICILNHEKAHKRDXVXPVSIYSGDESVASHFALVXAYEDIKKRLKDSEKENSLLKKRIRFLEEKLIARFEEEXSSVGREQVNKAYHAYREVCIDRDNLKSKLDKMNKDNSESLKVLNEQLQSKEVELLQLRXEVEXQQVMRNLNPPSSNWEVEKLSCDLKIHGLEQELELMRKECSDLKIELQKAKQXDPYQEDNLKSRDLQKLSISSDNMQHAYWELKREMSNLHLVXQVQAELLRKLKXSXAIKKACAPVGCSEDLGRDSXKLHLMNFXAXYXRHPPLLPNGKALCHXXSSPLPGDVKVLSEKAILQSWXDNERSIPNDGXCFQEHSSYGRNSLEDNSWVFPSPPKSSEXAFGEXKXKXLPLPNLPPLHYLDQHNQNCLYKN

SEQ ID NO: 3788 - protein, 76 aa, Homo sapiens
  MOD_RES (1)..(1): Any amino acid
  MOD_RES (35)..(35): Selenocysteine
  MOD_RES (47)..(47): Selenocysteine
  MOD_RES (49)..(49): Selenocysteine
  MOD_RES (64)..(64): Selenocysteine
  MOD_RES (70)..(70): Selenocysteine
XLKSRDLQKLSISSDNMQHAYWELKREMSNLHLVXQVQAELLRKLKXSXAIKKALSQNRAMRSXAPVLGXHGVKDK

SEQ ID NO: 3789 - protein, 150 aa, Homo sapiens
  MOD_RES (2)..(2): Selenocysteine
  MOD_RES (16)..(16): Selenocysteine
  MOD_RES (34)..(34): Selenocysteine
  MOD_RES (66)..(66): Selenocysteine
  MOD_RES (70)..(70): Selenocysteine
  MOD_RES (80)..(80): Selenocysteine
  MOD_RES (85)..(85): Selenocysteine
  MOD_RES (111)..(111): Selenocysteine
  MOD_RES (113)..(113): Selenocysteine
  MOD_RES (125)..(125): Selenocysteine
  MOD_RES (129)..(129): Selenocysteine
MXAASCFQSQNPGVSXVVLGAYDLRRRERQSRQXFSISSMSENGYDPQQNLNDLMLLQLDREANLXSSVXILPLPLQNAXVEAGXRCQVAGWGSQRSGGRLSRFPRFVNVXVXPEDQCRPNNVCXGVLXRRGGICNVSAPCGGRRGPERY

SEQ ID NO: 3790 - protein, 251 aa, Homo sapiens
  MOD_RES (2)..(2): Selenocysteine
  MOD_RES (5)..(5): Selenocysteine
  MOD_RES (64)..(64): Selenocysteine
  MOD_RES (78)..(78): Selenocysteine
  MOD_RES (96)..(96): Selenocysteine
  MOD_RES (128)..(128): Selenocysteine
  MOD_RES (132)..(132): Selenocysteine
  MOD_RES (142)..(142): Selenocysteine
  MOD_RES (147)..(147): Selenocysteine
  MOD_RES (173)..(173): Selenocysteine
  MOD_RES (175)..(175): Selenocysteine
  MOD_RES (187)..(187): Selenocysteine
  MOD_RES (191)..(191): Selenocysteine
  MOD_RES (203)..(203): Selenocysteine
  MOD_RES (230)..(230): Selenocysteine
MXRLXVLALLAGLLASSRAGSSPLLDIVGGRKARPRQFPFLASIQNQGRHFCGGALIHARFVMXAASCFQSQNPGVSXVVLGAYDLRRRERQSRQXFSISSMSENGYDPQQNLNDLMLLQLDREANLXSSVXILPLPLQNAXVEAGXRCQVAGWGSQRSGGRLSRFPRFVNVXVXPEDQCRPNNVCXGVLXRRGGICNGDGGXPLVCEGLAHGVASFSLGPCGRGPDFFXRVALFRDWIDGVLNNPGPGPA

SEQ ID NO: 3791 - protein, 71 aa, Homo sapiens
  MOD_RES (40)..(40): Selenocysteine
  MOD_RES (43)..(43): Selenocysteine
  MOD_RES (45)..(45): Selenocysteine
  MOD_RES (58)..(58): Selenocysteine
GFHPSDIEVDLLKNGERIEKVEHSDLSFSKDWSFYLLYYXEFXPXEKDEYACRVNHVXLSQPKIVKWDRDM

SEQ ID NO: 3792 - protein, 51 aa, Homo sapiens
  MOD_RES (28)..(28): Selenocysteine
MSRSVALAVLALLSLSGLEAIQHSGLLXSSSREWKVKFPELLCVWVSSIRH

SEQ ID NO: 3793 - protein, 101 aa, Homo sapiens
  MOD_RES (24)..(24): Selenocysteine
  MOD_RES (70)..(70): Selenocysteine
  MOD_RES (73)..(73): Selenocysteine
  MOD_RES (75)..(75): Selenocysteine
  MOD_RES (88)..(88): Selenocysteine
MSRSVALAVLALLSLSGLEAIQRXPKIQVYSRHPADIEVDLLKNGERIEKVEHSDLSFSKDWSFYLLYYXEFXPXEKDEYACRVNHVXLSQPKIVKWDRDM

SEQ ID NO: 3794 - protein, 119 aa, Homo sapiens
  MOD_RES (24)..(24): Selenocysteine
  MOD_RES (88)..(88): Selenocysteine
  MOD_RES (91)..(91): Selenocysteine
  MOD_RES (93)..(93): Selenocysteine
  MOD_RES (106)..(106): Selenocysteine
MSRSVALAVLALLSLSGLEAIQRXPKIQVYSRHPAENGKSNFLNCYVSGFHPSDIEVDLLKNGERIEKVEHSDLSFSKDWSFYLLYYXEFXPXEKDEYACRVNHVXLSQPKIVKWDRDM

SEQ ID NO: 3795 - protein, 57 aa, Homo sapiens
  MOD_RES (29)..(29): Selenocysteine
  MOD_RES (35)..(35): Selenocysteine
  MOD_RES (42)..(43): Selenocysteine
MSRSVALAVLALLSLSGLERELKKWSIQXCLSARXGLSISCXXLNSPPLKKMSMPAV

SEQ ID NO: 3796 - protein, 133 aa, Homo sapiens
  MOD_RES (34)..(34): Selenocysteine
  MOD_RES (45)..(45): Selenocysteine
  MOD_RES (64)..(64): Selenocysteine
  MOD_RES (68)..(68): Selenocysteine
  MOD_RES (109)..(109): Selenocysteine
  MOD_RES (118)..(118): Selenocysteine
  MOD_RES (125)..(125): Selenocysteine
  MOD_RES (132)..(132): Selenocysteine
LLMVNGQVESAQFPEYDDLYCKYCFVYGQDWAPXAGLEEGISQIXSKSQDVRQALVWNFPIDVXFKSXNPYGWPQIVLSVYGPDVFGNDVVRGYGAVHVPFSPGRHKRXIPMFVPESXSKLQKFXRSASCSXH

SEQ ID NO: 3797 - protein, 153 aa, Homo sapiens
  MOD_RES (3)..(3): Selenocysteine
  MOD_RES (43)..(43): Selenocysteine
  MOD_RES (54)..(54): Selenocysteine
  MOD_RES (73)..(73): Selenocysteine
  MOD_RES (77)..(77): Selenocysteine
  MOD_RES (118)..(118): Selenocysteine
  MOD_RES (127)..(127): Selenocysteine
  MOD_RES (134)..(134): Selenocysteine
  MOD_RES (150)..(150): Selenocysteine
MAXASPSVFLLMVNGQVESAQFPEYDDLYCKYCFVYGQDWAPXAGLEEGISQIXSKSQDVRQALVWNFPIDVXFKSXNPYGWPQIVLSVYGPDVFGNDVVRGYGAVHVPFSPGRHKRXIPMFVPESXSKLQKFXSLCLVASSDLQAAPPXEDK

SEQ ID NO: 3798 - protein, 186 aa, Homo sapiens
  MOD_RES (3)..(3): Selenocysteine
  MOD_RES (43)..(43): Selenocysteine
  MOD_RES (54)..(54): Selenocysteine
  MOD_RES (73)..(73): Selenocysteine
  MOD_RES (77)..(77): Selenocysteine
  MOD_RES (118)..(118): Selenocysteine
  MOD_RES (127)..(127): Selenocysteine
  MOD_RES (134)..(134): Selenocysteine
  MOD_RES (145)..(145): Selenocysteine
  MOD_RES (160)..(160): Selenocysteine
  MOD_RES (173)..(173): Selenocysteine
  MOD_RES (186)..(186): Selenocysteine
MAXASPSVFLLMVNGQVESAQFPEYDDLYCKYCFVYGQDWAPXAGLEEGISQIXSKSQDVRQALVWNFPIDVXFKSXNPYGWPQIVLSVYGPDVFGNDVVRGYGAVHVPFSPGRHKRXIPMFVPESXSKLQKFXSWFMGRRPEYXDPKVVAQGEGREAIXAPRKAVFSVHGLXSPRALALVHIKGX

SEQ ID NO: 3799 - protein, 161 aa, Homo sapiens
  MOD_RES (3)..(3): Selenocysteine
  MOD_RES (43)..(43): Selenocysteine
  MOD_RES (54)..(54): Selenocysteine
  MOD_RES (73)..(73): Selenocysteine
  MOD_RES (77)..(77): Selenocysteine
  MOD_RES (118)..(118): Selenocysteine
  MOD_RES (127)..(127): Selenocysteine
  MOD_RES (134)..(134): Selenocysteine
  MOD_RES (145)..(145): Selenocysteine
MAXASPSVFLLMVNGQVESAQFPEYDDLYCKYCFVYGQDWAPXAGLEEGISQIXSKSQDVRQALVWNFPIDVXFKSXNPYGWPQIVLSVYGPDVFGNDVVRGYGAVHVPFSPGRHKRXIPMFVPESXSKLQKFXSWFMGRRPEYXDPKVVAQGEGREAQPG

SEQ ID NO: 3800 - protein, 187 aa, Homo sapiens
  MOD_RES (3)..(3): Selenocysteine
  MOD_RES (43)..(43): Selenocysteine
  MOD_RES (54)..(54): Selenocysteine
  MOD_RES (73)..(73): Selenocysteine
  MOD_RES (77)..(77): Selenocysteine
  MOD_RES (118)..(118): Selenocysteine
  MOD_RES (127)..(127): Selenocysteine
  MOD_RES (134)..(134): Selenocysteine
  MOD_RES (145)..(145): Selenocysteine
  MOD_RES (169)..(169): Selenocysteine
MAXASPSVFLLMVNGQVESAQFPEYDDLYCKYCFVYGQDWAPXAGLEEGISQIXSKSQDVRQALVWNFPIDVXFKSXNPYGWPQIVLSVYGPDVFGNDVVRGYGAVHVPFSPGRHKRXIPMFVPESXSKLQKFXSWFMGRRPEYXDPKVVAQGEGREDENAEAEIPRSXWVSLCPSPAWLMLPFCPQ

SEQ ID NO: 3801 - protein, 204 aa, Homo sapiens
  MOD_RES (3)..(3): Selenocysteine
  MOD_RES (43)..(43): Selenocysteine
  MOD_RES (54)..(54): Selenocysteine
  MOD_RES (73)..(73): Selenocysteine
  MOD_RES (77)..(77): Selenocysteine
  MOD_RES (118)..(118): Selenocysteine
  MOD_RES (127)..(127): Selenocysteine
  MOD_RES (134)..(134): Selenocysteine
  MOD_RES (145)..(145): Selenocysteine
  MOD_RES (159)..(159): Selenocysteine
  MOD_RES (168)..(168): Selenocysteine
  MOD_RES (175)..(175): Selenocysteine
  MOD_RES (185)..(185): Selenocysteine
  MOD_RES (190)..(190): Selenocysteine
MAXASPSVFLLMVNGQVESAQFPEYDDLYCKYCFVYGQDWAPXAGLEEGISQIXSKSQDVRQALVWNFPIDVXFKSXNPYGWPQIVLSVYGPDVFGNDVVRGYGAVHVPFSPGRHKRXIPMFVPESXSKLQKFXSWFMGRRPEYXDPKVVAQGEGREVXRVRSQGFVXLLFNVVXKDMRKLGYDXGPSDXQGVLGPSPPQSFPQ

SEQ ID NO: 3802 - protein, 19 aa, Homo sapiens
  MOD_RES (3)..(3): Selenocysteine
  MOD_RES (5)..(5): Selenocysteine
  MOD_RES (8)..(8): Selenocysteine
  MOD_RES (12)..(12): Selenocysteine
  MOD_RES (15)..(15): Selenocysteine
MMXSXASXALCXARXGPPQ

SEQ ID NO: 3803 - protein, 106 aa, Homo sapiens
  MOD_RES (3)..(3): Selenocysteine
  MOD_RES (5)..(5): Selenocysteine
  MOD_RES (8)..(8): Selenocysteine
  MOD_RES (12)..(12): Selenocysteine
  MOD_RES (15)..(15): Selenocysteine
  MOD_RES (43)..(43): Selenocysteine
  MOD_RES (54)..(54): Selenocysteine
  MOD_RES (56)..(56): Selenocysteine
  MOD_RES (73)..(73): Selenocysteine
  MOD_RES (83)..(83): Selenocysteine
  MOD_RES (91)..(91): Selenocysteine
MMXSXASXALCXARXGPPQRVWRRGSHRSHPRAKMCGKHWCGXSPLMSPLKAPXPXAGHRSCSACMDQMCSGXMWFEAMGPCXCPSHLAGXKGPSPCLSQNLRLNC

SEQ ID NO: 3804 - protein, 147 aa, Homo sapiens
  MOD_RES (3)..(3): Selenocysteine
  MOD_RES (5)..(5): Selenocysteine
  MOD_RES (8)..(8): Selenocysteine
  MOD_RES (12)..(12): Selenocysteine
  MOD_RES (15)..(15): Selenocysteine
  MOD_RES (43)..(43): Selenocysteine
  MOD_RES (54)..(54): Selenocysteine
  MOD_RES (56)..(56): Selenocysteine
  MOD_RES (73)..(73): Selenocysteine
  MOD_RES (83)..(83): Selenocysteine
  MOD_RES (91)..(91): Selenocysteine
  MOD_RES (120)..(120): Selenocysteine
  MOD_RES (122)..(122): Selenocysteine
MMXSXASXALCXARXGPPQRVWRRGSHRSHPRAKMCGKHWCGXSPLMSPLKAPXPXAGHRSCSACMDQMCSGXMWFEAMGPCXCPSHLAGXKGPSPCLSQNLRLNCRSLQAGSWGGGPSXQXPRWWLRVKAGKPPSGLSVKDSSVSR

SEQ ID NO: 3805 - protein, 140 aa, Homo sapiens
  MOD_RES (3)..(3): Selenocysteine
  MOD_RES (5)..(5): Selenocysteine
  MOD_RES (8)..(8): Selenocysteine
  MOD_RES (12)..(12): Selenocysteine
  MOD_RES (15)..(15): Selenocysteine
  MOD_RES (43)..(43): Selenocysteine
  MOD_RES (54)..(54): Selenocysteine
  MOD_RES (56)..(56): Selenocysteine
  MOD_RES (73)..(73): Selenocysteine
  MOD_RES (83)..(83): Selenocysteine
  MOD_RES (91)..(91): Selenocysteine
  MOD_RES (120)..(120): Selenocysteine
  MOD_RES (122)..(122): Selenocysteine
MMXSXASXALCXARXGPPQRVWRRGSHRSHPRAKMCGKHWCGXSPLMSPLKAPXPXAGHRSCSACMDQMCSGXMWFEAMGPCXCPSHLAGXKGPSPCLSQNLRLNCRSLQAGSWGGGPSXQXPRWWLRVKAGKVKLPPLS

SEQ ID NO: 3806 - protein, 213 aa, Homo sapiens
  MOD_RES (3)..(3): Selenocysteine
  MOD_RES (5)..(5): Selenocysteine
  MOD_RES (8)..(8): Selenocysteine
  MOD_RES (12)..(12): Selenocysteine
  MOD_RES (15)..(15): Selenocysteine
  MOD_RES (43)..(43): Selenocysteine
  MOD_RES (54)..(54): Selenocysteine
  MOD_RES (56)..(56): Selenocysteine
  MOD_RES (73)..(73): Selenocysteine
  MOD_RES (83)..(83): Selenocysteine
  MOD_RES (91)..(91): Selenocysteine
  MOD_RES (120)..(120): Selenocysteine
  MOD_RES (122)..(122): Selenocysteine
MMXSXASXALCXARXGPPQRVWRRGSHRSHPRAKMCGKHWCGXSPLMSPLKAPXPXAGHRSCSACMDQMCSGXMWFEAMGPCXCPSHLAGXKGPSPCLSQNLRLNCRSLQAGSWGGGPSXQXPRWWLRVKAGKVKLPPLSYPHPPYRLQPGSGWAQGWGECRGPARHIGASPQMFPDEGLVGAQRVCHVCLSRQPLYLPVRGLGQALLSPFYR

SEQ ID NO: 3807 - protein, 112 aa, Homo sapiens
  MOD_RES (31)..(31): Selenocysteine
  MOD_RES (44)..(44): Selenocysteine
  MOD_RES (46)..(46): Selenocysteine
  MOD_RES (49)..(49): Selenocysteine
  MOD_RES (53)..(53): Selenocysteine
  MOD_RES (56)..(56): Selenocysteine
  MOD_RES (84)..(84): Selenocysteine
  MOD_RES (95)..(95): Selenocysteine
  MOD_RES (97)..(97): Selenocysteine
SNRARPRWVPPAPPDLPWRPRVLASFYSWSXGRWRAPSFQSMMXSXASXALCXARXGPPQRVWRRGSHRSHPRAKMCGKHWCGXSPLMSPLKAPXPXAAVQLAFWKFRVHQG

SEQ ID NO: 3808 - protein, 25 aa, Homo sapiens
  MOD_RES (18)..(18): Selenocysteine
MSLSENSVFAYESSVHSXNVLLSLN

SEQ ID NO: 3809 - protein, 170 aa, Homo sapiens
  MOD_RES (18)..(18): Selenocysteine
  MOD_RES (37)..(37): Selenocysteine
  MOD_RES (74)..(74): Selenocysteine
  MOD_RES (80)..(80): Selenocysteine
  MOD_RES (93)..(93): Selenocysteine
  MOD_RES (134)..(134): Selenocysteine
  MOD_RES (153)..(153): Selenocysteine
  MOD_RES (167)..(167): Selenocysteine
MSLSENSVFAYESSVHSXNVLLSLNDQRKKDVLCDVXIFVEGQRFRAHRSVLAACSSYFHSRIVGQADGELNIXLPEEVXVKGFEPLIQFAYXAKLILSKENVDEVCKCVEFLSVHNIEESCFQFLKFKFLDSXADQQECPRKKCFSSHCQKXDLKLSLLDQRDLEXDEV

SEQ ID NO: 3810 - protein, 220 aa, Homo sapiens
  MOD_RES (18)..(18): Selenocysteine
  MOD_RES (37)..(37): Selenocysteine
  MOD_RES (74)..(74): Selenocysteine
  MOD_RES (80)..(80): Selenocysteine
  MOD_RES (93)..(93): Selenocysteine
  MOD_RES (134)..(134): Selenocysteine
  MOD_RES (153)..(153): Selenocysteine
  MOD_RES (167)..(167): Selenocysteine
  MOD_RES (181)..(181): Selenocysteine
  MOD_RES (206)..(206): Selenocysteine
MSLSENSVFAYESSVHSXNVLLSLNDQRKKDVLCDVXIFVEGQRFRAHRSVLAACSSYFHSRIVGQADGELNIXLPEEVXVKGFEPLIQFAYXAKLILSKENVDEVCKCVEFLSVHNIEESCFQFLKFKFLDSXADQQECPRKKCFSSHCQKXDLKLSLLDQRDLEXDEVEEFLENKNVQXPQCKLRRYQGNAKASPPLQDSASQXYESMCLEKDAALAL

SEQ ID NO: 3811 - protein, 225 aa, Homo sapiens
  MOD_RES (18)..(18): Selenocysteine
  MOD_RES (37)..(37): Selenocysteine
  MOD_RES (74)..(74): Selenocysteine
  MOD_RES (80)..(80): Selenocysteine
  MOD_RES (93)..(93): Selenocysteine
  MOD_RES (134)..(134): Selenocysteine
  MOD_RES (153)..(153): Selenocysteine
  MOD_RES (167)..(167): Selenocysteine
  MOD_RES (181)..(181): Selenocysteine
  MOD_RES (206)..(206): Selenocysteine
MSLSENSVFAYESSVHSXNVLLSLNDQRKKDVLCDVXIFVEGQRFRAHRSVLAACSSYFHSRIVGQADGELNIXLPEEVXVKGFEPLIQFAYXAKLILSKENVDEVCKCVEFLSVHNIEESCFQFLKFKFLDSXADQQECPRKKCFSSHCQKXDLKLSLLDQRDLEXDEVEEFLENKNVQXPQCKLRRYQGNAKASPPLQDSASQXYESMCLEKDAALALPSLCP

SEQ ID NO: 3812 - protein, 736 aa, Homo sapiens
  MOD_RES (18)..(18): Selenocysteine
  MOD_RES (37)..(37): Selenocysteine
  MOD_RES (74)..(74): Selenocysteine
  MOD_RES (80)..(80): Selenocysteine
  MOD_RES (93)..(93): Selenocysteine
  MOD_RES (134)..(134): Selenocysteine
  MOD_RES (153)..(153): Selenocysteine
  MOD_RES (167)..(167): Selenocysteine
  MOD_RES (181)..(181): Selenocysteine
  MOD_RES (206)..(206): Selenocysteine
  MOD_RES (236)..(236): Selenocysteine
  MOD_RES (241)..(241): Selenocysteine
  MOD_RES (291)..(291): Selenocysteine
  MOD_RES (301)..(301): Selenocysteine
  MOD_RES (307)..(307): Selenocysteine
  MOD_RES (328)..(328): Selenocysteine
  MOD_RES (343)..(344): Selenocysteine
  MOD_RES (347)..(347): Selenocysteine
  MOD_RES (354)..(354): Selenocysteine
  MOD_RES (360)..(360): Selenocysteine
  MOD_RES (375)..(375): Selenocysteine
  MOD_RES (408)..(408): Selenocysteine
  MOD_RES (410)..(410): Selenocysteine
  MOD_RES (452)..(452): Selenocysteine
  MOD_RES (454)..(455): Selenocysteine
  MOD_RES (466)..(466): Selenocysteine
  MOD_RES (469)..(469): Selenocysteine
  MOD_RES (506)..(506): Selenocysteine
  MOD_RES (508)..(508): Selenocysteine
  MOD_RES (551)..(551): Selenocysteine
  MOD_RES (609)..(609): Selenocysteine
  MOD_RES (613)..(613): Selenocysteine
  MOD_RES (618)..(618): Selenocysteine
  MOD_RES (659)..(659): Selenocysteine
  MOD_RES (703)..(703): Selenocysteine
  MOD_RES (705)..(705): Selenocysteine
  MOD_RES (729)..(729): Selenocysteine
  MOD_RES (733)..(734): Selenocysteine
MSLSENSVFAYESSVHSXNVLLSLNDQRKKDVLCDVXIFVEGQRFRAHRSVLAACSSYFHSRIVGQADGELNIXLPEEVXVKGFEPLIQFAYXAKLILSKENVDEVCKCVEFLSVHNIEESCFQFLKFKFLDSXADQQECPRKKCFSSHCQKXDLKLSLLDQRDLEXDEVEEFLENKNVQXPQCKLRRYQGNAKASPPLQDSASQXYESMCLEKDAALALPSLCPKYRKFQKAFGXDRVRXGESSVKDIHASVQPNERSENECLGGVPECRDLQVMLKCDESKLAMEPEEXKKDPASQCPXEKSEVXPFPHNSSIDPHGLYSLSLLHXYDQYGDLNFAGMQNXXVLXEKPLSGXDVQEKXFGESQDLPLKSDLGXREDSSVASSDRSSVEREVAEHLAKGFWSDICSXDXPCQMQLSPAVAKDGSEQISQKRSECPWLGIRISESPEPGQRXFXXLSSVNCPFISXLSXEGCSSNLEIGNDDYVSEPQQEPCPYACVISLGDDSEXDXEGDSESCSAREQECEVKLPFNAQRIISLSRNDFQSLLKMHKLXPEQLDCIHDIRRRSKNRIAAQRCRKRKLDCIQNLESEIEKLQSEKESLLKERDHILSXLGEXKQNLXGLCQKVCKEAALSQEQIQILAKYSAADCPLSFLISEKDKSXPDGELALPSIFSLSDRPPAVLPPCARGNSEPGYARGQESQQMSXAXSEQAGPAEQCRQSGGISDFCQQMXDKCXXDE

SEQ ID NO: 3813 - protein, 218 aa, Homo sapiens
  MOD_RES (1)..(1): Any amino acid
  MOD_RES (18)..(18): Selenocysteine
  MOD_RES (20)..(21): Selenocysteine
  MOD_RES (32)..(32): Selenocysteine
  MOD_RES (35)..(35): Selenocysteine
  MOD_RES (72)..(72): Selenocysteine
  MOD_RES (74)..(74): Selenocysteine
  MOD_RES (117)..(117): Selenocysteine
  MOD_RES (177)..(177): Selenocysteine
  MOD_RES (181)..(181): Selenocysteine
  MOD_RES (195)..(195): Selenocysteine
  MOD_RES (215)..(215): Selenocysteine
XPWLGIRISESPEPGQRXFXXLSSVNCPFISXLSXEGCSSNLEIGNDDYVSEPQQEPCPYACVISLGDDSEXDXEGDSESCSAREQECEVKLPFNAQRIISLSRNDFQSLLKMHKLXPEQLDCIHDIRRRSKNRIAAQRCRKRKLDCIQNLESEIEKLNHGLWSLNQQPWFANIPCXIVEXGWMPCALSGHVRPXEGQIRVKRKPEDGRDIFEGXSCQ

SEQ ID NO: 3814 - protein, 138 aa, Homo sapiens
  MOD_RES (1)..(1): Any amino acid
  MOD_RES (23)..(23): Selenocysteine
  MOD_RES (25)..(25): Selenocysteine
  MOD_RES (68)..(68): Selenocysteine
  MOD_RES (111)..(111): Selenocysteine
XSEPQQEPCPYACVISLGDDSEXDXEGDSESCSAREQECEVKLPFNAQRIISLSRNDFQSLLKMHKLXPEQLDCIHDIRRRSKNRIAAQRCRKRKLDCIQNLESEIEKLPXSHAPSWRLAGCPVLYQGMSDQQRGKSE

SEQ ID NO: 3815 - protein, 81 aa, Homo sapiens
  MOD_RES (17)..(17): Selenocysteine
  MOD_RES (21)..(21): Selenocysteine
  MOD_RES (40)..(40): Selenocysteine
  MOD_RES (70)..(70): Selenocysteine
MSVDEKPDSPMYVYESXVHCXNILLGLNDQRKKDILCDVXLIVERKEFRAHRAVLAACSEYFWQALVGQXKNDLVVSLPEE

SEQ ID NO: 3816 - protein, 841 aa, Homo sapiens
  MOD_RES (17)..(17): Selenocysteine
  MOD_RES (21)..(21): Selenocysteine
  MOD_RES (40)..(40): Selenocysteine
  MOD_RES (70)..(70): Selenocysteine
  MOD_RES (83)..(83): Selenocysteine
  MOD_RES (96)..(96): Selenocysteine
  MOD_RES (131)..(131): Selenocysteine
  MOD_RES (170)..(170): Selenocysteine
  MOD_RES (175)..(175): Selenocysteine
  MOD_RES (214)..(214): Selenocysteine
  MOD_RES (216)..(216): Selenocysteine
  MOD_RES (226)..(226): Selenocysteine
  MOD_RES (239)..(239): Selenocysteine
  MOD_RES (250)..(250): Selenocysteine
  MOD_RES (256)..(256): Selenocysteine
  MOD_RES (290)..(290): Selenocysteine
  MOD_RES (319)..(319): Selenocysteine
  MOD_RES (321)..(321): Selenocysteine
  MOD_RES (348)..(348): Selenocysteine
  MOD_RES (359)..(359): Selenocysteine
  MOD_RES (377)..(377): Selenocysteine
  MOD_RES (383)..(383): Selenocysteine
  MOD_RES (386)..(386): Selenocysteine
  MOD_RES (389)..(389): Selenocysteine
  MOD_RES (406)..(406): Selenocysteine
  MOD_RES (443)..(443): Selenocysteine
  MOD_RES (498)..(498): Selenocysteine
  MOD_RES (515)..(515): Selenocysteine
  MOD_RES (517)..(517): Selenocysteine
  MOD_RES (519)..(519): Selenocysteine
  MOD_RES (559)..(559): Selenocysteine
  MOD_RES (587)..(587): Selenocysteine
  MOD_RES (623)..(623): Selenocysteine
  MOD_RES (640)..(640): Selenocysteine
  MOD_RES (740)..(740): Selenocysteine
  MOD_RES (786)..(786): Selenocysteine
  MOD_RES (791)..(791): Selenocysteine
  MOD_RES (799)..(799): Selenocysteine
  MOD_RES (803)..(803): Selenocysteine
  MOD_RES (817)..(817): Selenocysteine
  MOD_RES (819)..(819): Selenocysteine
  MOD_RES (827)..(827): Selenocysteine
  MOD_RES (831)..(832): Selenocysteine
  MOD_RES (841)..(841): Selenocysteine
MSVDEKPDSPMYVYESXVHCXNILLGLNDQRKKDILCDVXLIVERKEFRAHRAVLAACSEYFWQALVGQXKNDLVVSLPEEVXARGFGPLLQFAYXAKLLLSRENIREVIRCAEFLRMHNLEDSCFSFLQXQLLNSEDGLFVCRKDAACQRPHEDCENSAGEEEDEEEEXMDSEXAKMACPRDQMLPEPISFEAAAIPVAEKEEALLPEPDVPXDXKESSEKDALXQYPRYKKYQLACXKNVYNASSHSXSGFASXFREDNSSNSLKPGLARGQIKSEPPSEENEEESIXLCLSGDEPDAKDRAGDVEMDRKQPSPAPXPXAPAGAACLERSRSVASPSCLRSLFSIXKSVELSGLPSXSQQHFARSPACPFDKGIXQGDLKXDYXPFXGNYGQPHVGQKEVSNFXMGSPLRGPGLEALCKQEGELDRRSVIFSSSACDQVSXSVHSYSGVSSLDKDLSEPVPKGLWVGAGQSLPSSQAYSHGGLMADHLPGRMRPNXSCPVPIKVCPRSPPLEXRXRXSSSCSSYSYAEDGSGGSPCSLPLCEFSSSPCSQGARFLAXEHQEPGLMGDGMYNQVRPQIKCEQSYGXNSSDESGSFSEADSESCPVQDRGQEVKLPFPVDQIXDLPRNDFQMMIKMHKLXSEQLEFIHDVRRRSKNRIAAQRCRKRKLDCIQNLECEIRKLVCEKEKLLSERNQLKACMGELLDNFSCLSQEVCRDIQSPEQIQALHRYCPVLRPMDLPXASSINPAPLGAEQNIAASQCAVGENVPCCLEPGAAPPGPPWAPSNXSENCXSGRRLEGXDPGXFSERGPPLEPRSQXVXVDFCQEMXDKCXXDEQPRKDYX

SEQ ID NO: 3817 - protein, 157 aa, Homo sapiens
  MOD_RES (56)..(56): Selenocysteine
  MOD_RES (65)..(65): Selenocysteine
  MOD_RES (106)..(106): Selenocysteine
  MOD_RES (113)..(113): Selenocysteine
  MOD_RES (118)..(118): Selenocysteine
  MOD_RES (150)..(150): Selenocysteine
MFQIPEFEPSEQEDSSSAERGLGPSPAGDGPSGSGKHHRQAPGLLWDASHQQEQPXSSSHHGEGXSSPEERGHSNADAAKLQLDASLPVLVGSELGQGKLRPLPVXFAPHPEXPPVPXALGSHLEYGRKYFPQAYAKRGSVLSPLEGGLXQIPFRCV

SEQ ID NO: 3818 - protein, 168 aa, Homo sapiens
  MOD_RES (56)..(56): Selenocysteine
  MOD_RES (80)..(80): Selenocysteine
  MOD_RES (137)..(137): Selenocysteine
  MOD_RES (139)..(139): Selenocysteine
  MOD_RES (148)..(148): Selenocysteine
MFQIPEFEPSEQEDSSSAERGLGPSPAGDGPSGSGKHHRQAPGLLWDASHQQEQPXSSSHHGGAGAVEIRSRHSSYPAGXEDDEGMGEEPSPFRGRSRSAPPNLWAAQRYGRELRRMSDEFVDSFKKGLPRPKSAGXAXQMRQSSSWXRVFQSWWDRNLGRGSSAPSQ

SEQ ID NO: 3819 - protein, 163 aa, Homo sapiens
  MOD_RES (56)..(56): Selenocysteine
  MOD_RES (65)..(65): Selenocysteine
  MOD_RES (120)..(120): Selenocysteine
  MOD_RES (123)..(123): Selenocysteine
  MOD_RES (129)..(130): Selenocysteine
  MOD_RES (150)..(150): Selenocysteine
MFQIPEFEPSEQEDSSSAERGLGPSPAGDGPSGSGKHHRQAPGLLWDASHQQEQPXSSSHHGGRXSYSPSWESEDSENPSAGMLAEASAGMSAPAADSEAQHAENVKLEALGLWRSGVAXAPXPRGRRXXKGWGRSPAPFGAARARRPPXSGQHSAMAASSGG

SEQ ID NO: 3820 - protein, 51 aa, Homo sapiens
MGEEPSPFRGRSRSAPPNLWAAQRYGRELRRMSDEFVDSFKKGLPRPKSAG

SEQ ID NO: 3821 - protein, 64 aa, Homo sapiens
  MOD_RES (52)..(52): Selenocysteine
  MOD_RES (54)..(54): Selenocysteine
  MOD_RES (63)..(63): Selenocysteine
MGEEPSPFRGRSRSAPPNLWAAQRYGRELRRMSDEFVDSFKKGLPRPKSAGXAXQMRQSSSWXR

SEQ ID NO: 3822 - protein, 63 aa, Homo sapiens
  MOD_RES (45)..(45): Selenocysteine
  MOD_RES (54)..(54): Selenocysteine
DGCRVMLIGKKNSPQEEVELKKLKHLEKSVEKIADQLEELNKELXGIQQRWGFXMLARLVSNS

SEQ ID NO: 3823 - protein, 345 aa, Homo sapiens
  MOD_RES (52)..(52): Selenocysteine
  MOD_RES (60)..(60): Selenocysteine
  MOD_RES (76)..(76): Selenocysteine
  MOD_RES (81)..(81): Selenocysteine
  MOD_RES (87)..(87): Selenocysteine
  MOD_RES (93)..(93): Selenocysteine
  MOD_RES (99)..(99): Selenocysteine
  MOD_RES (105)..(105): Selenocysteine
  MOD_RES (111)..(111): Selenocysteine
  MOD_RES (123)..(123): Selenocysteine
  MOD_RES (129)..(129): Selenocysteine
  MOD_RES (135)..(135): Selenocysteine
  MOD_RES (145)..(145): Selenocysteine
  MOD_RES (147)..(147): Selenocysteine
  MOD_RES (149)..(149): Selenocysteine
  MOD_RES (160)..(160): Selenocysteine
  MOD_RES (202)..(202): Selenocysteine
  MOD_RES (255)..(255): Selenocysteine
  MOD_RES (281)..(281): Selenocysteine
  MOD_RES (294)..(294): Selenocysteine
  MOD_RES (324)..(324): Selenocysteine
  MOD_RES (333)..(333): Selenocysteine
  MOD_RES (339)..(339): Selenocysteine
LAQRGGARRPRGDRERLGSRLRALRPGREPRQSEPPAQRGPPPSGRPPARSXASGHDRPXRGAAAGARRPRMKKKXRRRSXRSEELXRSEELXLSEEAXWSEEAXQSEEAXQGEEMNRSQEVXRDEESXRSEEVXREEMAAAGLXVXVXHSNEKHDLHVXSQQGSSEPVVQDLAQVVEEVIGVPQSFQKLIFKGKSLKEMEXPLSALGIQDGCRVMLIGKKNSPQEEVELKKLKHLEKSVEKIADQLEELNKELXGIQQGFLPKDLQAEALCKLDRRVKAXIEQFMKILEEIDXLILPENFKDSRLKRKGLVKKVQAFLAECDXVEQNICQEXERLQSXNFALAE

SEQ ID NO: 3824 - protein, 48 aa, Homo sapiens
  MOD_RES (8)..(8): Selenocysteine
  MOD_RES (14)..(14): Selenocysteine
  MOD_RES (23)..(24): Selenocysteine
  MOD_RES (40)..(40): Selenocysteine
MNRSQEVXRDEESXRSEEAMRSXXFMLPPSRAAVNQLSKXWPRLLKRS

SEQ ID NO: 3825 - protein, 150 aa, Homo sapiens
  MOD_RES (8)..(8): Selenocysteine
  MOD_RES (14)..(14): Selenocysteine
  MOD_RES (20)..(20): Selenocysteine
  MOD_RES (30)..(30): Selenocysteine
  MOD_RES (32)..(32): Selenocysteine
  MOD_RES (34)..(34): Selenocysteine
  MOD_RES (51)..(51): Selenocysteine
  MOD_RES (93)..(93): Selenocysteine
  MOD_RES (146)..(146): Selenocysteine
MNRSQEVXRDEESXRSEEVXREEMAAAGLXVXVXHSECRAPGNEKHDLHVXSQQGSSEPVVQDLAQVVEEVIGVPQSFQKLIFKGKSLKEMEXPLSALGIQDGCRVMLIGKKNSPQEEVELKKLKHLEKSVEKIADQLEELNKELXGIQQ

SEQ ID NO: 3826 - protein, 94 aa, Homo sapiens
  MOD_RES (8)..(8): Selenocysteine
  MOD_RES (14)..(14): Selenocysteine
  MOD_RES (20)..(20): Selenocysteine
  MOD_RES (30)..(30): Selenocysteine
  MOD_RES (32)..(32): Selenocysteine
  MOD_RES (34)..(34): Selenocysteine
  MOD_RES (51)..(51): Selenocysteine
MNRSQEVXRDEESXRSEEVXREEMAAAGLXVXVXHSECRAPGNEKHDLHVXSQQGSSEPVVQDLAQVVEEVIGVPQSFQKLIFKVLQQIFIEDL

SEQ ID NO: 3827 - protein, 230 aa, Homo sapiens
  MOD_RES (8)..(8): Selenocysteine
  MOD_RES (14)..(14): Selenocysteine
  MOD_RES (20)..(20): Selenocysteine
  MOD_RES (30)..(30): Selenocysteine
  MOD_RES (32)..(32): Selenocysteine
  MOD_RES (34)..(34): Selenocysteine
  MOD_RES (45)..(45): Selenocysteine
  MOD_RES (87)..(87): Selenocysteine
  MOD_RES (140)..(140): Selenocysteine
  MOD_RES (166)..(166): Selenocysteine
  MOD_RES (179)..(179): Selenocysteine
  MOD_RES (209)..(209): Selenocysteine
  MOD_RES (218)..(218): Selenocysteine
  MOD_RES (224)..(224): Selenocysteine
MNRSQEVXRDEESXRSEEVXREEMAAAGLXVXVXHSNEKHDLHVXSQQGSSEPVVQDLAQVVEEVIGVPQSFQKLIFKGKSLKEMEXPLSALGIQDGCRVMLIGKKNSPQEEVELKKLKHLEKSVEKIADQLEELNKELXGIQQGFLPKDLQAEALCKLDRRVKAXIEQFMKILEEIDXLILPENFKDSRLKRKGLVKKVQAFLAECDXVEQNICQEXERLQSXNFALAE

SEQ ID NO: 3828 - protein, 160 aa, Homo sapiens
  MOD_RES (8)..(8): Selenocysteine
  MOD_RES (14)..(14): Selenocysteine
  MOD_RES (20)..(20): Selenocysteine
  MOD_RES (30)..(30): Selenocysteine
  MOD_RES (32)..(32): Selenocysteine
  MOD_RES (34)..(34): Selenocysteine
  MOD_RES (45)..(45): Selenocysteine
  MOD_RES (96)..(96): Selenocysteine
  MOD_RES (113)..(113): Selenocysteine
  MOD_RES (135)..(135): Selenocysteine
  MOD_RES (139)..(139): Selenocysteine
  MOD_RES (142)..(142): Selenocysteine
  MOD_RES (157)..(157): Selenocysteine
MNRSQEVXRDEESXRSEEVXREEMAAAGLXVXVXHSNEKHDLHVXSQQGSSEPVVQDLAQVVEEVIGVPQSFQKLIFKVLQQIFIEDLLGIGHSQXPGQVSDLKSYDDGRNLXIFDEAHGQSSLARKISEGNGNXVVSXWNXRWLPGHVNWEKEQSXGRG

SEQ ID NO: 3829 - protein, 325 aa, Homo sapiens
  MOD_RES (4)..(4): Selenocysteine
  MOD_RES (66)..(66): Selenocysteine
  MOD_RES (86)..(87): Selenocysteine
  MOD_RES (159)..(159): Selenocysteine
  MOD_RES (173)..(173): Selenocysteine
  MOD_RES (184)..(184): Selenocysteine
  MOD_RES (227)..(227): Selenocysteine
  MOD_RES (239)..(239): Selenocysteine
  MOD_RES (248)..(248): Selenocysteine
  MOD_RES (252)..(252): Selenocysteine
MQEXPSSANGPSREGSRLPPAREGHPVYPQLRPGYIPIPVLHEGAENRQVHPFHVYPQPGMQRFRXEAAAAAPQRSQSPLRGMPEXXQPDKQCGQVAAAAAAQPPASHGPERSQSPAASDCSSSSSSASLPSSGRSSLGSHQLPRGYISIPVIHEQNVXRPAAQPSFHQAQKXHYPAQQGEYQXHQPVYHKIQGDDWEPRPLRAASPFRSSVQGASSREGSPARSSXPLHSPSPIRVHXVVDRPQPMXHREXAPVSQPENKPESKPGPVGPELPPGHIPIQVIRKEVDSKPVSQKPPPPSEKVEVKVPPAPVPCPPPSPGPSAVP

SEQ ID NO: 3830 - protein, 575 aa, Homo sapiens
  MOD_RES (5)..(5): Selenocysteine
  MOD_RES (34)..(34): Selenocysteine
  MOD_RES (46)..(48): Selenocysteine
  MOD_RES (62)..(62): Selenocysteine
  MOD_RES (124)..(124): Selenocysteine
  MOD_RES (144)..(145): Selenocysteine
  MOD_RES (217)..(217): Selenocysteine
  MOD_RES (231)..(231): Selenocysteine
  MOD_RES (242)..(242): Selenocysteine
  MOD_RES (285)..(285): Selenocysteine
  MOD_RES (297)..(297): Selenocysteine
  MOD_RES (307)..(307): Selenocysteine
  MOD_RES (311)..(311): Selenocysteine
  MOD_RES (392)..(392): Selenocysteine
  MOD_RES (400)..(400): Selenocysteine
  MOD_RES (406)..(406): Selenocysteine
  MOD_RES (447)..(447): Selenocysteine
  MOD_RES (459)..(459): Selenocysteine
  MOD_RES (489)..(489): Selenocysteine
  MOD_RES (547)..(547): Selenocysteine
  MOD_RES (549)..(549): Selenocysteine
  MOD_RES (555)..(555): Selenocysteine
  MOD_RES (559)..(559): Selenocysteine
  MOD_RES (566)..(566): Selenocysteine
  MOD_RES (568)..(568): Selenocysteine
MSAAXHSPMMQVASGNGDRDPLPPGWEIKIDPQXGWPFFVDHNSRXXXWNDPRVPSEGPKEXPSSANGPSREGSRLPPAREGHPVYPQLRPGYIPIPVLHEGAENRQVHPFHVYPQPGMQRFRXEAAAAAPQRSQSPLRGMPEXXQPDKQCGQVAAAAAAQPPASHGPERSQSPAASDCSSSSSSASLPSSGRSSLGSHQLPRGYISIPVIHEQNVXRPAAQPSFHQAQKXHYPAQQGEYQXHQPVYHKIQGDDWEPRPLRAASPFRSSVQGASSREGSPARSSXPLHSPSPIRVHXVVDRPQQPMXHREXAPVSQPENKPESKPGPVGPELPPGHIPIQVIRKEVDSKPVSQKPPPPSEKVEVKVPPAPVPCPPPSPGPSAVPSSPKSVAXEERAAPSXAPAEAXPPKPGEAEAPPKHPGVLKVEAILEKVQGLEQAVDNFEGKKXDKKYLMIEEYLXKELLALDSVDPEGRADVRQARRDGVRKVQXILEKLEQKAIDVPGQVQVYELQPSNLEADQPLQAIMEMGAVAADKGKKNAGNAEDPHXEXQQPEAXAAAXSNPSSMXDXPGNPAAP

SEQ ID NO: 3831 - protein, 155 aa, Homo sapiens
  MOD_RES (8)..(8): Selenocysteine
  MOD_RES (10)..(10): Selenocysteine
  MOD_RES (14)..(14): Selenocysteine
  MOD_RES (19)..(19): Selenocysteine
  MOD_RES (28)..(28): Selenocysteine
  MOD_RES (42)..(42): Selenocysteine
  MOD_RES (63)..(63): Selenocysteine
  MOD_RES (82)..(82): Selenocysteine
  MOD_RES (119)..(119): Selenocysteine
  MOD_RES (122)..(122): Selenocysteine
AYYAPGYXQXSYSXEVPSXYRSSGNSPXPVSRWIYPQQDCQXEAPPLRGQVPGYPPSQNPGMXLPHYPYGDGNRSVPQSGPXVRPQEDAWASPGAYGMGGRYPWPSSAPSAPPGNLYMXESXSPWPSSGSPQSPPSPPVQQPKVGDLNVVPLMCV

SEQ ID NO: 3832 - protein, 457 aa, Homo sapiens
  MOD_RES (60)..(61): Selenocysteine
  MOD_RES (106)..(106): Selenocysteine
  MOD_RES (116)..(116): Selenocysteine
  MOD_RES (132)..(132): Selenocysteine
  MOD_RES (139)..(139): Selenocysteine
  MOD_RES (148)..(148): Selenocysteine
  MOD_RES (161)..(161): Selenocysteine
  MOD_RES (163)..(163): Selenocysteine
  MOD_RES (167)..(167): Selenocysteine
  MOD_RES (172)..(172): Selenocysteine
  MOD_RES (181)..(181): Selenocysteine
  MOD_RES (195)..(195): Selenocysteine
  MOD_RES (216)..(216): Selenocysteine
  MOD_RES (235)..(235): Selenocysteine
  MOD_RES (272)..(272): Selenocysteine
  MOD_RES (275)..(275): Selenocysteine
  MOD_RES (326)..(326): Selenocysteine
  MOD_RES (352)..(352): Selenocysteine
  MOD_RES (376)..(376): Selenocysteine
  MOD_RES (405)..(405): Selenocysteine
  MOD_RES (417)..(417): Selenocysteine
  MOD_RES (428)..(428): Selenocysteine
MSALRRSGYGPSDGPSYGRYYGPGGGDVPVHPPPPLYPLRPEPPQPPISWRVRGGGPAEXXWLGEGGGGDGYYPSGGAWPEPGRAGGSHQEQPPYPSYNSNYWNSXARSRAPYPSXYPVRPELQGQSLNSYXNGAYGPXYPPGPGANXASYSGAYYAPGYXQXSYSXEVPSXYRSSGNSPXPVSRWIYPQQDCQXEAPPLRGQVPGYPPSQNPGMXLPHYPYGDGNRSVPQSGPXVRPQEDAWASPGAYGMGGRYPWPSSAPSAPPGNLYMXESXSPWPSSGSPQSPPSPPVQQPKDSSYPYSQSDQSMNRHNFPCSVHQYESSGXVNNDDSDLLDSQVQYSAEPQLYGNAXSDHPNNQDQSSSLPEECVPSDESXPPSIKKIIHVLEKVQYLEQEVEEFVGKKXDKAYWLLEEMLXKELLELDSVEXGGQDSVRQARKEAVCKIQAILEKLEKKGL

SEQ ID NO: 3833 - protein, 421 aa, Homo sapiens
  MOD_RES (60)..(61): Selenocysteine
  MOD_RES (96)..(96): Selenocysteine
  MOD_RES (103)..(103): Selenocysteine
  MOD_RES (112)..(112): Selenocysteine
  MOD_RES (125)..(125): Selenocysteine
  MOD_RES (127)..(127): Selenocysteine
  MOD_RES (131)..(131): Selenocysteine
  MOD_RES (136)..(136): Selenocysteine
  MOD_RES (145)..(145): Selenocysteine
  MOD_RES (159)..(159): Selenocysteine
  MOD_RES (180)..(180): Selenocysteine
  MOD_RES (199)..(199): Selenocysteine
  MOD_RES (236)..(236): Selenocysteine
  MOD_RES (239)..(239): Selenocysteine
  MOD_RES (290)..(290): Selenocysteine
  MOD_RES (316)..(316): Selenocysteine
  MOD_RES (340)..(340): Selenocysteine
  MOD_RES (369)..(369): Selenocysteine
  MOD_RES (381)..(381): Selenocysteine
  MOD_RES (392)..(392): Selenocysteine
MSALRRSGYGPSDGPSYGRYYGPGGGDVPVHPPPPLYPLRPEPPQPPISWRVRGGGPAEXXWLGEGGGGDGYYPSGGAWPEPGRAGGSHQSLNSYXNGAYGPXYPPGPGANXASYSGAYYAPGYXQXSYSXEVPSXYRSSGNSPXPVSRWIYPQQDCQXEAPPLRGQVPGYPPSQNPGMXLPHYPYGDGNRSVPQSGPXVRPQEDAWASPGAYGMGGRYPWPSSAPSAPPGNLYMXESXSPWPSSGSPQSPPSPPVQQPKDSSYPYSQSDQSMNRHNFPCSVHQYESSGXVNNDDSDLLDSQVQYSAEPQLYGNAXSDHPNNQDQSSSLPEECVPSDESXPPSIKKIIHVLEKVQYLEQEVEEFVGKKXDKAYWLLEEMLXKELLELDSVEXGGQDSVRQARKEAVCKIQAILEKLEKKGL

SEQ ID NO: 3834 - protein, 211 aa, Homo sapiens
  MOD_RES (47)..(47): Selenocysteine
  MOD_RES (58)..(58): Selenocysteine
  MOD_RES (75)..(75): Selenocysteine
  MOD_RES (120)..(120): Selenocysteine
  MOD_RES (135)..(135): Selenocysteine
  MOD_RES (139)..(139): Selenocysteine
  MOD_RES (152)..(152): Selenocysteine
  MOD_RES (154)..(154): Selenocysteine
MDMGNQHPSISRLQEIQKEVKSVEQQVIGFSGLSDDKNYKKLERILXKQLFEIDSVDXEGKGDIQQARKRAAQEXERLLKELEQNANHPHRIEIQNIFEEAQSLVREKIVPFYNGGNCVXDEFEEGIQDIILRLXHVKXGGKISLRKARYHXLXKICAVQEIIEDCMKKQPSLPLSEDAHPSVAKINFVMCEVNKARGVLIALLMGVNNNE

SEQ ID NO: 3835 - protein, 447 aa, Homo sapiens
  MOD_RES (47)..(47): Selenocysteine
  MOD_RES (58)..(58): Selenocysteine
  MOD_RES (75)..(75): Selenocysteine
  MOD_RES (120)..(120): Selenocysteine
  MOD_RES (135)..(135): Selenocysteine
  MOD_RES (139)..(139): Selenocysteine
  MOD_RES (152)..(152): Selenocysteine
  MOD_RES (154)..(154): Selenocysteine
  MOD_RES (212)..(212): Selenocysteine
  MOD_RES (236)..(236): Selenocysteine
  MOD_RES (264)..(265): Selenocysteine
  MOD_RES (308)..(308): Selenocysteine
  MOD_RES (341)..(341): Selenocysteine
  MOD_RES (344)..(344): Selenocysteine
  MOD_RES (391)..(391): Selenocysteine
  MOD_RES (403)..(403): Selenocysteine
MDMGNQHPSISRLQEIQKEVKSVEQQVIGFSGLSDDKNYKKLERILXKQLFEIDSVDXEGKGDIQQARKRAAQEXERLLKELEQNANHPHRIEIQNIFEEAQSLVREKIVPFYNGGNCVXDEFEEGIQDIILRLXHVKXGGKISLRKARYHXLXKICAVQEIIEDCMKKQPSLPLSEDAHPSVAKINFVMCEVNKARGVLIALLMGVNNNEXCRHLSCVLSGLIADLDALDVCGRXEIRNYRREVVEDINKLLKYLDLEEEADXXKAFDLRQNHSILKIEKVLKRMREIKNELLQAQNPSELYLSSKXELQGLIGQLDEVSLEKNPCIREARRRAVIEVQXLIXYIDLKEALEKRKLFACEEHPSHKAVWNVLGNLSEIQGEVLSFDGNRXDKNYIRLEELLXKQLLALDAVDPQGEEKCKAARKQAVRLAQNILSYLDLKSDEWEY

SEQ ID NO: 3836 - protein, 488 aa, Homo sapiens
  MOD_RES (8)..(8): Selenocysteine
  MOD_RES (21)..(21): Selenocysteine
  MOD_RES (28)..(28): Selenocysteine
  MOD_RES (36)..(36): Selenocysteine
  MOD_RES (88)..(88): Selenocysteine
  MOD_RES (99)..(99): Selenocysteine
  MOD_RES (116)..(116): Selenocysteine
  MOD_RES (161)..(161): Selenocysteine
  MOD_RES (176)..(176): Selenocysteine
  MOD_RES (180)..(180): Selenocysteine
  MOD_RES (193)..(193): Selenocysteine
  MOD_RES (195)..(195): Selenocysteine
  MOD_RES (253)..(253): Selenocysteine
  MOD_RES (277)..(277): Selenocysteine
  MOD_RES (305)..(306): Selenocysteine
  MOD_RES (349)..(349): Selenocysteine
  MOD_RES (382)..(382): Selenocysteine
  MOD_RES (385)..(385): Selenocysteine
  MOD_RES (432)..(432): Selenocysteine
  MOD_RES (444)..(444): Selenocysteine
MRFHWLPXLSEPFDRNQELEXCIRPLWXPSGSACEXEHNKSMDMGNQHPSISRLQEIQKEVKSVEQQVIGFSGLSDDKNYKKLERILXKQLFEIDSVDXEGKGDIQQARKRAAQEXERLLKELEQNANHPHRIEIQNIFEEAQSLVREKIVPFYNGGNCVXDEFEEGIQDIILRLXHVKXGGKISLRKARYHXLXKICAVQEIIEDCMKKQPSLPLSEDAHPSVAKINFVMCEVNKARGVLIALLMGVNNNEXCRHLSCVLSGLIADLDALDVCGRXEIRNYRREVVEDINKLLKYLDLEEEADXXKAFDLRQNHSILKIEKVLKRMREIKNELLQAQNPSELYLSSKXELQGLIGQLDEVSLEKNPCIREARRRAVIEVQXLIXYIDLKEALEKRKLFACEEHPSHKAVWNVLGNLSEIQGEVLSFDGNRXDKNYIRLEELLXKQLLALDAVDPQGEEKCKAARKQAVRLAQNILSYLDLKSDEWEY

SEQ ID NO: 3837 - protein, 158 aa, Homo sapiens
  MOD_RES (7)..(7): Selenocysteine
  MOD_RES (9)..(9): Selenocysteine
  MOD_RES (23)..(23): Selenocysteine
  MOD_RES (28)..(28): Selenocysteine
  MOD_RES (30)..(30): Selenocysteine
  MOD_RES (92)..(92): Selenocysteine
  MOD_RES (102)..(102): Selenocysteine
  MOD_RES (108)..(108): Selenocysteine
  MOD_RES (117)..(117): Selenocysteine
  MOD_RES (137)..(137): Selenocysteine
MEPNDSXSXAVEEPDSLEVLVKXLDSQXRXFIVGAQMNVKEFKEHIAASVSIPSEKQRLIYQGRVLQDDKKLQEYNVGGKVIHLVERAPPQXHLPSGASSGXGSASAXHGGGSPPGXRGPGASVHDRNANSYVMVGXFNLPSDGSAVDVHINMEQAPI

SEQ ID NO: 3838 - protein, 197 aa, Homo sapiens
  MOD_RES (7)..(7): Selenocysteine
  MOD_RES (9)..(9): Selenocysteine
  MOD_RES (23)..(23): Selenocysteine
  MOD_RES (28)..(28): Selenocysteine
  MOD_RES (30)..(30): Selenocysteine
  MOD_RES (92)..(92): Selenocysteine
  MOD_RES (102)..(102): Selenocysteine
  MOD_RES (108)..(108): Selenocysteine
  MOD_RES (117)..(117): Selenocysteine
  MOD_RES (137)..(137): Selenocysteine
  MOD_RES (178)..(178): Selenocysteine
MEPNDSXSXAVEEPDSLEVLVKXLDSQXRXFIVGAQMNVKEFKEHIAASVSIPSEKQRLIYQGRVLQDDKKLQEYNVGGKVIHLVERAPPQXHLPSGASSGXGSASAXHGGGSPPGXRGPGASVHDRNANSYVMVGXFNLPSDGSAVDVHINMEQAPIQSEPRVRLVMAQHMIRDIQXLLSRMECRGGPQPQHSQPP

SEQ ID NO: 3839 - protein, 258 aa, Homo sapiens
  MOD_RES (7)..(7): Selenocysteine
  MOD_RES (9)..(9): Selenocysteine
  MOD_RES (23)..(23): Selenocysteine
  MOD_RES (28)..(28): Selenocysteine
  MOD_RES (30)..(30): Selenocysteine
  MOD_RES (92)..(92): Selenocysteine
  MOD_RES (102)..(102): Selenocysteine
  MOD_RES (108)..(108): Selenocysteine
  MOD_RES (117)..(117): Selenocysteine
  MOD_RES (137)..(137): Selenocysteine
  MOD_RES (178)..(178): Selenocysteine
  MOD_RES (204)..(204): Selenocysteine
  MOD_RES (214)..(214): Selenocysteine
  MOD_RES (245)..(245): Selenocysteine
  MOD_RES (254)..(254): Selenocysteine
MEPNDSXSXAVEEPDSLEVLVKXLDSQXRXFIVGAQMNVKEFKEHIAASVSIPSEKQRLIYQGRVLQDDKKLQEYNVGGKVIHLVERAPPQXHLPSGASSGXGSASAXHGGGSPPGXRGPGASVHDRNANSYVMVGXFNLPSDGSAVDVHINMEQAPIQSEPRVRLVMAQHMIRDIQXLLSRMECRGGPQPQHSQPPPQPPAVXPEPVALSSQXSEPVESEAPPREPMEAEEVEERAPAQNPELXPGPAPAGPXPAPE

SEQ ID NO: 3840 - protein, 259 aa, Homo sapiens
  MOD_RES (7)..(7): Selenocysteine
  MOD_RES (9)..(9): Selenocysteine
  MOD_RES (23)..(23): Selenocysteine
  MOD_RES (28)..(28): Selenocysteine
  MOD_RES (30)..(30): Selenocysteine
  MOD_RES (92)..(92): Selenocysteine
  MOD_RES (102)..(102): Selenocysteine
  MOD_RES (108)..(108): Selenocysteine
  MOD_RES (117)..(117): Selenocysteine
  MOD_RES (137)..(137): Selenocysteine
  MOD_RES (178)..(178): Selenocysteine
  MOD_RES (204)..(204): Selenocysteine
  MOD_RES (214)..(214): Selenocysteine
  MOD_RES (245)..(245): Selenocysteine
  MOD_RES (254)..(254): Selenocysteine
  MOD_RES (259)..(259): Selenocysteine
MEPNDSXSXAVEEPDSLEVLVKXLDSQXRXFIVGAQMNVKEFKEHIAASVSIPSEKQRLIYQGRVLQDDKKLQEYNVGGKVIHLVERAPPQXHLPSGASSGXGSASAXHGGGSPPGXRGPGASVHDRNANSYVMVGXFNLPSDGSAVDVHINMEQAPIQSEPRVRLVMAQHMIRDIQXLLSRMECRGGPQPQHSQPPPQPPAVXPEPVALSSQXSEPVESEAPPREPMEAEEVEERAPAQNPELXPGPAPAGPXPAPEX

SEQ ID NO: 3841 - protein, 262 aa, Homo sapiens
  MOD_RES (7)..(7): Selenocysteine
  MOD_RES (9)..(9): Selenocysteine
  MOD_RES (23)..(23): Selenocysteine
  MOD_RES (28)..(28): Selenocysteine
  MOD_RES (30)..(30): Selenocysteine
  MOD_RES (92)..(92): Selenocysteine
  MOD_RES (102)..(102): Selenocysteine
  MOD_RES (108)..(108): Selenocysteine
  MOD_RES (117)..(117): Selenocysteine
  MOD_RES (137)..(137): Selenocysteine
  MOD_RES (178)..(178): Selenocysteine
  MOD_RES (204)..(204): Selenocysteine
  MOD_RES (214)..(214): Selenocysteine
  MOD_RES (245)..(245): Selenocysteine
  MOD_RES (254)..(254): Selenocysteine
  MOD_RES (259)..(259): Selenocysteine
MEPNDSXSXAVEEPDSLEVLVKXLDSQXRXFIVGAQMNVKEFKEHIAASVSIPSEKQRLIYQGRVLQDDKKLQEYNVGGKVIHLVERAPPQXHLPSGASSGXGSASAXHGGGSPPGXRGPGASVHDRNANSYVMVGXFNLPSDGSAVDVHINMEQAPIQSEPRVRLVMAQHMIRDIQXLLSRMECRGGPQPQHSQPPPQPPAVXPEPVALSSQXSEPVESEAPPREPMEAEEVEERAPAQNPELXPGPAPAGPXPAPEXNAP

SEQ ID NO: 3842 - protein, 515 aa, Homo sapiens
  MOD_RES (7)..(7): Selenocysteine
  MOD_RES (9)..(9): Selenocysteine
  MOD_RES (23)..(23): Selenocysteine
  MOD_RES (28)..(28): Selenocysteine
  MOD_RES (30)..(30): Selenocysteine
  MOD_RES (92)..(92): Selenocysteine
  MOD_RES (102)..(102): Selenocysteine
  MOD_RES (108)..(108): Selenocysteine
  MOD_RES (117)..(117): Selenocysteine
  MOD_RES (137)..(137): Selenocysteine
  MOD_RES (178)..(178): Selenocysteine
  MOD_RES (204)..(204): Selenocysteine
  MOD_RES (214)..(214): Selenocysteine
  MOD_RES (245)..(245): Selenocysteine
  MOD_RES (254)..(254): Selenocysteine
  MOD_RES (259)..(259): Selenocysteine
  MOD_RES (300)..(301): Selenocysteine
  MOD_RES (330)..(330): Selenocysteine
  MOD_RES (344)..(344): Selenocysteine
  MOD_RES (359)..(360): Selenocysteine
  MOD_RES (377)..(378): Selenocysteine
  MOD_RES (380)..(380): Selenocysteine
  MOD_RES (382)..(382): Selenocysteine
  MOD_RES (386)..(386): Selenocysteine
  MOD_RES (391)..(391): Selenocysteine
  MOD_RES (412)..(412): Selenocysteine
  MOD_RES (432)..(432): Selenocysteine
  MOD_RES (460)..(460): Selenocysteine
  MOD_RES (470)..(470): Selenocysteine
  MOD_RES (481)..(481): Selenocysteine
  MOD_RES (485)..(485): Selenocysteine
  MOD_RES (505)..(505): Selenocysteine
MEPNDSXSXAVEEPDSLEVLVKXLDSQXRXFIVGAQMNVKEFKEHIAASVSIPSEKQRLIYQGRVLQDDKKLQEYNVGGKVIHLVERAPPQXHLPSGASSGXGSASAXHGGGSPPGXRGPGASVHDRNANSYVMVGXFNLPSDGSAVDVHINMEQAPIQSEPRVRLVMAQHMIRDIQXLLSRMECRGGPQPQHSQPPPQPPAVXPEPVALSSQXSEPVESEAPPREPMEAEEVEERAPAQNPELXPGPAPAGPXPAPEXNAPNHPSPAEYVEVLQELQRLESRLQPFLQRYYEVLGAAAXXDYNNNHEGREEDQRLINLVGESLRLLGNXFVALSDLRCNLACXPPRHLHVVRPMSHYXXPMVLQQAAIPIQINVGXXVXMXGNGXRPPPXPNAEAPPPGPGQASSVAPSSXNVESSAEGAPPPGPAPPPAXSHPRVIRISHQSVEPVVMMHMNIQDSGXQPGGVPSAPXGPLGPPGHGQXLGSXLIQLPSLPPEFMHAVAHQIXHQAMVAAVAS

SEQ ID NO: 3843 - protein, 743 aa, Homo sapiens
  MOD_RES (7)..(7): Selenocysteine
  MOD_RES (9)..(9): Selenocysteine
  MOD_RES (23)..(23): Selenocysteine
  MOD_RES (28)..(28): Selenocysteine
  MOD_RES (30)..(30): Selenocysteine
  MOD_RES (92)..(92): Selenocysteine
  MOD_RES (102)..(102): Selenocysteine
  MOD_RES (108)..(108): Selenocysteine
  MOD_RES (117)..(117): Selenocysteine
  MOD_RES (137)..(137): Selenocysteine
  MOD_RES (178)..(178): Selenocysteine
  MOD_RES (204)..(204): Selenocysteine
  MOD_RES (214)..(214): Selenocysteine
  MOD_RES (245)..(245): Selenocysteine
  MOD_RES (254)..(254): Selenocysteine
  MOD_RES (259)..(259): Selenocysteine
  MOD_RES (300)..(301): Selenocysteine
  MOD_RES (330)..(330): Selenocysteine
  MOD_RES (344)..(344): Selenocysteine
  MOD_RES (359)..(360): Selenocysteine
  MOD_RES (377)..(378): Selenocysteine
  MOD_RES (380)..(380): Selenocysteine
  MOD_RES (382)..(382): Selenocysteine
  MOD_RES (386)..(386): Selenocysteine
  MOD_RES (391)..(391): Selenocysteine
  MOD_RES (412)..(412): Selenocysteine
  MOD_RES (432)..(432): Selenocysteine
  MOD_RES (460)..(460): Selenocysteine
  MOD_RES (470)..(470): Selenocysteine
  MOD_RES (481)..(481): Selenocysteine
  MOD_RES (485)..(485): Selenocysteine
  MOD_RES (505)..(505): Selenocysteine
  MOD_RES (527)..(527): Selenocysteine
  MOD_RES (530)..(530): Selenocysteine
  MOD_RES (538)..(538): Selenocysteine
  MOD_RES (555)..(555): Selenocysteine
  MOD_RES (563)..(563): Selenocysteine
  MOD_RES (589)..(589): Selenocysteine
  MOD_RES (600)..(600): Selenocysteine
  MOD_RES (607)..(608): Selenocysteine
  MOD_RES (610)..(610): Selenocysteine
  MOD_RES (612)..(613): Selenocysteine
  MOD_RES (627)..(627): Selenocysteine
  MOD_RES (661)..(661): Selenocysteine
  MOD_RES (663)..(663): Selenocysteine
  MOD_RES (677)..(677): Selenocysteine
  MOD_RES (683)..(683): Selenocysteine
  MOD_RES (685)..(685): Selenocysteine
  MOD_RES (704)..(704): Selenocysteine
  MOD_RES (732)..(732): Selenocysteine
MEPNDSXSXAVEEPDSLEVLVKXLDSQXRXFIVGAQMNVKEFKEHIAASVSIPSEKQRLIYQGRVLQDDKKLQEYNVGGKVIHLVERAPPQXHLPSGASSGXGSASAXHGGGSPPGXRGPGASVHDRNANSYVMVGXFNLPSDGSAVDVHINMEQAPIQSEPRVRLVMAQHMIRDIQXLLSRMECRGGPQPQHSQPPPQPPAVXPEPVALSSQXSEPVESEAPPREPMEAEEVEERAPAQNPELXPGPAPAGPXPAPEXNAPNHPSPAEYVEVLQELQRLESRLQPFLQRYYEVLGAAAXXDYNNNHEGREEDQRLINLVGESLRLLGNXFVALSDLRCNLACXPPRHLHVVRPMSHYXXPMVLQQAAIPIQINVGXXVXMXGNGXRPPPXPNAEAPPPGPGQASSVAPSSXNVESSAEGAPPPGPAPPPAXSHPRVIRISHQSVEPVVMMHMNIQDSGXQPGGVPSAPXGPLGPPGHGQXLGSXLIQLPSLPPEFMHAVAHQIXHQAMVAAVASAAAGQQVPGFPXAPXRVVIARPXPPQARPSHPGGPPVSGXLQGAGLGXNASLAQMVSGLVGQLLMQPVLVAQGXPGMAPPPAPAXASASAGXXNXAXXAGPAPGGPAQPPPXPQPSMADLQFSQLLGNLLGPAGPGAGGSGVASPXIXVAMPGVPAFLQGMXDFLQAXQXAPPPPPPPPPPPPAPEQQXMPPPGSPSGGAGSPGGLGLESLSPEFFXSVVQGVLSSLL

SEQ ID NO: 3844 - protein, 743 aa, Homo sapiens
  MOD_RES (7)..(7): Selenocysteine
  MOD_RES (9)..(9): Selenocysteine
  MOD_RES (23)..(23): Selenocysteine
  MOD_RES (28)..(28): Selenocysteine
  MOD_RES (30)..(30): Selenocysteine
  MOD_RES (92)..(92): Selenocysteine
  MOD_RES (102)..(102): Selenocysteine
  MOD_RES (108)..(108): Selenocysteine
  MOD_RES (117)..(117): Selenocysteine
  MOD_RES (137)..(137): Selenocysteine
  MOD_RES (178)..(178): Selenocysteine
  MOD_RES (204)..(204): Selenocysteine
  MOD_RES (214)..(214): Selenocysteine
  MOD_RES (245)..(245): Selenocysteine
  MOD_RES (254)..(254): Selenocysteine
  MOD_RES (259)..(259): Selenocysteine
  MOD_RES (300)..(301): Selenocysteine
  MOD_RES (330)..(330): Selenocysteine
  MOD_RES (344)..(344): Selenocysteine
  MOD_RES (359)..(360): Selenocysteine
  MOD_RES (377)..(378): Selenocysteine
  MOD_RES (380)..(380): Selenocysteine
  MOD_RES (382)..(382): Selenocysteine
  MOD_RES (386)..(386): Selenocysteine
  MOD_RES (391)..(391): Selenocysteine
  MOD_RES (412)..(412): Selenocysteine
  MOD_RES (432)..(432): Selenocysteine
  MOD_RES (460)..(460): Selenocysteine
  MOD_RES (470)..(470): Selenocysteine
  MOD_RES (481)..(481): Selenocysteine
  MOD_RES (485)..(485): Selenocysteine
  MOD_RES (505)..(505): Selenocysteine
  MOD_RES (527)..(527): Selenocysteine
  MOD_RES (530)..(530): Selenocysteine
  MOD_RES (538)..(538): Selenocysteine
  MOD_RES (555)..(555): Selenocysteine
  MOD_RES (563)..(563): Selenocysteine
  MOD_RES (589)..(589): Selenocysteine
  MOD_RES (600)..(600): Selenocysteine
  MOD_RES (607)..(608): Selenocysteine
  MOD_RES (610)..(610): Selenocysteine
  MOD_RES (612)..(613): Selenocysteine
  MOD_RES (627)..(627): Selenocysteine
  MOD_RES (661)..(661): Selenocysteine
  MOD_RES (663)..(663): Selenocysteine
  MOD_RES (677)..(677): Selenocysteine
  MOD_RES (683)..(683): Selenocysteine
  MOD_RES (685)..(685): Selenocysteine
  MOD_RES (704)..(704): Selenocysteine
  MOD_RES (732)..(732): Selenocysteine
MEPNDSXSXAVEEPDSLEVLVKXLDSQXRXFIVGAQMNVKEFKEHIAASVSIPSEKQRLIYQGRVLQDDKKLQEYNVGGKVIHLVERAPPQXHLPSGASSGXGSASAXHGGGSPPGXRGPGASVHDRNANSYVMVGXFNLPSDGSAVDVHINMEQAPIQSEPRVRLVMAQHMIRDIQXLLSRMECRGGPQPQHSQPPPQPPAVXPEPVALSSQXSEPVESEAPPREPMEAEEVEERAPAQNPELXPGPAPAGPXPAPEXNAPNHPSPAEYVEVLQELQRLESRLQPFLQRYYEVLGAAAXXDYNNNHEGREEDQRLINLVGESLRLLGNXFVALSDLRCNLACXPPRHLHVVRPMSHYXXPMVLQQAAIPIQINVGXXVXMXGNGXRPPPXPNAEAPPPGPGQASSVAPSSXNVESSAEGAPPPGPAPPPAXSHPRVIRISHQSVEPVVMMHMNIQDSGXQPGGVPSAPXGPLGPPGHGQXLGSXLIQLPSLPPEFMHAVAHQIXHQAMVAAVASAAAGQQVPGFPXAPXRVVIARPXPPQARPSHPGGPPVSGXLQGAGLGXNASLAQMVSGLVGQLLMQPVLVAQGXPGMAPPPAPAXASASAGXXNXAXXAGPAPGGPAQPPPXPQPSMADLQFSQLLGNLLGPAGPGAGGPGVASPXIXVAMPGVPAFLQGMXDFLQAXQXAPPPPPPPPPPPPAPEQQXMPPPGSPSGGAGSPGGLGLESLSPEFFXSVVQGVLSSLL

SEQ ID NO: 3845 - protein, 903 aa, Homo sapiens
  MOD_RES (7)..(7): Selenocysteine
  MOD_RES (9)..(9): Selenocysteine
  MOD_RES (23)..(23): Selenocysteine
  MOD_RES (28)..(28): Selenocysteine
  MOD_RES (30)..(30): Selenocysteine
  MOD_RES (92)..(92): Selenocysteine
  MOD_RES (102)..(102): Selenocysteine
  MOD_RES (108)..(108): Selenocysteine
  MOD_RES (117)..(117): Selenocysteine
  MOD_RES (137)..(137): Selenocysteine
  MOD_RES (178)..(178): Selenocysteine
  MOD_RES (204)..(204): Selenocysteine
  MOD_RES (214)..(214): Selenocysteine
  MOD_RES (245)..(245): Selenocysteine
  MOD_RES (254)..(254): Selenocysteine
  MOD_RES (259)..(259): Selenocysteine
  MOD_RES (300)..(301): Selenocysteine
  MOD_RES (330)..(330): Selenocysteine
  MOD_RES (344)..(344): Selenocysteine
  MOD_RES (359)..(360): Selenocysteine
  MOD_RES (377)..(378): Selenocysteine
  MOD_RES (380)..(380): Selenocysteine
  MOD_RES (382)..(382): Selenocysteine
  MOD_RES (386)..(386): Selenocysteine
  MOD_RES (391)..(391): Selenocysteine
  MOD_RES (412)..(412): Selenocysteine
  MOD_RES (432)..(432): Selenocysteine
  MOD_RES (460)..(460): Selenocysteine
  MOD_RES (470)..(470): Selenocysteine
  MOD_RES (481)..(481): Selenocysteine
  MOD_RES (491)..(491): Selenocysteine
  MOD_RES (494)..(494): Selenocysteine
  MOD_RES (502)..(502): Selenocysteine
  MOD_RES (519)..(519): Selenocysteine
  MOD_RES (526)..(526): Selenocysteine
  MOD_RES (552)..(552): Selenocysteine
  MOD_RES (570)..(570): Selenocysteine
  MOD_RES (668)..(668): Selenocysteine
  MOD_RES (676)..(676): Selenocysteine
  MOD_RES (678)..(678): Selenocysteine
  MOD_RES (681)..(681): Selenocysteine
  MOD_RES (705)..(705): Selenocysteine
  MOD_RES (725)..(725): Selenocysteine
  MOD_RES (783)..(784): Selenocysteine
MEPNDSXSXAVEEPDSLEVLVKXLDSQXRXFIVGAQMNVKEFKEHIAASVSIPSEKQRLIYQGRVLQDDKKLQEYNVGGKVIHLVERAPPQXHLPSGASSGXGSASAXHGGGSPPGXRGPGASVHDRNANSYVMVGXFNLPSDGSAVDVHINMEQAPIQSEPRVRLVMAQHMIRDIQXLLSRMECRGGPQPQHSQPPPQPPAVXPEPVALSSQXSEPVESEAPPREPMEAEEVEERAPAQNPELXPGPAPAGPXPAPEXNAPNHPSPAEYVEVLQELQRLESRLQPFLQRYYEVLGAAAXXDYNNNHEGREEDQRLINLVGESLRLLGNXFVALSDLRCNLACXPPRHLHVVRPMSHYXXPMVLQQAAIPIQINVGXXVXMXGNGXRPPPXPNAEAPPPGPGQASSVAPSSXNVESSAEGAPPPGPAPPPAXSHPRVIRISHQSVEPVVMMHMNIQDSGXQPGGVPSAPXGPLGPPGHGQXLGQQVPGFPXAPXRVVIARPXPPQARPSHPGGPPVSGXLGAGLGXNASLAQMVSGLVGQLLMQPVLVAQGXPGSPGGLGLESLSPEFFXSVVQGVLSSLLGSLGARAGSSESIAAFIQRLSGSSNIFEPGADGALGFFGALLSLLCQNFSMVDVVMLLHGHFQPLQRLQPQLRSFFHQHYLGGQEPXPSNIRMAXHXLIXGLEEYVRESFSLVQVQPGVDIIRXNLEFLQEQFNSIAAHVLHCXDSGFGARLLELCNQGLFECLALNLHCLGGQQMELAAVINGRIRRMSRGVNPSLVSWLXXMMGLRLQVVLEHMPVGPDAILRYVRRVGDPPQPLPEEPMEVQGAERASPEPQEWVPIIQQDIQSQRKVKPQPPLSDAYLSGMPAKRRKLRSDIQKRLQEDPNYSPQRFPNAQRAFADDP

SEQ ID NO: 3846 - protein, 1077 aa, Homo sapiens
  MOD_RES (7)..(7): Selenocysteine
  MOD_RES (9)..(9): Selenocysteine
  MOD_RES (23)..(23): Selenocysteine
  MOD_RES (28)..(28): Selenocysteine
  MOD_RES (30)..(30): Selenocysteine
  MOD_RES (92)..(92): Selenocysteine
  MOD_RES (102)..(102): Selenocysteine
  MOD_RES (108)..(108): Selenocysteine
  MOD_RES (117)..(117): Selenocysteine
  MOD_RES (137)..(137): Selenocysteine
  MOD_RES (178)..(178): Selenocysteine
  MOD_RES (204)..(204): Selenocysteine
  MOD_RES (214)..(214): Selenocysteine
  MOD_RES (245)..(245): Selenocysteine
  MOD_RES (254)..(254): Selenocysteine
  MOD_RES (259)..(259): Selenocysteine
  MOD_RES (300)..(301): Selenocysteine
  MOD_RES (330)..(330): Selenocysteine
  MOD_RES (344)..(344): Selenocysteine
  MOD_RES (359)..(360): Selenocysteine
  MOD_RES (377)..(378): Selenocysteine
  MOD_RES (380)..(380): Selenocysteine
  MOD_RES (382)..(382): Selenocysteine
  MOD_RES (386)..(386): Selenocysteine
  MOD_RES (391)..(391): Selenocysteine
  MOD_RES (412)..(412): Selenocysteine
  MOD_RES (432)..(432): Selenocysteine
  MOD_RES (460)..(460): Selenocysteine
  MOD_RES (470)..(470): Selenocysteine
  MOD_RES (481)..(481): Selenocysteine
  MOD_RES (491)..(491): Selenocysteine
  MOD_RES (494)..(494): Selenocysteine
  MOD_RES (502)..(502): Selenocysteine
  MOD_RES (519)..(519): Selenocysteine
  MOD_RES (527)..(527): Selenocysteine
  MOD_RES (553)..(553): Selenocysteine
  MOD_RES (564)..(564): Selenocysteine
  MOD_RES (571)..(572): Selenocysteine
  MOD_RES (574)..(574): Selenocysteine
  MOD_RES (576)..(577): Selenocysteine
  MOD_RES (591)..(591): Selenocysteine
  MOD_RES (625)..(625): Selenocysteine
  MOD_RES (627)..(627): Selenocysteine
  MOD_RES (641)..(641): Selenocysteine
  MOD_RES (647)..(647): Selenocysteine
  MOD_RES (649)..(649): Selenocysteine
  MOD_RES (668)..(668): Selenocysteine
  MOD_RES (696)..(696): Selenocysteine
  MOD_RES (794)..(794): Selenocysteine
  MOD_RES (802)..(802): Selenocysteine
  MOD_RES (804)..(804): Selenocysteine
  MOD_RES (807)..(807): Selenocysteine
  MOD_RES (831)..(831): Selenocysteine
  MOD_RES (851)..(851): Selenocysteine
  MOD_RES (909)..(910): Selenocysteine
  MOD_RES (972)..(973): Selenocysteine
  MOD_RES (1001)..(1001): Selenocysteine
MEPNDSXSXAVEEPDSLEVLVKXLDSQXRXFIVGAQMNVKEFKEHIAASVSIPSEKQRLIYQGRVLQDDKKLQEYNVGGKVIHLVERAPPQXHLPSGASSGXGSASAXHGGGSPPGXRGPGASVHDRNANSYVMVGXFNLPSDGSAVDVHINMEQAPIQSEPRVRLVMAQHMIRDIQXLLSRMECRGGPQPQHSQPPPQPPAVXPEPVALSSQXSEPVESEAPPREPMEAEEVEERAPAQNPELXPGPAPAGPXPAPEXNAPNHPSPAEYVEVLQELQRLESRLQPFLQRYYEVLGAAAXXDYNNNHEGREEDQRLINLVGESLRLLGNXFVALSDLRCNLACXPPRHLHVVRPMSHYXXPMVLQQAAIPIQINVGXXVXMXGNGXRPPPXPNAEAPPPGPGQASSVAPSSXNVESSAEGAPPPGPAPPPAXSHPRVIRISHQSVEPVVMMHMNIQDSGXQPGGVPSAPXGPLGPPGHGQXLGQQVPGFPXAPXRVVIARPXPPQARPSHPGGPPVSGXLQGAGLGXNASLAQMVSGLVGQLLMQPVLVAQGXPGMAPPPAPAXASASAGXXNXAXXAGPAPGGPAQPPPXPQPSMADLQFSQLLGNLLGPAGPGAGGSGVASPXIXVAMPGVPAFLQGMXDFLQAXQXAPPPPPPPPPPPPAPEQQXMPPPGSPSGGAGSPGGLGLESLSPEFFXSVVQGVLSSLLGSLGARAGSSESIAAFIQRLSGSSNIFEPGADGALGFFGALLSLLCQNFSMVDVVMLLHGHFQPLQRLQPQLRSFFHQHYLGGQEPXPSNIRMAXHXLIXGLEEYVRESFSLVQVQPGVDIIRXNLEFLQEQFNSIAAHVLHCXDSGFGARLLELCNQGLFECLALNLHCLGGQQMELAAVINGRIRRMSRGVNPSLVSWLXXMMGLRLQVVLEHMPVGPDAILRYVRRVGDPPQPLPEEPMEVQGAERASPEPQRENASPAPGXXAEEAMSRGPPPAPEGGSRDEQDGASAEXEPWAAAVPPEWVPIIQQDIQSQRKVKPQPPLSDAYLSGMPAKRRKLRSDIQKRLQEDPNYSPQRFPNAQRAFADDP

SEQ ID NO: 3847 - protein, 1077 aa, Homo sapiens
  MOD_RES (7)..(7): Selenocysteine
  MOD_RES (9)..(9): Selenocysteine
  MOD_RES (23)..(23): Selenocysteine
  MOD_RES (28)..(28): Selenocysteine
  MOD_RES (30)..(30): Selenocysteine
  MOD_RES (92)..(92): Selenocysteine
  MOD_RES (102)..(102): Selenocysteine
  MOD_RES (108)..(108): Selenocysteine
  MOD_RES (117)..(117): Selenocysteine
  MOD_RES (137)..(137): Selenocysteine
  MOD_RES (178)..(178): Selenocysteine
  MOD_RES (204)..(204): Selenocysteine
  MOD_RES (214)..(214): Selenocysteine
  MOD_RES (245)..(245): Selenocysteine
  MOD_RES (254)..(254): Selenocysteine
  MOD_RES (259)..(259): Selenocysteine
  MOD_RES (300)..(301): Selenocysteine
  MOD_RES (330)..(330): Selenocysteine
  MOD_RES (344)..(344): Selenocysteine
  MOD_RES (359)..(360): Selenocysteine
  MOD_RES (377)..(378): Selenocysteine
  MOD_RES (380)..(380): Selenocysteine
  MOD_RES (382)..(382): Selenocysteine
  MOD_RES (386)..(386): Selenocysteine
  MOD_RES (391)..(391): Selenocysteine
  MOD_RES (412)..(412): Selenocysteine
  MOD_RES (432)..(432): Selenocysteine
  MOD_RES (460)..(460): Selenocysteine
  MOD_RES (470)..(470): Selenocysteine
  MOD_RES (481)..(481): Selenocysteine
  MOD_RES (491)..(491): Selenocysteine
  MOD_RES (494)..(494): Selenocysteine
  MOD_RES (502)..(502): Selenocysteine
  MOD_RES (519)..(519): Selenocysteine
  MOD_RES (527)..(527): Selenocysteine
  MOD_RES (553)..(553): Selenocysteine
  MOD_RES (564)..(564): Selenocysteine
  MOD_RES (571)..(572): Selenocysteine
  MOD_RES (574)..(574): Selenocysteine
  MOD_RES (576)..(577): Selenocysteine
  MOD_RES (591)..(591): Selenocysteine
  MOD_RES (625)..(625): Selenocysteine
  MOD_RES (627)..(627): Selenocysteine
  MOD_RES (641)..(641): Selenocysteine
  MOD_RES (647)..(647): Selenocysteine
  MOD_RES (649)..(649): Selenocysteine
  MOD_RES (668)..(668): Selenocysteine
  MOD_RES (696)..(696): Selenocysteine
  MOD_RES (794)..(794): Selenocysteine
  MOD_RES (802)..(802): Selenocysteine
  MOD_RES (804)..(804): Selenocysteine
  MOD_RES (807)..(807): Selenocysteine
  MOD_RES (831)..(831): Selenocysteine
  MOD_RES (851)..(851): Selenocysteine
  MOD_RES (909)..(910): Selenocysteine
  MOD_RES (972)..(973): Selenocysteine
  MOD_RES (1001)..(1001): Selenocysteine
MEPNDSXSXAVEEPDSLEVLVKXLDSQXRXFIVGAQMNVKEFKEHIAASVSIPSEKQRLIYQGRVLQDDKKLQEYNVGGKVIHLVERAPPQXHLPSGASSGXGSASAXHGGGSPPGXRGPGASVHDRNANSYVMVGXFNLPSDGSAVDVHINMEQAPIQSEPRVRLVMAQHMIRDIQXLLSRMECRGGPQPQHSQPPPQPPAVXPEPVALSSQXSEPVESEAPPREPMEAEEVEERAPAQNPELXPGPAPAGPXPAPEXNAPNHPSPAEYVEVLQELQRLESRLQPFLQRYYEVLGAAAXXDYNNNHEGREEDQRLINLVGESLRLLGNXFVALSDLRCNLACXPPRHLHVVRPMSHYXXPMVLQQAAIPIQINVGXXVXMXGNGXRPPPXPNAEAPPPGPGQASSVAPSSXNVESSAEGAPPPGPAPPPAXSHPRVIRISHQSVEPVVMMHMNIQDSGXQPGGVPSAPXGPLGPPGHGQXLGQQVPGFPXAPXRVVIARPXPPQARPSHPGGPPVSGXLQGAGLGXNASLAQMVSGLVGQLLMQPVLVAQGXPGMAPPPAPAXASASAGXXNXAXXAGPAPGGPAQPPPXPQPSMADLQFSQLLGNLLGPAGPGAGGPGVASPXIXVAMPGVPAFLQGMXDFLQAXQXAPPPPPPPPPPPPAPEQQXMPPPGSPSGGAGSPGGLGLESLSPEFFXSVVQGVLSSLLGSLGARAGSSESIAAFIQRLSGSSNIFEPGADGALGFFGALLSLLCQNFSMVDVVMLLHGHFQPLQRLQPQLRSFFHQHYLGGQEPXPSNIRMAXHXLIXGLEEYVRESFSLVQVQPGVDIIRXNLEFLQEQFNSIAAHVLHCXDSGFGARLLELCNQGLFECLALNLHCLGGQQMELAAVINGRIRRMSRGVNPSLVSWLXXMMGLRLQVVLEHMPVGPDAILRYVRRVGDPPQPLPEEPMEVQGAERASPEPQRENASPAPGXXAEEAMSRGPPPAPEGGSRDEQDGASAEXEPWAAAVPPEWVPIIQQDIQSQRKVKPQPPLSDAYLSGMPAKRRKLRSDIQKRLQEDPNYSPQRFPNAQRAFADDP

SEQ ID NO: 3848 - protein, 1126 aa, Homo sapiens
  MOD_RES (7)..(7): Selenocysteine
  MOD_RES (9)..(9): Selenocysteine
  MOD_RES (23)..(23): Selenocysteine
  MOD_RES (28)..(28): Selenocysteine
  MOD_RES (30)..(30): Selenocysteine
  MOD_RES (92)..(92): Selenocysteine
  MOD_RES (102)..(102): Selenocysteine
  MOD_RES (108)..(108): Selenocysteine
  MOD_RES (117)..(117): Selenocysteine
  MOD_RES (137)..(137): Selenocysteine
  MOD_RES (178)..(178): Selenocysteine
  MOD_RES (204)..(204): Selenocysteine
  MOD_RES (214)..(214): Selenocysteine
  MOD_RES (245)..(245): Selenocysteine
  MOD_RES (254)..(254): Selenocysteine
  MOD_RES (259)..(259): Selenocysteine
  MOD_RES (300)..(301): Selenocysteine
  MOD_RES (330)..(330): Selenocysteine
  MOD_RES (344)..(344): Selenocysteine
  MOD_RES (359)..(360): Selenocysteine
  MOD_RES (377)..(378): Selenocysteine
  MOD_RES (380)..(380): Selenocysteine
  MOD_RES (382)..(382): Selenocysteine
  MOD_RES (386)..(386): Selenocysteine
  MOD_RES (391)..(391): Selenocysteine
  MOD_RES (412)..(412): Selenocysteine
  MOD_RES (432)..(432): Selenocysteine
  MOD_RES (460)..(460): Selenocysteine
  MOD_RES (470)..(470): Selenocysteine
  MOD_RES (481)..(481): Selenocysteine
  MOD_RES (491)..(491): Selenocysteine
  MOD_RES (494)..(494): Selenocysteine
  MOD_RES (502)..(502): Selenocysteine
  MOD_RES (519)..(519): Selenocysteine
  MOD_RES (527)..(527): Selenocysteine
  MOD_RES (553)..(553): Selenocysteine
  MOD_RES (564)..(564): Selenocysteine
  MOD_RES (571)..(572): Selenocysteine
  MOD_RES (574)..(574): Selenocysteine
  MOD_RES (576)..(577): Selenocysteine
  MOD_RES (591)..(591): Selenocysteine
  MOD_RES (625)..(625): Selenocysteine
  MOD_RES (627)..(627): Selenocysteine
  MOD_RES (641)..(641): Selenocysteine
  MOD_RES (647)..(647): Selenocysteine
  MOD_RES (649)..(649): Selenocysteine
  MOD_RES (668)..(668): Selenocysteine
  MOD_RES (696)..(696): Selenocysteine
  MOD_RES (794)..(794): Selenocysteine
  MOD_RES (802)..(802): Selenocysteine
  MOD_RES (804)..(804): Selenocysteine
  MOD_RES (807)..(807): Selenocysteine
  MOD_RES (831)..(831): Selenocysteine
  MOD_RES (851)..(851): Selenocysteine
  MOD_RES (909)..(910): Selenocysteine
  MOD_RES (972)..(973): Selenocysteine
  MOD_RES (1001)..(1001): Selenocysteine
  MOD_RES (1047)..(1047): Selenocysteine
  MOD_RES (1074)..(1074): Selenocysteine
MEPNDSXSXAVEEPDSLEVLVKXLDSQXRXFIVGAQMNVKEFKEHIAASVSIPSEKQRLIYQGRVLQDDKKLQEYNVGGKVIHLVERAPPQXHLPSGASSGXGSASAXHGGGSPPGXRGPGASVHDRNANSYVMVGXFNLPSDGSAVDVHINMEQAPIQSEPRVRLVMAQHMIRDIQXLLSRMECRGGPQPQHSQPPPQPPAVXPEPVALSSQXSEPVESEAPPREPMEAEEVEERAPAQNPELXPGPAPAGPXPAPEXNAPNHPSPAEYVEVLQELQRLESRLQPFLQRYYEVLGAAAXXDYNNNHEGREEDQRLINLVGESLRLLGNXFVALSDLRCNLACXPPRHLHVVRPMSHYXXPMVLQQAAIPIQINVGXXVXMXGNGXRPPPXPNAEAPPPGPGQASSVAPSSXNVESSAEGAPPPGPAPPPAXSHPRVIRISHQSVEPVVMMHMNIQDSGXQPGGVPSAPXGPLGPPGHGQXLGQQVPGFPXAPXRVVIARPXPPQARPSHPGGPPVSGXLQGAGLGXNASLAQMVSGLVGQLLMQPVLVAQGXPGMAPPPAPAXASASAGXXNXAXXAGPAPGGPAQPPPXPQPSMADLQFSQLLGNLLGPAGPGAGGSGVASPXIXVAMPGVPAFLQGMXDFLQAXQXAPPPPPPPPPPPPAPEQQXMPPPGSPSGGAGSPGGLGLESLSPEFFXSVVQGVLSSLLGSLGARAGSSESIAAFIQRLSGSSNIFEPGADGALGFFGALLSLLCQNFSMVDVVMLLHGHFQPLQRLQPQLRSFFHQHYLGGQEPXPSNIRMAXHXLIXGLEEYVRESFSLVQVQPGVDIIRXNLEFLQEQFNSIAAHVLHCXDSGFGARLLELCNQGLFECLALNLHCLGGQQMELAAVINGRIRRMSRGVNPSLVSWLXXMMGLRLQVVLEHMPVGPDAILRYVRRVGDPPQPLPEEPMEVQGAERASPEPQRENASPAPGXXAEEAMSRGPPPAPEGGSRDEQDGASAEXEPWAAAVPPEWVPIIQQDIQSQRKVKPQPPLSDAYLSGMPAKRRKXMQGEGPQLLLSEAVSRAAKAAGARPLXSPESLSRDLEAPEVQESYRQQLRSDIQKRLQEDPNYSPQRFPNAQRAFADDP

SEQ ID NO: 3849 - protein, 1126 aa, Homo sapiens
  MOD_RES (7)..(7): Selenocysteine
  MOD_RES (9)..(9): Selenocysteine
  MOD_RES (23)..(23): Selenocysteine
  MOD_RES (28)..(28): Selenocysteine
  MOD_RES (30)..(30): Selenocysteine
  MOD_RES (92)..(92): Selenocysteine
  MOD_RES (102)..(102): Selenocysteine
  MOD_RES (108)..(108): Selenocysteine
  MOD_RES (117)..(117): Selenocysteine
  MOD_RES (137)..(137): Selenocysteine
  MOD_RES (178)..(178): Selenocysteine
  MOD_RES (204)..(204): Selenocysteine
  MOD_RES (214)..(214): Selenocysteine
  MOD_RES (245)..(245): Selenocysteine
  MOD_RES (254)..(254): Selenocysteine
  MOD_RES (259)..(259): Selenocysteine
  MOD_RES (300)..(301): Selenocysteine
  MOD_RES (330)..(330): Selenocysteine
  MOD_RES (344)..(344): Selenocysteine
  MOD_RES (359)..(360): Selenocysteine
  MOD_RES (377)..(378): Selenocysteine
  MOD_RES (380)..(380): Selenocysteine
  MOD_RES (382)..(382): Selenocysteine
  MOD_RES (386)..(386): Selenocysteine
  MOD_RES (391)..(391): Selenocysteine
  MOD_RES (412)..(412): Selenocysteine
  MOD_RES (432)..(432): Selenocysteine
  MOD_RES (460)..(460): Selenocysteine
  MOD_RES (470)..(470): Selenocysteine
  MOD_RES (481)..(481): Selenocysteine
  MOD_RES (491)..(491): Selenocysteine
  MOD_RES (494)..(494): Selenocysteine
  MOD_RES (502)..(502): Selenocysteine
  MOD_RES (519)..(519): Selenocysteine
  MOD_RES (527)..(527): Selenocysteine
  MOD_RES (553)..(553): Selenocysteine
  MOD_RES (564)..(564): Selenocysteine
  MOD_RES (571)..(572): Selenocysteine
  MOD_RES (574)..(574): Selenocysteine
  MOD_RES (576)..(577): Selenocysteine
  MOD_RES (591)..(591): Selenocysteine
  MOD_RES (625)..(625): Selenocysteine
  MOD_RES (627)..(627): Selenocysteine
  MOD_RES (641)..(641): Selenocysteine
  MOD_RES (647)..(647): Selenocysteine
  MOD_RES (649)..(649): Selenocysteine
  MOD_RES (668)..(668): Selenocysteine
  MOD_RES (696)..(696): Selenocysteine
  MOD_RES (794)..(794): Selenocysteine
  MOD_RES (802)..(802): Selenocysteine
  MOD_RES (804)..(804): Selenocysteine
  MOD_RES (807)..(807): Selenocysteine
  MOD_RES (831)..(831): Selenocysteine
  MOD_RES (851)..(851): Selenocysteine
  MOD_RES (909)..(910): Selenocysteine
  MOD_RES (972)..(973): Selenocysteine
  MOD_RES (1001)..(1001): Selenocysteine
  MOD_RES (1047)..(1047): Selenocysteine
  MOD_RES (1074)..(1074): Selenocysteine
MEPNDSXSXAVEEPDSLEVLVKXLDSQXRXFIVGAQMNVKEFKEHIAASVSIPSEKQRLIYQGRVLQDDKKLQEYNVGGKVIHLVERAPPQXHLPSGASSGXGSASAXHGGGSPPGXRGPGASVHDRNANSYVMVGXFNLPSDGSAVDVHINMEQAPIQSEPRVRLVMAQHMIRDIQXLLSRMECRGGPQPQHSQPPPQPPAVXPEPVALSSQXSEPVESEAPPREPMEAEEVEERAPAQNPELXPGPAPAGPXPAPEXNAPNHPSPAEYVEVLQELQRLESRLQPFLQRYYEVLGAAAXXDYNNNHEGREEDQRLINLVGESLRLLGNXFVALSDLRCNLACXPPRHLHVVRPMSHYXXPMVLQQAAIPIQINVGXXVXMXGNGXRPPPXPNAEAPPPGPGQASSVAPSSXNVESSAEGAPPPGPAPPPAXSHPRVIRISHQSVEPVVMMHMNIQDSGXQPGGVPSAPXGPLGPPGHGQXLGQQVPGFPXAPXRVVIARPXPPQARPSHPGGPPVSGXLQGAGLGXNASLAQMVSGLVGQLLMQPVLVAQGXPGMAPPPAPAXASASAGXXNXAXXAGPAPGGPAQPPPXPQPSMADLQFSQLLGNLLGPAGPGAGGPGVASPXIXVAMPGVPAFLQGMXDFLQAXQXAPPPPPPPPPPPPAPEQQXMPPPGSPSGGAGSPGGLGLESLSPEFFXSVVQGVLSSLLGSLGARAGSSESIAAFIQRLSGSSNIFEPGADGALGFFGALLSLLCQNFSMVDVVMLLHGHFQPLQRLQPQLRSFFHQHYLGGQEPXPSNIRMAXHXLIXGLEEYVRESFSLVQVQPGVDIIRXNLEFLQEQFNSIAAHVLHCXDSGFGARLLELCNQGLFECLALNLHCLGGQQMELAAVINGRIRRMSRGVNPSLVSWLXXMMGLRLQVVLEHMPVGPDAILRYVRRVGDPPQPLPEEPMEVQGAERASPEPQRENASPAPGXXAEEAMSRGPPPAPEGGSRDEQDGASAEXEPWAAAVPPEWVPIIQQDIQSQRKVKPQPPLSDAYLSGMPAKRRKXMQGEGPQLLLSEAVSRAAKAAGARPLXSPESLSRDLEAPEVQESYRQQLRSDIQKRLQEDPNYSPQRFPNAQRAFADDP

SEQ ID NO: 3850 - protein, 233 aa, Homo sapiens
  MOD_RES (7)..(7): Selenocysteine
  MOD_RES (9)..(9): Selenocysteine
  MOD_RES (23)..(23): Selenocysteine
  MOD_RES (28)..(28): Selenocysteine
  MOD_RES (30)..(30): Selenocysteine
  MOD_RES (92)..(92): Selenocysteine
  MOD_RES (102)..(102): Selenocysteine
  MOD_RES (108)..(108): Selenocysteine
  MOD_RES (117)..(117): Selenocysteine
  MOD_RES (137)..(137): Selenocysteine
  MOD_RES (178)..(178): Selenocysteine
  MOD_RES (185)..(185): Selenocysteine
  MOD_RES (210)..(210): Selenocysteine
  MOD_RES (220)..(220): Selenocysteine
MEPNDSXSXAVEEPDSLEVLVKXLDSQXRXFIVGAQMNVKEFKEHIAASVSIPSEKQRLIYQGRVLQDDKKLQEYNVGGKVIHLVERAPPQXHLPSGASSGXGSASAXHGGGSPPGXRGPGASVHDRNANSYVMVGXFNLPSDGSAVDVHINMEQAPIQSEPRVRLVMAQHMIRDIQXLLSRMEXLPYLQCRGGPQPQHSQPPPQPPAVXPEPVALSSQXSEPVESEAPPREP

SEQ ID NO: 3851 - protein, 1132 aa, Homo sapiens
  MOD_RES (7)..(7): Selenocysteine
  MOD_RES (9)..(9): Selenocysteine
  MOD_RES (23)..(23): Selenocysteine
  MOD_RES (28)..(28): Selenocysteine
  MOD_RES (30)..(30): Selenocysteine
  MOD_RES (92)..(92): Selenocysteine
  MOD_RES (102)..(102): Selenocysteine
  MOD_RES (108)..(108): Selenocysteine
  MOD_RES (117)..(117): Selenocysteine
  MOD_RES (137)..(137): Selenocysteine
  MOD_RES (178)..(178): Selenocysteine
  MOD_RES (185)..(185): Selenocysteine
  MOD_RES (210)..(210): Selenocysteine
  MOD_RES (220)..(220): Selenocysteine
  MOD_RES (251)..(251): Selenocysteine
  MOD_RES (260)..(260): Selenocysteine
  MOD_RES (265)..(265): Selenocysteine
  MOD_RES (306)..(307): Selenocysteine
  MOD_RES (336)..(336): Selenocysteine
  MOD_RES (350)..(350): Selenocysteine
  MOD_RES (365)..(366): Selenocysteine
  MOD_RES (383)..(384): Selenocysteine
  MOD_RES (386)..(386): Selenocysteine
  MOD_RES (388)..(388): Selenocysteine
  MOD_RES (392)..(392): Selenocysteine
  MOD_RES (397)..(397): Selenocysteine
  MOD_RES (418)..(418): Selenocysteine
  MOD_RES (438)..(438): Selenocysteine
  MOD_RES (466)..(466): Selenocysteine
  MOD_RES (476)..(476): Selenocysteine
  MOD_RES (487)..(487): Selenocysteine
  MOD_RES (497)..(497): Selenocysteine
  MOD_RES (500)..(500): Selenocysteine
  MOD_RES (508)..(508): Selenocysteine
  MOD_RES (525)..(525): Selenocysteine
  MOD_RES (533)..(533): Selenocysteine
  MOD_RES (559)..(559): Selenocysteine
  MOD_RES (570)..(570): Selenocysteine
  MOD_RES (577)..(578): Selenocysteine
  MOD_RES (580)..(580): Selenocysteine
  MOD_RES (582)..(583): Selenocysteine
  MOD_RES (597)..(597): Selenocysteine
  MOD_RES (631)..(631): Selenocysteine
  MOD_RES (633)..(633): Selenocysteine
  MOD_RES (647)..(647): Selenocysteine
  MOD_RES (653)..(653): Selenocysteine
  MOD_RES (655)..(655): Selenocysteine
  MOD_RES (674)..(674): Selenocysteine
  MOD_RES (702)..(702): Selenocysteine
  MOD_RES (800)..(800): Selenocysteine
  MOD_RES (808)..(808): Selenocysteine
  MOD_RES (810)..(810): Selenocysteine
  MOD_RES (813)..(813): Selenocysteine
  MOD_RES (837)..(837): Selenocysteine
  MOD_RES (857)..(857): Selenocysteine
  MOD_RES (915)..(916): Selenocysteine
  MOD_RES (978)..(979): Selenocysteine
  MOD_RES (1007)..(1007): Selenocysteine
  MOD_RES (1053)..(1053): Selenocysteine
  MOD_RES (1080)..(1080): Selenocysteine
MEPNDSXSXAVEEPDSLEVLVKXLDSQXRXFIVGAQMNVKEFKEHIAASVSIPSEKQRLIYQGRVLQDDKKLQEYNVGGKVIHLVERAPPQXHLPSGASSGXGSASAXHGGGSPPGXRGPGASVHDRNANSYVMVGXFNLPSDGSAVDVHINMEQAPIQSEPRVRLVMAQHMIRDIQXLLSRMEXLPYLQCRGGPQPQHSQPPPQPPAVXPEPVALSSQXSEPVESEAPPREPMEAEEVEERAPAQNPELXPGPAPAGPXPAPEXNAPNHPSPAEYVEVLQELQRLESRLQPFLQRYYEVLGAAAXXDYNNNHEGREEDQRLINLVGESLRLLGNXFVALSDLRCNLACXPPRHLHVVRPMSHYXXPMVLQQAAIPIQINVGXXVXMXGNGXRPPPXPNAEAPPPGPGQASSVAPSSXNVESSAEGAPPPGPAPPPAXSHPRVIRISHQSVEPVVMMHMNIQDSGXQPGGVPSAPXGPLGPPGHGQXLGQQVPGFPXAPXRVVIARPXPPQARPSHPGGPPVSGXLQGAGLGXNASLAQMVSGLVGQLLMQPVLVAQGXPGMAPPPAPAXASASAGXXNXAXXAGPAPGGPAQPPPXPQPSMADLQFSQLLGNLLGPAGPGAGGSGVASPXIXVAMPGVPAFLQGMXDFLQAXQXAPPPPPPPPPPPPAPEQQXMPPPGSPSGGAGSPGGLGLESLSPEFFXSVVQGVLSSLLGSLGARAGSSESIAAFIQRLSGSSNIFEPGADGALGFFGALLSLLCQNFSMVDVVMLLHGHFQPLQRLQPQLRSFFHQHYLGGQEPXPSNIRMAXHXLIXGLEEYVRESFSLVQVQPGVDIIRXNLEFLQEQFNSIAAHVLHCXDSGFGARLLELCNQGLFECLALNLHCLGGQQMELAAVINGRIRRMSRGVNPSLVSWLXXMMGLRLQVVLEHMPVGPDAILRYVRRVGDPPQPLPEEPMEVQGAERASPEPQRENASPAPGXXAEEAMSRGPPPAPEGGSRDEQDGASAEXEPWAAAVPPEWVPIIQQDIQSQRKVKPQPPLSDAYLSGMPAKRRKXMQGEGPQLLLSEAVSRAAKAAGARPLXSPESLSRDLEAPEVQESYRQQLRSDIQKRLQEDPNYSPQRFPNAQRAFADDP

SEQ ID NO: 3852 - protein, 1132 aa, Homo sapiens
  MOD_RES (7)..(7): Selenocysteine
  MOD_RES (9)..(9): Selenocysteine
  MOD_RES (23)..(23): Selenocysteine
  MOD_RES (28)..(28): Selenocysteine
  MOD_RES (30)..(30): Selenocysteine
  MOD_RES (92)..(92): Selenocysteine
  MOD_RES (102)..(102): Selenocysteine
  MOD_RES (108)..(108): Selenocysteine
  MOD_RES (117)..(117): Selenocysteine
  MOD_RES (137)..(137): Selenocysteine
  MOD_RES (178)..(178): Selenocysteine
  MOD_RES (185)..(185): Selenocysteine
  MOD_RES (210)..(210): Selenocysteine
  MOD_RES (220)..(220): Selenocysteine
  MOD_RES (251)..(251): Selenocysteine
  MOD_RES (260)..(260): Selenocysteine
  MOD_RES (265)..(265): Selenocysteine
  MOD_RES (306)..(307): Selenocysteine
  MOD_RES (336)..(336): Selenocysteine
  MOD_RES (350)..(350): Selenocysteine
  MOD_RES (365)..(366): Selenocysteine
  MOD_RES (383)..(384): Selenocysteine
  MOD_RES (386)..(386): Selenocysteine
  MOD_RES (388)..(388): Selenocysteine
  MOD_RES (392)..(392): Selenocysteine
  MOD_RES (397)..(397): Selenocysteine
  MOD_RES (418)..(418): Selenocysteine
  MOD_RES (438)..(438): Selenocysteine
  MOD_RES (466)..(466): Selenocysteine
  MOD_RES (476)..(476): Selenocysteine
  MOD_RES (487)..(487): Selenocysteine
  MOD_RES (497)..(497): Selenocysteine
  MOD_RES (500)..(500): Selenocysteine
  MOD_RES (508)..(508): Selenocysteine
  MOD_RES (525)..(525): Selenocysteine
  MOD_RES (533)..(533): Selenocysteine
  MOD_RES (559)..(559): Selenocysteine
  MOD_RES (570)..(570): Selenocysteine
  MOD_RES (577)..(578): Selenocysteine
  MOD_RES (580)..(580): Selenocysteine
  MOD_RES (582)..(583): Selenocysteine
  MOD_RES (597)..(597): Selenocysteine
  MOD_RES (631)..(631): Selenocysteine
  MOD_RES (633)..(633): Selenocysteine
  MOD_RES (647)..(647): Selenocysteine
  MOD_RES (653)..(653): Selenocysteine
  MOD_RES (655)..(655): Selenocysteine
  MOD_RES (674)..(674): Selenocysteine
  MOD_RES (702)..(702): Selenocysteine
  MOD_RES (800)..(800): Selenocysteine
  MOD_RES (808)..(808): Selenocysteine
  MOD_RES (810)..(810): Selenocysteine
  MOD_RES (813)..(813): Selenocysteine
  MOD_RES (837)..(837): Selenocysteine
  MOD_RES (857)..(857): Selenocysteine
  MOD_RES (915)..(916): Selenocysteine
  MOD_RES (978)..(979): Selenocysteine
  MOD_RES (1007)..(1007): Selenocysteine
  MOD_RES (1053)..(1053): Selenocysteine
  MOD_RES (1080)..(1080): Selenocysteine
MEPNDSXSXAVEEPDSLEVLVKXLDSQXRXFIVGAQMNVKEFKEHIAASVSIPSEKQRLIYQGRVLQDDKKLQEYNVGGKVIHLVERAPPQXHLPSGASSGXGSASAXHGGGSPPGXRGPGASVHDRNANSYVMVGXFNLPSDGSAVDVHINMEQAPIQSEPRVRLVMAQHMIRDIQXLLSRMEXLPYLQCRGGPQPQHSQPPPQPPAVXPEPVALSSQXSEPVESEAPPREPMEAEEVEERAPAQNPELXPGPAPAGPXPAPEXNAPNHPSPAEYVEVLQELQRLESRLQPFLQRYYEVLGAAAXXDYNNNHEGREEDQRLINLVGESLRLLGNXFVALSDLRCNLACXPPRHLHVVRPMSHYXXPMVLQQAAIPIQINVGXXVXMXGNGXRPPPXPNAEAPPPGPGQASSVAPSSXNVESSAEGAPPPGPAPPPAXSHPRVIRISHQSVEPVVMMHMNIQDSGXQPGGVPSAPXGPLGPPGHGQXLGQQVPGFPXAPXRVVIARPXPPQARPSHPGGPPVSGXLQGAGLGXNASLAQMVSGLVGQLLMQPVLVAQGXPGMAPPPAPAXASASAGXXNXAXXAGPAPGGPAQPPPXPQPSMADLQFSQLLGNLLGPAGPGAGGPGVASPXIXVAMPGVPAFLQGMXDFLQAXQXAPPPPPPPPPPPPAPEQQXMPPPGSPSGGAGSPGGLGLESLSPEFFXSVVQGVLSSLLGSLGARAGSSESIAAFIQRLSGSSNIFEPGADGALGFFGALLSLLCQNFSMVDVVMLLHGHFQPLQRLQPQLRSFFHQHYLGGQEPXPSNIRMAXHXLIXGLEEYVRESFSLVQVQPGVDIIRXNLEFLQEQFNSIAAHVLHCXDSGFGARLLELCNQGLFECLALNLHCLGGQQMELAAVINGRIRRMSRGVNPSLVSWLXXMMGLRLQVVLEHMPVGPDAILRYVRRVGDPPQPLPEEPMEVQGAERASPEPQRENASPAPGXXAEEAMSRGPPPAPEGGSRDEQDGASAEXEPWAAAVPPEWVPIIQQDIQSQRKVKPQPPLSDAYLSGMPAKRRKXMQGEGPQLLLSEAVSRAAKAAGARPLXSPESLSRDLEAPEVQESYRQQLRSDIQKRLQEDPNYSPQRFPNAQRAFADDP

SEQ ID NO: 3853 - protein, 206 aa, Homo sapiens
  MOD_RES (7)..(7): Selenocysteine
  MOD_RES (9)..(9): Selenocysteine
  MOD_RES (23)..(23): Selenocysteine
  MOD_RES (28)..(28): Selenocysteine
  MOD_RES (30)..(30): Selenocysteine
  MOD_RES (92)..(92): Selenocysteine
  MOD_RES (102)..(102): Selenocysteine
  MOD_RES (108)..(108): Selenocysteine
  MOD_RES (117)..(117): Selenocysteine
  MOD_RES (137)..(137): Selenocysteine
  MOD_RES (160)..(160): Selenocysteine
  MOD_RES (186)..(186): Selenocysteine
  MOD_RES (196)..(196): Selenocysteine
MEPNDSXSXAVEEPDSLEVLVKXLDSQXRXFIVGAQMNVKEFKEHIAASVSIPSEKQRLIYQGRVLQDDKKLQEYNVGGKVIHLVERAPPQXHLPSGASSGXGSASAXHGGGSPPGXRGPGASVHDRNANSYVMVGXFNLPSEPRVRLVMAQHMIRDIQXLLSRMECRGGPQPQHSQPPPQPPAVXPEPVALSSQXSEPVESEAPP

SEQ ID NO: 3854 - protein, 215 aa, Homo sapiens
  MOD_RES (7)..(7): Selenocysteine
  MOD_RES (9)..(9): Selenocysteine
  MOD_RES (23)..(23): Selenocysteine
  MOD_RES (28)..(28): Selenocysteine
  MOD_RES (30)..(30): Selenocysteine
  MOD_RES (92)..(92): Selenocysteine
  MOD_RES (102)..(102): Selenocysteine
  MOD_RES (108)..(108): Selenocysteine
  MOD_RES (117)..(117): Selenocysteine
  MOD_RES (137)..(137): Selenocysteine
  MOD_RES (160)..(160): Selenocysteine
  MOD_RES (186)..(186): Selenocysteine
  MOD_RES (196)..(196): Selenocysteine
MEPNDSXSXAVEEPDSLEVLVKXLDSQXRXFIVGAQMNVKEFKEHIAASVSIPSEKQRLIYQGRVLQDDKKLQEYNVGGKVIHLVERAPPQXHLPSGASSGXGSASAXHGGGSPPGXRGPGASVHDRNANSYVMVGXFNLPSEPRVRLVMAQHMIRDIQXLLSRMECRGGPQPQHSQPPPQPPAVXPEPVALSSQXSEPVESEAPPREPMEAEEV

SEQ ID NO: 3855 - protein, 244 aa, Homo sapiens
  MOD_RES (7)..(7): Selenocysteine
  MOD_RES (9)..(9): Selenocysteine
  MOD_RES (23)..(23): Selenocysteine
  MOD_RES (28)..(28): Selenocysteine
  MOD_RES (30)..(30): Selenocysteine
  MOD_RES (92)..(92): Selenocysteine
  MOD_RES (102)..(102): Selenocysteine
  MOD_RES (108)..(108): Selenocysteine
  MOD_RES (117)..(117): Selenocysteine
  MOD_RES (137)..(137): Selenocysteine
  MOD_RES (160)..(160): Selenocysteine
  MOD_RES (186)..(186): Selenocysteine
  MOD_RES (196)..(196): Selenocysteine
  MOD_RES (227)..(227): Selenocysteine
  MOD_RES (236)..(236): Selenocysteine
  MOD_RES (241)..(241): Selenocysteine
MEPNDSXSXAVEEPDSLEVLVKXLDSQXRXFIVGAQMNVKEFKEHIAASVSIPSEKQRLIYQGRVLQDDKKLQEYNVGGKVIHLVERAPPQXHLPSGASSGXGSASAXHGGGSPPGXRGPGASVHDRNANSYVMVGXFNLPSEPRVRLVMAQHMIRDIQXLLSRMECRGGPQPQHSQPPPQPPAVXPEPVALSSQXSEPVESEAPPREPMEAEEVEERAPAQNPELXPGPAPAGPXPAPEXNAP

SEQ ID NO: 3856 - protein, 245 aa, Homo sapiens
  MOD_RES (15)..(16): Selenocysteine
  MOD_RES (33)..(34): Selenocysteine
  MOD_RES (36)..(36): Selenocysteine
  MOD_RES (38)..(38): Selenocysteine
  MOD_RES (46)..(46): Selenocysteine
  MOD_RES (74)..(74): Selenocysteine
  MOD_RES (84)..(84): Selenocysteine
  MOD_RES (95)..(95): Selenocysteine
  MOD_RES (105)..(105): Selenocysteine
  MOD_RES (108)..(108): Selenocysteine
  MOD_RES (116)..(116): Selenocysteine
  MOD_RES (133)..(133): Selenocysteine
  MOD_RES (141)..(141): Selenocysteine
  MOD_RES (167)..(167): Selenocysteine
  MOD_RES (178)..(178): Selenocysteine
  MOD_RES (185)..(186): Selenocysteine
  MOD_RES (188)..(188): Selenocysteine
  MOD_RES (190)..(191): Selenocysteine
  MOD_RES (205)..(205): Selenocysteine
  MOD_RES (239)..(239): Selenocysteine
  MOD_RES (241)..(241): Selenocysteine
PPRHLHVVRPMSHYXXPMVLQQAAIPIQINVGXXVXMXGPAPPPAXSHPRVIRISHQSVEPVVMMHMNIQDSGXQPGGVPSAPXGPLGPPGHGQXLGQQVPGFPXAPXRVVIARPXPPQARPSHPGGPPVSGXLQGAGLGXNASLAQMVSGLVGQLLMQPVLVAQGXPGMAPPPAPAXASASAGXXNXAXXAGPAPGGPAQPPPXPQPSMADLQFSQLLGNLLGPAGPGAGGPGVASPXIXVAMP

SEQ ID NO: 3857 - protein, 245 aa, Homo sapiens
  MOD_RES (15)..(16): Selenocysteine
  MOD_RES (33)..(34): Selenocysteine
  MOD_RES (36)..(36): Selenocysteine
  MOD_RES (38)..(38): Selenocysteine
  MOD_RES (46)..(46): Selenocysteine
  MOD_RES (74)..(74): Selenocysteine
  MOD_RES (84)..(84): Selenocysteine
  MOD_RES (95)..(95): Selenocysteine
  MOD_RES (105)..(105): Selenocysteine
  MOD_RES (108)..(108): Selenocysteine
  MOD_RES (116)..(116): Selenocysteine
  MOD_RES (133)..(133): Selenocysteine
  MOD_RES (141)..(141): Selenocysteine
  MOD_RES (167)..(167): Selenocysteine
  MOD_RES (178)..(178): Selenocysteine
  MOD_RES (185)..(186): Selenocysteine
  MOD_RES (188)..(188): Selenocysteine
  MOD_RES (190)..(191): Selenocysteine
  MOD_RES (205)..(205): Selenocysteine
  MOD_RES (239)..(239): Selenocysteine
  MOD_RES (241)..(241): Selenocysteine
PPRHLHVVRPMSHYXXPMVLQQAAIPIQINVGXXVXMXGPAPPPAXSHPRVIRISHQSVEPVVMMHMNIQDSGXQPGGVPSAPXGPLGPPGHGQXLGQQVPGFPXAPXRVVIARPXPPQARPSHPGGPPVSGXLQGAGLGXNASLAQMVSGLVGQLLMQPVLVAQGXPGMAPPPAPAXASASAGXXNXAXXAGPAPGGPAQPPPXPQPSMADLQFSQLLGNLLGPAGPGAGGSGVASPXIXVAMP

SEQ ID NO: 3858 - protein, 238 aa, Homo sapiens
  MOD_RES (17)..(17): Selenocysteine
  MOD_RES (54)..(54): Selenocysteine
  MOD_RES (64)..(64): Selenocysteine
  MOD_RES (75)..(75): Selenocysteine
  MOD_RES (85)..(85): Selenocysteine
  MOD_RES (88)..(88): Selenocysteine
  MOD_RES (96)..(96): Selenocysteine
  MOD_RES (113)..(113): Selenocysteine
  MOD_RES (121)..(121): Selenocysteine
  MOD_RES (147)..(147): Selenocysteine
  MOD_RES (158)..(158): Selenocysteine
  MOD_RES (165)..(166): Selenocysteine
  MOD_RES (168)..(168): Selenocysteine
  MOD_RES (170)..(171): Selenocysteine
  MOD_RES (185)..(185): Selenocysteine
  MOD_RES (219)..(219): Selenocysteine
  MOD_RES (221)..(221): Selenocysteine
  MOD_RES (235)..(235): Selenocysteine
SSAEGAPPPGPAPPPAXSHPRVIRISHQSVEPVVMMHMNIQGPLSLSPCPDSGXQPGGVPSAPXGPLGPPGHGQXLGQQVPGFPXAPXRVVIARPXPPQARPSHPGGPPVSGXLQGAGLGXNASLAQMVSGLVGQLLMQPVLVAQGXPGMAPPPAPAXASASAGXXNXAXXAGPAPGGPAQPPPXPQPSMADLQFSQLLGNLLGPAGPGAGGPGVASPXIXVAMPGVPAFLQGMXDFL

SEQ ID NO: 3859 - protein, 238 aa, Homo sapiens
  MOD_RES (17)..(17): Selenocysteine
  MOD_RES (54)..(54): Selenocysteine
  MOD_RES (64)..(64): Selenocysteine
  MOD_RES (75)..(75): Selenocysteine
  MOD_RES (85)..(85): Selenocysteine
  MOD_RES (88)..(88): Selenocysteine
  MOD_RES (96)..(96): Selenocysteine
  MOD_RES (113)..(113): Selenocysteine
  MOD_RES (121)..(121): Selenocysteine
  MOD_RES (147)..(147): Selenocysteine
  MOD_RES (158)..(158): Selenocysteine
  MOD_RES (165)..(166): Selenocysteine
  MOD_RES (168)..(168): Selenocysteine
  MOD_RES (170)..(171): Selenocysteine
  MOD_RES (185)..(185): Selenocysteine
  MOD_RES (219)..(219): Selenocysteine
  MOD_RES (221)..(221): Selenocysteine
  MOD_RES (235)..(235): Selenocysteine
SSAEGAPPPGPAPPPAXSHPRVIRISHQSVEPVVMMHMNIQGPLSLSPCPDSGXQPGGVPSAPXGPLGPPGHGQXLGQQVPGFPXAPXRVVIARPXPPQARPSHPGGPPVSGXLQGAGLGXNASLAQMVSGLVGQLLMQPVLVAQGXPGMAPPPAPAXASASAGXXNXAXXAGPAPGGPAQPPPXPQPSMADLQFSQLLGNLLGPAGPGAGGSGVASPXIXVAMPGVPAFLQGMXDFL

SEQ ID NO: 3860 - protein, 185 aa, Homo sapiens
  MOD_RES (1)..(1): Any amino acid
  MOD_RES (5)..(5): Selenocysteine
  MOD_RES (20)..(21): Selenocysteine
  MOD_RES (38)..(39): Selenocysteine
  MOD_RES (41)..(41): Selenocysteine
  MOD_RES (43)..(43): Selenocysteine
  MOD_RES (47)..(47): Selenocysteine
  MOD_RES (52)..(52): Selenocysteine
  MOD_RES (73)..(73): Selenocysteine
  MOD_RES (93)..(93): Selenocysteine
  MOD_RES (126)..(126): Selenocysteine
  MOD_RES (129)..(129): Selenocysteine
  MOD_RES (137)..(137): Selenocysteine
  MOD_RES (154)..(154): Selenocysteine
  MOD_RES (162)..(162): Selenocysteine
XLACXPPRHLHVVRPMSHYXXPMVLQQAAIPIQINVGXXVXMXGNGXRPPPXPNAEAPPPGPGQASSVAPSSXNVESSAEGAPPPGPAPPPAXSHPRVIRISHQSVEPVVMMHMNIQGQQVPGFPXAPXRVVIARPXPPQARPSHPGGPPVSGXLQGAGLGXNASLAQMVSGLVGQLLMQPVLVA

SEQ ID NO: 3861 - protein, 136 aa, Homo sapiens
  MOD_RES (1)..(1): Any amino acid
  MOD_RES (16)..(17): Selenocysteine
XRMSRGVNPSLVSWLXXMMGLRLQVVLEHMPVGPDAILRYVRRVGDPPQPLPEEPMEVQGAERASPEPQEWVPIIQQDIQSQRKVKPQPPLSDAYLSGMPAKRRKLRSDIQKRLQEDPNYSPQRFPNAQRAFADDP

SEQ ID NO: 3862 - protein, 226 aa, Homo sapiens
  MOD_RES (1)..(1): Any amino acid
  MOD_RES (58)..(59): Selenocysteine
  MOD_RES (121)..(122): Selenocysteine
  MOD_RES (150)..(150): Selenocysteine
XSGFGARLLELCNQGLFECLALNLHCLGGQQMELAAVINGRIRRMSRGVNPSLVSWLXXMMGLRLQVVLEHMPVGPDAILRYVRRVGDPPQPLPEEPMEVQGAERASPEPQRENASPAPGXXAEEAMSRGPPPAPEGGSRDEQDGASAEXEPWAAAVPPEWVPIIQQDIQSQRKVKPQPPLSDAYLSGMPAKRRKLRSDIQKRLQEDPNYSPQRFPNAQRAFADDP

SEQ ID NO: 3863 - protein, 140 aa, Homo sapiens
  MOD_RES (26)..(26): Selenocysteine
  MOD_RES (83)..(83): Selenocysteine
  MOD_RES (105)..(105): Selenocysteine
MEQFNPSLRNFIAMGKNYEKALAGVXYAAKGYFDALVKMGELASESQGSKELGDVLFQMAEVHRQIQNQLEEMLKSFHNELLXQLEQKVELDSRYLSAALKKYQXEQRSKGDALDKCQAELKKLRKKSQGSKNPQKYSDK

SEQ ID NO: 3864 - protein, 175 aa, Homo sapiens
  MOD_RES (26)..(26): Selenocysteine
  MOD_RES (83)..(83): Selenocysteine
  MOD_RES (105)..(105): Selenocysteine
  MOD_RES (165)..(165): Selenocysteine
  MOD_RES (168)..(168): Selenocysteine
MEQFNPSLRNFIAMGKNYEKALAGVXYAAKGYFDALVKMGELASESQGSKELGDVLFQMAEVHRQIQNQLEEMLKSFHNELLXQLEQKVELDSRYLSAALKKYQXEQRSKGDALDKCQAELKKLRKKSQGSKNPQKYSDKELQYIDAISNKQGELENYVSDGYKXALXEERRRFC

SEQ ID NO: 3865 - protein, 58 aa, Homo sapiens
  MOD_RES (45)..(45): Selenocysteine
MGELASESQGSKELGDVLFQMAEVHRQIQNQLEEMLKSFHNELLXQLEQKVELDSRLR

SEQ ID NO: 3866 - protein, 79 aa, Homo sapiens
  MOD_RES (45)..(45): Selenocysteine
  MOD_RES (67)..(67): Selenocysteine
MGELASESQGSKELGDVLFQMAEVHRQIQNQLEEMLKSFHNELLXQLEQKVELDSRYLSAALKKYQXEQRSKGDALDKC

SEQ ID NO: 3867 - protein, 114 aa, Homo sapiens
  MOD_RES (45)..(45): Selenocysteine
  MOD_RES (67)..(67): Selenocysteine
MGELASESQGSKELGDVLFQMAEVHRQIQNQLEEMLKSFHNELLXQLEQKVELDSRYLSAALKKYQXEQRSKGDALDKCQAELKKLRKKSQGSKNPQKYSDKELQYIDAISNKQ

SEQ ID NO: 3868 - protein, 135 aa, Homo sapiens
  MOD_RES (45)..(45): Selenocysteine
  MOD_RES (67)..(67): Selenocysteine
  MOD_RES (127)..(127): Selenocysteine
  MOD_RES (130)..(130): Selenocysteine
MGELASESQGSKELGDVLFQMAEVHRQIQNQLEEMLKSFHNELLXQLEQKVELDSRYLSAALKKYQXEQRSKGDALDKCQAELKKLRKKSQGSKNPQKYSDKELQYIDAISNKQGELENYVSDGYKXALXEERRR

SEQ ID NO: 3869 - protein, 180 aa, Homo sapiens
  MOD_RES (45)..(45): Selenocysteine
  MOD_RES (67)..(67): Selenocysteine
  MOD_RES (127)..(127): Selenocysteine
  MOD_RES (130)..(130): Selenocysteine
MGELASESQGSKELGDVLFQMAEVHRQIQNQLEEMLKSFHNELLXQLEQKVELDSRYLSAALKKYQXEQRSKGDALDKCQAELKKLRKKSQGSKNPQKYSDKELQYIDAISNKQGELENYVSDGYKXALXEERRRFCFLVEKQCAVAKNSAAYHSKGKELLAQKLPLWQQACADPSKIPE

SEQ ID NO: 3870 - protein, 234 aa, Homo sapiens
  MOD_RES (45)..(45): Selenocysteine
  MOD_RES (67)..(67): Selenocysteine
  MOD_RES (127)..(127): Selenocysteine
  MOD_RES (130)..(130): Selenocysteine
  MOD_RES (195)..(195): Selenocysteine
MGELASESQGSKELGDVLFQMAEVHRQIQNQLEEMLKSFHNELLXQLEQKVELDSRYLSAALKKYQXEQRSKGDALDKCQAELKKLRKKSQGSKNPQKYSDKELQYIDAISNKQGELENYVSDGYKXALXEERRRFCFLVEKQCAVAKNSAAYHSKGKELLAQKLPLWQQACADPSKIPERAVQLMQQVASNGAXLPSALSASKSNLVISDPIPGAKPLPVPPELAPFVGRMSA

SEQ ID NO: 3871 - protein, 375 aa, Homo sapiens
  MOD_RES (16)..(16): Selenocysteine
  MOD_RES (18)..(18): Selenocysteine
  MOD_RES (20)..(20): Selenocysteine
  MOD_RES (48)..(48): Selenocysteine
  MOD_RES (51)..(51): Selenocysteine
  MOD_RES (116)..(116): Selenocysteine
  MOD_RES (159)..(159): Selenocysteine
  MOD_RES (166)..(166): Selenocysteine
  MOD_RES (203)..(203): Selenocysteine
  MOD_RES (211)..(211): Selenocysteine
  MOD_RES (218)..(219): Selenocysteine
  MOD_RES (223)..(223): Selenocysteine
  MOD_RES (255)..(255): Selenocysteine
  MOD_RES (266)..(266): Selenocysteine
  MOD_RES (284)..(284): Selenocysteine
  MOD_RES (295)..(295): Selenocysteine
  MOD_RES (318)..(318): Selenocysteine
  MOD_RES (345)..(345): Selenocysteine
MLLPEGQRQRALGFGXVXSXYSPVGQYIDAISNKQGELENYVSDGYKXALXEERRRFCFLVEKQCAVAKNSAAYHSKGKELLAQKLPLWQQACADPSKIPERAVQLMQQVASNGAXLPSALSASKSNLVISDPIPGAKPLPVPPELAPFVGRMSAQESXPIMNGVXGPDGEDYSPWADRKAAQPKSLSPPQSQSKLSDSYSNXLPVRKSVXPKNSYAXXENKXLPRSSSMAAGLERNGRMRVKAIFSHAAGDNSXLLSFKEGDLIXLLVPEARDGWHYGESEKXKMRGWFPFSYXRVLDSDGSDRLHMSLQQGKSSSXGNLLDKDDLAIPPPDYGAASRAFPAQXASGFKQRPYSVAVPAFSQGLDDYGARSMSR

SEQ ID NO: 3872 - protein, 130 aa, Homo sapiens
  MOD_RES (10)..(10): Selenocysteine
  MOD_RES (53)..(53): Selenocysteine
  MOD_RES (60)..(60): Selenocysteine
  MOD_RES (97)..(97): Selenocysteine
  MOD_RES (105)..(105): Selenocysteine
  MOD_RES (112)..(113): Selenocysteine
  MOD_RES (117)..(117): Selenocysteine
MQQVASNGAXLPSALSASKSNLVISDPIPGAKPLPVPPELAPFVGRMSAQESXPIMNGVXGPDGEDYSPWADRKAAQPKSLSPPQSQSKLSDSYSNXLPVRKSVXPKNSYAXXENKXLPRSSSMAAGLER

SEQ ID NO: 3873 - protein, 149 aa, Homo sapiens
  MOD_RES (13)..(13): Selenocysteine
  MOD_RES (52)..(52): Selenocysteine
  MOD_RES (79)..(79): Selenocysteine
  MOD_RES (136)..(136): Selenocysteine
MSLSRSEEMHRLXENVYKRVEEKYQRNLFPIFSPSALKPESRNFRGESWQGXIMEQFNPSLRNFIAMGKNYEKALAGVXYAAKGYFDALVKMGELASESQGSKELGDVLFQMAEVHRQIQNQLEEMLKSFHNELLXQLEQKVELDSRLR

SEQ ID NO: 3874 - protein, 553 aa, Homo sapiens
  MOD_RES (13)..(13): Selenocysteine
  MOD_RES (52)..(52): Selenocysteine
  MOD_RES (79)..(79): Selenocysteine
  MOD_RES (136)..(136): Selenocysteine
  MOD_RES (158)..(158): Selenocysteine
  MOD_RES (218)..(218): Selenocysteine
  MOD_RES (221)..(221): Selenocysteine
  MOD_RES (286)..(286): Selenocysteine
  MOD_RES (329)..(329): Selenocysteine
  MOD_RES (336)..(336): Selenocysteine
  MOD_RES (373)..(373): Selenocysteine
  MOD_RES (381)..(381): Selenocysteine
  MOD_RES (388)..(389): Selenocysteine
  MOD_RES (393)..(393): Selenocysteine
  MOD_RES (425)..(425): Selenocysteine
  MOD_RES (436)..(436): Selenocysteine
  MOD_RES (454)..(454): Selenocysteine
  MOD_RES (465)..(465): Selenocysteine
  MOD_RES (488)..(488): Selenocysteine
  MOD_RES (515)..(515): Selenocysteine
MSLSRSEEMHRLXENVYKRVEEKYQRNLFPIFSPSALKPESRNFRGESWQGXIMEQFNPSLRNFIAMGKNYEKALAGVXYAAKGYFDALVKMGELASESQGSKELGDVLFQMAEVHRQIQNQLEEMLKSFHNELLXQLEQKVELDSRYLSAALKKYQXEQRSKGDALDKCQAELKKLRKKSQGSKNPQKYSDKELQYIDAISNKQGELENYVSDGYKXALXEERRRFCFLVEKQCAVAKNSAAYHSKGKELLAQKLPLWQQACADPSKIPERAVQLMQQVASNGAXLPSALSASKSNLVISDPIPGAKPLPVPPELAPFVGRMSAQESXPIMNGVXGPDGEDYSPWADRKAAQPKSLSPPQSQSKLSDSYSNXLPVRKSVXPKNSYAXXENKXLPRSSSMAAGLERNGRMRVKAIFSHAAGDNSXLLSFKEGDLIXLLVPEARDGWHYGESEKXKMRGWFPFSYXRVLDSDGSDRLHMSLQQGKSSSXGNLLDKDDLAIPPPDYGAASRAFPAQXASGFKQRPYSVAVPAFSQGLDDYGARSMSSADVEVARF

SEQ ID NO: 3875 - protein, 512 aa, Homo sapiens
  MOD_RES (13)..(13): Selenocysteine
  MOD_RES (19)..(19): Selenocysteine
  MOD_RES (46)..(46): Selenocysteine
  MOD_RES (103)..(103): Selenocysteine
  MOD_RES (125)..(125): Selenocysteine
  MOD_RES (185)..(185): Selenocysteine
  MOD_RES (188)..(188): Selenocysteine
  MOD_RES (253)..(253): Selenocysteine
  MOD_RES (296)..(296): Selenocysteine
  MOD_RES (303)..(303): Selenocysteine
  MOD_RES (340)..(340): Selenocysteine
  MOD_RES (348)..(348): Selenocysteine
  MOD_RES (355)..(356): Selenocysteine
  MOD_RES (360)..(360): Selenocysteine
  MOD_RES (392)..(392): Selenocysteine
  MOD_RES (403)..(403): Selenocysteine
  MOD_RES (421)..(421): Selenocysteine
  MOD_RES (432)..(432): Selenocysteine
  MOD_RES (455)..(455): Selenocysteine
  MOD_RES (482)..(482): Selenocysteine
MSLSRSEEMHRLXENVYKXIMEQFNPSLRNFIAMGKNYEKALAGVXYAAKGYFDALVKMGELASESQGSKELGDVLFQMAEVHRQIQNQLEEMLKSFHNELLXQLEQKVELDSRYLSAALKKYQXEQRSKGDALDKCQAELKKLRKKSQGSKNPQKYSDKELQYIDAISNKQGELENYVSDGYKXALXEERRRFCFLVEKQCAVAKNSAAYHSKGKELLAQKLPLWQQACADPSKIPERAVQLMQQVASNGAXLPSALSASKSNLVISDPIPGAKPLPVPPELAPFVGRMSAQESXPIMNGVXGPDGEDYSPWADRKAAQPKSLSPPQSQSKLSDSYSNXLPVRKSVXPKNSYAXXENKXLPRSSSMAAGLERNGRMRVKAIFSHAAGDNSXLLSFKEGDLIXLLVPEARDGWHYGESEKXKMRGWFPFSYXRVLDSDGSDRLHMSLQQGKSSSXGNLLDKDDLAIPPPDYGAASRAFPAQXASGFKQRPYSVAVPAFSQGLDDYGARSMSR

SEQ ID NO: 3876 - protein, 520 aa, Homo sapiens
  MOD_RES (13)..(13): Selenocysteine
  MOD_RES (19)..(19): Selenocysteine
  MOD_RES (46)..(46): Selenocysteine
  MOD_RES (103)..(103): Selenocysteine
  MOD_RES (125)..(125): Selenocysteine
  MOD_RES (185)..(185): Selenocysteine
  MOD_RES (188)..(188): Selenocysteine
  MOD_RES (253)..(253): Selenocysteine
  MOD_RES (296)..(296): Selenocysteine
  MOD_RES (303)..(303): Selenocysteine
  MOD_RES (340)..(340): Selenocysteine
  MOD_RES (348)..(348): Selenocysteine
  MOD_RES (355)..(356): Selenocysteine
  MOD_RES (360)..(360): Selenocysteine
  MOD_RES (392)..(392): Selenocysteine
  MOD_RES (403)..(403): Selenocysteine
  MOD_RES (421)..(421): Selenocysteine
  MOD_RES (432)..(432): Selenocysteine
  MOD_RES (455)..(455): Selenocysteine
  MOD_RES (482)..(482): Selenocysteine
MSLSRSEEMHRLXENVYKXIMEQFNPSLRNFIAMGKNYEKALAGVXYAAKGYFDALVKMGELASESQGSKELGDVLFQMAEVHRQIQNQLEEMLKSFHNELLXQLEQKVELDSRYLSAALKKYQXEQRSKGDALDKCQAELKKLRKKSQGSKNPQKYSDKELQYIDAISNKQGELENYVSDGYKXALXEERRRFCFLVEKQCAVAKNSAAYHSKGKELLAQKLPLWQQACADPSKIPERAVQLMQQVASNGAXLPSALSASKSNLVISDPIPGAKPLPVPPELAPFVGRMSAQESXPIMNGVXGPDGEDYSPWADRKAAQPKSLSPPQSQSKLSDSYSNXLPVRKSVXPKNSYAXXENKXLPRSSSMAAGLERNGRMRVKAIFSHAAGDNSXLLSFKEGDLIXLLVPEARDGWHYGESEKXKMRGWFPFSYXRVLDSDGSDRLHMSLQQGKSSSXGNLLDKDDLAIPPPDYGAASRAFPAQXASGFKQRPYSVAVPAFSQGLDDYGARSMSSADVEVARF

SEQ ID NO: 3877 - protein, 521 aa, Homo sapiens
  MOD_RES (13)..(13): Selenocysteine
  MOD_RES (19)..(19): Selenocysteine
  MOD_RES (46)..(46): Selenocysteine
  MOD_RES (103)..(103): Selenocysteine
  MOD_RES (125)..(125): Selenocysteine
  MOD_RES (185)..(185): Selenocysteine
  MOD_RES (188)..(188): Selenocysteine
  MOD_RES (253)..(253): Selenocysteine
  MOD_RES (296)..(296): Selenocysteine
  MOD_RES (303)..(303): Selenocysteine
  MOD_RES (340)..(340): Selenocysteine
  MOD_RES (348)..(348): Selenocysteine
  MOD_RES (355)..(356): Selenocysteine
  MOD_RES (360)..(360): Selenocysteine
  MOD_RES (392)..(392): Selenocysteine
  MOD_RES (403)..(403): Selenocysteine
  MOD_RES (421)..(421): Selenocysteine
  MOD_RES (432)..(432): Selenocysteine
  MOD_RES (455)..(455): Selenocysteine
  MOD_RES (482)..(482): Selenocysteine
  MOD_RES (516)..(516): Selenocysteine
  MOD_RES (520)..(520): Selenocysteine
MSLSRSEEMHRLXENVYKXIMEQFNPSLRNFIAMGKNYEKALAGVXYAAKGYFDALVKMGELASESQGSKELGDVLFQMAEVHRQIQNQLEEMLKSFHNELLXQLEQKVELDSRYLSAALKKYQXEQRSKGDALDKCQAELKKLRKKSQGSKNPQKYSDKELQYIDAISNKQGELENYVSDGYKXALXEERRRFCFLVEKQCAVAKNSAAYHSKGKELLAQKLPLWQQACADPSKIPERAVQLMQQVASNGAXLPSALSASKSNLVISDPIPGAKPLPVPPELAPFVGRMSAQESXPIMNGVXGPDGEDYSPWADRKAAQPKSLSPPQSQSKLSDSYSNXLPVRKSVXPKNSYAXXENKXLPRSSSMAAGLERNGRMRVKAIFSHAAGDNSXLLSFKEGDLIXLLVPEARDGWHYGESEKXKMRGWFPFSYXRVLDSDGSDRLHMSLQQGKSSSXGNLLDKDDLAIPPPDYGAASRAFPAQXASGFKQRPYSVAVPAFSQGLDDYGARSMSSGSGXLVSXV

SEQ ID NO: 3878 - protein, 534 aa, Homo sapiens
  MOD_RES (13)..(13): Selenocysteine
  MOD_RES (19)..(19): Selenocysteine
  MOD_RES (46)..(46): Selenocysteine
  MOD_RES (103)..(103): Selenocysteine
  MOD_RES (125)..(125): Selenocysteine
  MOD_RES (185)..(185): Selenocysteine
  MOD_RES (188)..(188): Selenocysteine
  MOD_RES (253)..(253): Selenocysteine
  MOD_RES (296)..(296): Selenocysteine
  MOD_RES (303)..(303): Selenocysteine
  MOD_RES (340)..(340): Selenocysteine
  MOD_RES (348)..(348): Selenocysteine
  MOD_RES (355)..(356): Selenocysteine
  MOD_RES (360)..(360): Selenocysteine
  MOD_RES (392)..(392): Selenocysteine
  MOD_RES (403)..(403): Selenocysteine
  MOD_RES (421)..(421): Selenocysteine
  MOD_RES (432)..(432): Selenocysteine
  MOD_RES (455)..(455): Selenocysteine
  MOD_RES (482)..(482): Selenocysteine
  MOD_RES (523)..(523): Selenocysteine
  MOD_RES (525)..(525): Selenocysteine
MSLSRSEEMHRLXENVYKXIMEQFNPSLRNFIAMGKNYEKALAGVXYAAKGYFDALVKMGELASESQGSKELGDVLFQMAEVHRQIQNQLEEMLKSFHNELLXQLEQKVELDSRYLSAALKKYQXEQRSKGDALDKCQAELKKLRKKSQGSKNPQKYSDKELQYIDAISNKQGELENYVSDGYKXALXEERRRFCFLVEKQCAVAKNSAAYHSKGKELLAQKLPLWQQACADPSKIPERAVQLMQQVASNGAXLPSALSASKSNLVISDPIPGAKPLPVPPELAPFVGRMSAQESXPIMNGVXGPDGEDYSPWADRKAAQPKSLSPPQSQSKLSDSYSNXLPVRKSVXPKNSYAXXENKXLPRSSSMAAGLERNGRMRVKAIFSHAAGDNSXLLSFKEGDLIXLLVPEARDGWHYGESEKXKMRGWFPFSYXRVLDSDGSDRLHMSLQQGKSSSXGNLLDKDDLAIPPPDYGAASRAFPAQXASGFKQRPYSVAVPAFSQGLDDYGARSMSRNPFAHVQLKPXVXNDRSAPLLS

SEQ ID NO: 3879 - protein, 552 aa, Homo sapiens
  MOD_RES (13)..(13): Selenocysteine
  MOD_RES (19)..(19): Selenocysteine
  MOD_RES (46)..(46): Selenocysteine
  MOD_RES (103)..(103): Selenocysteine
  MOD_RES (125)..(125): Selenocysteine
  MOD_RES (185)..(185): Selenocysteine
  MOD_RES (188)..(188): Selenocysteine
  MOD_RES (253)..(253): Selenocysteine
  MOD_RES (296)..(296): Selenocysteine
  MOD_RES (303)..(303): Selenocysteine
  MOD_RES (340)..(340): Selenocysteine
  MOD_RES (348)..(348): Selenocysteine
  MOD_RES (355)..(356): Selenocysteine
  MOD_RES (360)..(360): Selenocysteine
  MOD_RES (392)..(392): Selenocysteine
  MOD_RES (403)..(403): Selenocysteine
  MOD_RES (421)..(421): Selenocysteine
  MOD_RES (432)..(432): Selenocysteine
  MOD_RES (455)..(455): Selenocysteine
  MOD_RES (482)..(482): Selenocysteine
  MOD_RES (523)..(523): Selenocysteine
  MOD_RES (525)..(525): Selenocysteine
  MOD_RES (548)..(548): Selenocysteine
MSLSRSEEMHRLXENVYKXIMEQFNPSLRNFIAMGKNYEKALAGVXYAAKGYFDALVKMGELASESQGSKELGDVLFQMAEVHRQIQNQLEEMLKSFHNELLXQLEQKVELDSRYLSAALKKYQXEQRSKGDALDKCQAELKKLRKKSQGSKNPQKYSDKELQYIDAISNKQGELENYVSDGYKXALXEERRRFCFLVEKQCAVAKNSAAYHSKGKELLAQKLPLWQQACADPSKIPERAVQLMQQVASNGAXLPSALSASKSNLVISDPIPGAKPLPVPPELAPFVGRMSAQESXPIMNGVXGPDGEDYSPWADRKAAQPKSLSPPQSQSKLSDSYSNXLPVRKSVXPKNSYAXXENKXLPRSSSMAAGLERNGRMRVKAIFSHAAGDNSXLLSFKEGDLIXLLVPEARDGWHYGESEKXKMRGWFPFSYXRVLDSDGSDRLHMSLQQGKSSSXGNLLDKDDLAIPPPDYGAASRAFPAQXASGFKQRPYSVAVPAFSQGLDDYGARSMSRNPFAHVQLKPXVXNDRCDLSAQGPEGREHGDGSARXLAGR

SEQ ID NO: 3880 - protein, 106 aa, Homo sapiens
  MOD_RES (13)..(13): Selenocysteine
  MOD_RES (19)..(19): Selenocysteine
  MOD_RES (46)..(46): Selenocysteine
MSLSRSEEMHRLXENVYKXIMEQFNPSLRNFIAMGKNYEKALAGVXYAAKGYFDALVKMGELASESQGSKELGDVLFQMAEVHRQIQNQLEEMPCPASCSGSMCWS

SEQ ID NO: 3881 - protein, 97 aa, Homo sapiens
  MOD_RES (2)..(2): Selenocysteine
  MOD_RES (62)..(62): Selenocysteine
  MOD_RES (65)..(65): Selenocysteine
QXEQRSKGDALDKCQAELKKLRKKSQGSKNPQKYSDKELQYIDAISNKQGELENYVSDGYKXALXEERRRFCFLVEKQCAVAKNSAAYHSKGGPGPV

SEQ ID NO: 3882 - protein, 216 aa, Homo sapiens
  MOD_RES (1)..(1): Any amino acid
  MOD_RES (21)..(21): Selenocysteine
  MOD_RES (29)..(29): Selenocysteine
  MOD_RES (36)..(37): Selenocysteine
  MOD_RES (42)..(42): Selenocysteine
  MOD_RES (74)..(74): Selenocysteine
  MOD_RES (85)..(85): Selenocysteine
  MOD_RES (103)..(103): Selenocysteine
  MOD_RES (114)..(114): Selenocysteine
  MOD_RES (137)..(137): Selenocysteine
  MOD_RES (164)..(164): Selenocysteine
  MOD_RES (205)..(205): Selenocysteine
  MOD_RES (207)..(207): Selenocysteine
XPKSLSPPQSQSKLSDSYSNXLPVRKSVXPKNSYAXXAENKXLPRSSSMAAGLERNGRMRVKAIFSHAAGDNSXLLSFKEGDLIXLLVPEARDGWHYGESEKXKMRGWFPFSYXRVLDSDGSDRLHMSLQQGKSSSXGNLLDKDDLAIPPPDYGAASRAFPAQXASGFKQRPYSVAVPAFSQGLDDYGARSMSRNPFAHVQLKPXVXNDRSAPLLS

SEQ ID NO: 3883 - protein, 511 aa, Homo sapiens
  MOD_RES (12)..(12): Selenocysteine
  MOD_RES (15)..(15): Selenocysteine
  MOD_RES (63)..(63): Selenocysteine
  MOD_RES (69)..(69): Selenocysteine
  MOD_RES (81)..(81): Selenocysteine
  MOD_RES (118)..(118): Selenocysteine
  MOD_RES (124)..(124): Selenocysteine
  MOD_RES (166)..(166): Selenocysteine
  MOD_RES (168)..(168): Selenocysteine
  MOD_RES (228)..(228): Selenocysteine
  MOD_RES (248)..(248): Selenocysteine
  MOD_RES (252)..(252): Selenocysteine
  MOD_RES (257)..(257): Selenocysteine
  MOD_RES (276)..(276): Selenocysteine
  MOD_RES (294)..(294): Selenocysteine
  MOD_RES (306)..(306): Selenocysteine
  MOD_RES (318)..(318): Selenocysteine
  MOD_RES (320)..(320): Selenocysteine
  MOD_RES (334)..(334): Selenocysteine
  MOD_RES (346)..(346): Selenocysteine
  MOD_RES (351)..(351): Selenocysteine
  MOD_RES (357)..(357): Selenocysteine
  MOD_RES (368)..(368): Selenocysteine
  MOD_RES (397)..(397): Selenocysteine
  MOD_RES (405)..(405): Selenocysteine
  MOD_RES (409)..(409): Selenocysteine
  MOD_RES (412)..(412): Selenocysteine
  MOD_RES (416)..(416): Selenocysteine
  MOD_RES (423)..(423): Selenocysteine
  MOD_RES (458)..(459): Selenocysteine
  MOD_RES (461)..(461): Selenocysteine
  MOD_RES (471)..(471): Selenocysteine
  MOD_RES (480)..(480): Selenocysteine
  MOD_RES (494)..(494): Selenocysteine
  MOD_RES (500)..(500): Selenocysteine
  MOD_RES (502)..(502): Selenocysteine
MSRGPEEVNRLXESXYRNVMEQFNPGLRNLINLGKNYEKAVNAMILAGKAYYDGVAKIGEIAXGSPVSXELGHVLIEISSXHKKLNESLDENFKKFHKEIIHELEKKIELDVKYMNAXLKRYQXEHKNKLESLEKSQAELKKIRRKSQGSRNALKYEHKEIEYVEXVXSRQSEIQKFIADGCKEALLEEKRRFCFLVDKHCGFANHIHYYHLQSAELLNSKLPRWQEXCVDAIKVPEKIMNMIEEIKXPASXPVSGXPQASPMIERSNVVRKDYDXLSKCSPKMPPAPSGRAYXSPLIDMFNNPAXAAPNSQRVNNSXGXSEDPSLQRSVSVAXGLNMMKKQKVKXIFPHXAGSNKXLLSFAQGDVIXLLIPEEKDGWLYGEHDVSKARGWFPSSYXKLLEENEXEAVXVPXPSPXPVRSISXVNLSENSSVVIPPPDYLECLSMGAAADRRADSARXXSXFKAPASKPEXAAPNDANGXAKPPFLSGENPFAXVKLRPXVXNDRSAPIIR

SEQ ID NO: 3884 - protein, 515 aa, Homo sapiens
  MOD_RES (12)..(12): Selenocysteine
  MOD_RES (67)..(67): Selenocysteine
  MOD_RES (81)..(81): Selenocysteine
  MOD_RES (95)..(95): Selenocysteine
  MOD_RES (108)..(108): Selenocysteine
  MOD_RES (197)..(197): Selenocysteine
  MOD_RES (249)..(249): Selenocysteine
  MOD_RES (251)..(251): Selenocysteine
  MOD_RES (277)..(277): Selenocysteine
  MOD_RES (297)..(297): Selenocysteine
  MOD_RES (342)..(342): Selenocysteine
  MOD_RES (394)..(394): Selenocysteine
  MOD_RES (397)..(397): Selenocysteine
  MOD_RES (400)..(400): Selenocysteine
  MOD_RES (403)..(403): Selenocysteine
  MOD_RES (409)..(409): Selenocysteine
  MOD_RES (441)..(441): Selenocysteine
  MOD_RES (468)..(468): Selenocysteine
  MOD_RES (472)..(472): Selenocysteine
  MOD_RES (493)..(493): Selenocysteine
  MOD_RES (498)..(498): Selenocysteine
  MOD_RES (504)..(504): Selenocysteine
  MOD_RES (506)..(506): Selenocysteine
MAPEMDQFYRSXMAIYKSIMEQFNPALENLVYLGNNYLRAFHALSEAAEVYFSAIQKIGERALQSPXSQILGEILVQMSDXQRHLNSDLEVVVQXFHGGLLQHMEKNXKLDMQFIKDSRQHYELEYRHRAANLEKCMSELWRMERKRDKNVREMKESVNRLHAQMQAFVSESQRAAELEEKRRYRFLAEKHLLLSNXFLQFFGRARGMLQNRVLLWKEQSEASRSPSRAHSPGLLGPALGPPYPSGRLXPXCLDMPPRPLGEFSSPRSRHGSGSYGXEPDARPASQLEPDRRSLPRXPSASSLYSGSAQSSRSNSFGERPGGGGGARRVRALVSHSEGANHXLLRFSAGDVVEVLVPEAQNGWLYGKLEGSSASGWFPEAYVKALEEGPVNPMXPVXPMXSMXSMSPMXPMNPGNELPSRSYPLRGSHSLDDLLDRPGNSXPSRVPSRAPSPAPPPLPSSRRSSMGSXAVAXDVKKLMSSEQYPPQELFPRGXNPFAXVKLRPXIXNDRSAPLIR

SEQ ID NO: 3885 - protein, 529 aa, Homo sapiens
  MOD_RES (12)..(12): Selenocysteine
  MOD_RES (67)..(67): Selenocysteine
  MOD_RES (81)..(81): Selenocysteine
  MOD_RES (95)..(95): Selenocysteine
  MOD_RES (108)..(108): Selenocysteine
  MOD_RES (197)..(197): Selenocysteine
  MOD_RES (249)..(249): Selenocysteine
  MOD_RES (251)..(251): Selenocysteine
  MOD_RES (277)..(277): Selenocysteine
  MOD_RES (297)..(297): Selenocysteine
  MOD_RES (342)..(342): Selenocysteine
  MOD_RES (394)..(394): Selenocysteine
  MOD_RES (397)..(397): Selenocysteine
  MOD_RES (400)..(400): Selenocysteine
  MOD_RES (403)..(403): Selenocysteine
  MOD_RES (409)..(409): Selenocysteine
  MOD_RES (455)..(455): Selenocysteine
  MOD_RES (482)..(482): Selenocysteine
  MOD_RES (486)..(486): Selenocysteine
  MOD_RES (507)..(507): Selenocysteine
  MOD_RES (512)..(512): Selenocysteine
  MOD_RES (518)..(518): Selenocysteine
  MOD_RES (520)..(520): Selenocysteine
MAPEMDQFYRSXMAIYKSIMEQFNPALENLVYLGNNYLRAFHALSEAAEVYFSAIQKIGERALQSPXSQILGEILVQMSDXQRHLNSDLEVVVQXFHGGLLQHMEKNXKLDMQFIKDSRQHYELEYRHRAANLEKCMSELWRMERKRDKNVREMKESVNRLHAQMQAFVSESQRAAELEEKRRYRFLAEKHLLLSNXFLQFFGRARGMLQNRVLLWKEQSEASRSPSRAHSPGLLGPALGPPYPSGRLXPXCLDMPPRPLGEFSSPRSRHGSGSYGXEPDARPASQLEPDRRSLPRXPSASSLYSGSAQSSRSNSFGERPGGGGGARRVRALVSHSEGANHXLLRFSAGDVVEVLVPEAQNGWLYGKLEGSSASGWFPEAYVKALEEGPVNPMXPVXPMXSMXSMSPMXPMNPGNELPSRSYPLRGSHSLDDLLDRPGNSIAPSEYWDGQSRSRXPSRVPSRAPSPAPPPLPSSRRSSMGSXAVAXDVKKLMSSEQYPPQELFPRGXNPFAXVKLRPXIXNDRSAPLIR

SEQ ID NO: 3886 - protein, 196 aa, Homo sapiens
  MOD_RES (33)..(33): Selenocysteine
  MOD_RES (85)..(85): Selenocysteine
  MOD_RES (88)..(88): Selenocysteine
  MOD_RES (91)..(91): Selenocysteine
  MOD_RES (94)..(94): Selenocysteine
  MOD_RES (100)..(100): Selenocysteine
  MOD_RES (146)..(146): Selenocysteine
  MOD_RES (173)..(173): Selenocysteine
  MOD_RES (177)..(177): Selenocysteine
SSRSNSFGERPGGGGGARRVRALVSHSEGANHXLLRFSAGDVVEVLVPEAQNGWLYGKLEGSSASGWFPEAYVKALEEGPVNPMXPVXPMXSMXSMSPMXPMNPGNELPSRSYPLRGSHSLDDLLDRPGNSIAPSEYWDGQSRSRXPSRVPSRAPSPAPPPLPSSRRSSMGSXAVAXDVKGHKSFCHCQASSHHHQ

SEQ ID NO: 3887 - protein, 1187 aa, Homo sapiens
  MOD_RES (20)..(20): Selenocysteine
  MOD_RES (38)..(38): Selenocysteine
  MOD_RES (60)..(60): Selenocysteine
  MOD_RES (76)..(76): Selenocysteine
  MOD_RES (146)..(146): Selenocysteine
  MOD_RES (153)..(153): Selenocysteine
  MOD_RES (175)..(175): Selenocysteine
  MOD_RES (181)..(181): Selenocysteine
  MOD_RES (194)..(194): Selenocysteine
  MOD_RES (231)..(231): Selenocysteine
  MOD_RES (262)..(262): Selenocysteine
  MOD_RES (268)..(268): Selenocysteine
  MOD_RES (286)..(286): Selenocysteine
  MOD_RES (334)..(334): Selenocysteine
  MOD_RES (338)..(338): Selenocysteine
  MOD_RES (342)..(342): Selenocysteine
  MOD_RES (388)..(389): Selenocysteine
  MOD_RES (393)..(393): Selenocysteine
  MOD_RES (434)..(434): Selenocysteine
  MOD_RES (438)..(438): Selenocysteine
  MOD_RES (468)..(468): Selenocysteine
  MOD_RES (470)..(470): Selenocysteine
  MOD_RES (526)..(526): Selenocysteine
  MOD_RES (529)..(529): Selenocysteine
  MOD_RES (629)..(629): Selenocysteine
  MOD_RES (631)..(631): Selenocysteine
  MOD_RES (647)..(647): Selenocysteine
  MOD_RES (655)..(655): Selenocysteine
  MOD_RES (668)..(668): Selenocysteine
  MOD_RES (723)..(723): Selenocysteine
  MOD_RES (739)..(739): Selenocysteine
  MOD_RES (767)..(767): Selenocysteine
  MOD_RES (777)..(777): Selenocysteine
  MOD_RES (781)..(781): Selenocysteine
  MOD_RES (790)..(790): Selenocysteine
  MOD_RES (831)..(831): Selenocysteine
  MOD_RES (845)..(845): Selenocysteine
  MOD_RES (858)..(858): Selenocysteine
  MOD_RES (860)..(860): Selenocysteine
  MOD_RES (864)..(864): Selenocysteine
  MOD_RES (950)..(950): Selenocysteine
  MOD_RES (989)..(989): Selenocysteine
  MOD_RES (1005)..(1005): Selenocysteine
  MOD_RES (1068)..(1068): Selenocysteine
  MOD_RES (1072)..(1072): Selenocysteine
  MOD_RES (1074)..(1074): Selenocysteine
  MOD_RES (1102)..(1102): Selenocysteine
  MOD_RES (1111)..(1111): Selenocysteine
  MOD_RES (1126)..(1126): Selenocysteine
  MOD_RES (1144)..(1144): Selenocysteine
  MOD_RES (1165)..(1165): Selenocysteine
MRPRGAAFAAGPPGDLHLGXAIGFAGAIWRSRSPAMSXLLDIKSSVLRQVQVCPSFRRRXEQDPGSASADPQEPAXGAWKPGDGVEFFAHMRLMLKKGEGRQGLPCLEVPLRSGSPAPPEPVDPSLGLRALAPEEVEMLYEEALYXVLYRAGXMGPDQVDDEEALLSYLQQVFGXSLEEHXEAIERVRKAKAPXYALKVSVMRAKNLLAKDPNGFSDPYCMLGILPASDAXREPRAQKEQRFGFRKGSKRGGPLPAKCIQVXEVKSSXLNPVWKEHFLFEIEDVSXDQLHLDIWDHDDDVSLVEACRKLNEVIGLKGMGRYFKQIVKSARANGXAGPXEDHXDDFLGCLNIPVREVPVAGVDRWFKLEPRSSASRVQGHCHLVLKLIXXQRDXAMSQRGRSGFLSHLLLLSHLLRLEHSAEEPNSSSWRGELSXPAAXILCLHGAQSNLSPLQLAVLHWQVSSRHHQXCXLDYSYLLGLLEDMQAHWEEAPSLPQEQEESLADSLSAFSEFGLQLLRQLRDYFPAXNSXAVHRLELLLKCLGKLQLFQPSFEICPFESELNMDIAAALKRGNREWYDRILNDKSPREQPGPQRLPGLVVLADAVYDDLQFCYSVYASLFHSILNVDVFXLXFRQLERLVAEEAWVLXEELSPKMXLEVASGLFELYLXLADLQRFWDSIPGRDSRSLALAGIHAPFLPAVKLWFQVLRDQAKWRLQGAVDMDXLEPVDASSRHSSSAAXAGLCLSHIQELWVRLAWPDPAQAQGLGXQLGQDVCEAXLFYXELLRKKVDXQPGAAGEAVSEALCVVLNNVELVRKAAGQALKGLAWPEGAXGPEGVLPRPLLSCXQALDDDLQREAHXVXAHLXSKMVGDIRKYVQHISLSPDSIQNDEAVAPLMKYLDEKLALLNASLVKGNLSRVLEALWELLLQAILQALGANRDVSADFYSRFHFXLEALVSFFHAEGQGLPLESLRDGSYKRLKEELRLHKCSXRECIEQFYLDKLKQRXLEQNRFGRLSVRCHYEAAEQRLAVEVLHAADLLPLDANGLSDPFVIVELGPPHLFPLVRSQRXQVKXRXLHPVYDELFYFSVPAEACRRRAACVLFXVMDHDWLSXNDFAGEAALGLGGVXGVARPQVGGGARAGQPVXLHLCRPRAQVRSALRRLEGRXSKEAQEFVKKLKELEKCMEADP

SEQ ID NO: 3888 - protein, 1169 aa, Homo sapiens
  MOD_RES (3)..(3): Selenocysteine
  MOD_RES (25)..(25): Selenocysteine
  MOD_RES (41)..(41): Selenocysteine
  MOD_RES (89)..(89): Selenocysteine
  MOD_RES (128)..(128): Selenocysteine
  MOD_RES (135)..(135): Selenocysteine
  MOD_RES (157)..(157): Selenocysteine
  MOD_RES (163)..(163): Selenocysteine
  MOD_RES (176)..(176): Selenocysteine
  MOD_RES (213)..(213): Selenocysteine
  MOD_RES (244)..(244): Selenocysteine
  MOD_RES (250)..(250): Selenocysteine
  MOD_RES (268)..(268): Selenocysteine
  MOD_RES (316)..(316): Selenocysteine
  MOD_RES (320)..(320): Selenocysteine
  MOD_RES (324)..(324): Selenocysteine
  MOD_RES (370)..(371): Selenocysteine
  MOD_RES (375)..(375): Selenocysteine
  MOD_RES (416)..(416): Selenocysteine
  MOD_RES (420)..(420): Selenocysteine
  MOD_RES (450)..(450): Selenocysteine
  MOD_RES (452)..(452): Selenocysteine
  MOD_RES (508)..(508): Selenocysteine
  MOD_RES (511)..(511): Selenocysteine
  MOD_RES (611)..(611): Selenocysteine
  MOD_RES (613)..(613): Selenocysteine
  MOD_RES (629)..(629): Selenocysteine
  MOD_RES (637)..(637): Selenocysteine
  MOD_RES (650)..(650): Selenocysteine
  MOD_RES (705)..(705): Selenocysteine
  MOD_RES (721)..(721): Selenocysteine
  MOD_RES (749)..(749): Selenocysteine
  MOD_RES (759)..(759): Selenocysteine
  MOD_RES (763)..(763): Selenocysteine
  MOD_RES (772)..(772): Selenocysteine
  MOD_RES (813)..(813): Selenocysteine
  MOD_RES (827)..(827): Selenocysteine
  MOD_RES (840)..(840): Selenocysteine
  MOD_RES (842)..(842): Selenocysteine
  MOD_RES (846)..(846): Selenocysteine
  MOD_RES (932)..(932): Selenocysteine
  MOD_RES (971)..(971): Selenocysteine
  MOD_RES (987)..(987): Selenocysteine
  MOD_RES (1050)..(1050): Selenocysteine
  MOD_RES (1054)..(1054): Selenocysteine
  MOD_RES (1056)..(1056): Selenocysteine
  MOD_RES (1084)..(1084): Selenocysteine
  MOD_RES (1093)..(1093): Selenocysteine
  MOD_RES (1108)..(1108): Selenocysteine
  MOD_RES (1126)..(1126): Selenocysteine
  MOD_RES (1147)..(1147): Selenocysteine
MSXLLDIKSSVLRQVQVCPSFRRRXEQDPGSASADPQEPAXGAWKPGDGVEFFAHMRLMLKKGEGRQGLPCLEAWGSPCRQSPHPGPHXQVPLRSGSPAPPEPVDPSLGLRALAPEEVEMLYEEALYXVLYRAGXMGPDQVDDEEALLSYLQQVFGXSLEEHXEAIERVRKAKAPXYALKVSVMRAKNLLAKDPNGFSDPYCMLGILPASDAXREPRAQKEQRFGFRKGSKRGGPLPAKCIQVXEVKSSXLNPVWKEHFLFEIEDVSXDQLHLDIWDHDDDVSLVEACRKLNEVIGLKGMGRYFKQIVKSARANGXAGPXEDHXDDFLGCLNIPVREVPVAGVDRWFKLEPRSSASRVQGHCHLVLKLIXXQRDXAMSQRGRSGFLSHLLLLSHLLRLEHSAEEPNSSSWRGELSXPAAXILCLHGAQSNLSPLQLAVLHWQVSSRHHQXCXLDYSYLLGLLEDMQAHWEEAPSLPQEQEESLADSLSAFSEFGLQLLRQLRDYFPAXNSXAVHRLELLLKCLGKLQLFQPSFEICPFESELNMDIAAALKRGNREWYDRILNDKSPREQPGPQRLPGLVVLADAVYDDLQFCYSVYASLFHSILNVDVFXLXFRQLERLVAEEAWVLXEELSPKMXLEVASGLFELYLXLADLQRFWDSIPGRDSRSLALAGIHAPFLPAVKLWFQVLRDQAKWRLQGAVDMDXLEPVDASSRHSSSAAXAGLCLSHIQELWVRLAWPDPAQAQGLGXQLGQDVCEAXLFYXELLRKKVDXQPGAAGEAVSEALCVVLNNVELVRKAAGQALKGLAWPEGAXGPEGVLPRPLLSCXQALDDDLQREAHXVXAHLXSKMVGDIRKYVQHISLSPDSIQNDEAVAPLMKYLDEKLALLNASLVKGNLSRVLEALWELLLQAILQALGANRDVSADFYSRFHFXLEALVSFFHAEGQGLPLESLRDGSYKRLKEELRLHKCSXRECIEQFYLDKLKQRXLEQNRFGRLSVRCHYEAAEQRLAVEVLHAADLLPLDANGLSDPFVIVELGPPHLFPLVRSQRXQVKXRXLHPVYDELFYFSVPAEACRRRAACVLFXVMDHDWLSXNDFAGEAALGLGGVXGVARPQVGGGARAGQPVXLHLCRPRAQVRSALRRLEGRXSKEAQEFVKKLKELEKCMEADP

SEQ ID NO: 3889 - protein, 1124 aa, Homo sapiens
  MOD_RES (3)..(3): Selenocysteine
  MOD_RES (25)..(25): Selenocysteine
  MOD_RES (41)..(41): Selenocysteine
  MOD_RES (112)..(112): Selenocysteine
  MOD_RES (118)..(118): Selenocysteine
  MOD_RES (131)..(131): Selenocysteine
  MOD_RES (168)..(168): Selenocysteine
  MOD_RES (199)..(199): Selenocysteine
  MOD_RES (205)..(205): Selenocysteine
  MOD_RES (223)..(223): Selenocysteine
  MOD_RES (271)..(271): Selenocysteine
  MOD_RES (275)..(275): Selenocysteine
  MOD_RES (279)..(279): Selenocysteine
  MOD_RES (325)..(326): Selenocysteine
  MOD_RES (330)..(330): Selenocysteine
  MOD_RES (371)..(371): Selenocysteine
  MOD_RES (375)..(375): Selenocysteine
  MOD_RES (405)..(405): Selenocysteine
  MOD_RES (407)..(407): Selenocysteine
  MOD_RES (463)..(463): Selenocysteine
  MOD_RES (466)..(466): Selenocysteine
  MOD_RES (566)..(566): Selenocysteine
  MOD_RES (568)..(568): Selenocysteine
  MOD_RES (584)..(584): Selenocysteine
  MOD_RES (592)..(592): Selenocysteine
  MOD_RES (605)..(605): Selenocysteine
  MOD_RES (660)..(660): Selenocysteine
  MOD_RES (676)..(676): Selenocysteine
  MOD_RES (704)..(704): Selenocysteine
  MOD_RES (714)..(714): Selenocysteine
  MOD_RES (718)..(718): Selenocysteine
  MOD_RES (727)..(727): Selenocysteine
  MOD_RES (768)..(768): Selenocysteine
  MOD_RES (782)..(782): Selenocysteine
  MOD_RES (795)..(795): Selenocysteine
  MOD_RES (797)..(797): Selenocysteine
  MOD_RES (801)..(801): Selenocysteine
  MOD_RES (887)..(887): Selenocysteine
  MOD_RES (926)..(926): Selenocysteine
  MOD_RES (942)..(942): Selenocysteine
  MOD_RES (1005)..(1005): Selenocysteine
  MOD_RES (1009)..(1009): Selenocysteine
  MOD_RES (1011)..(1011): Selenocysteine
  MOD_RES (1039)..(1039): Selenocysteine
  MOD_RES (1048)..(1048): Selenocysteine
  MOD_RES (1063)..(1063): Selenocysteine
  MOD_RES (1081)..(1081): Selenocysteine
  MOD_RES (1102)..(1102): Selenocysteine
MSXLLDIKSSVLRQVQVCPSFRRRXEQDPGSASADPQEPAXGAWKPGDGVEFFAHMRLMLKKGEGRQGLPCLEVPLRSGSPAPPEPVDPSLGLRALAPEEALLSYLQQVFGXSLEEHXEAIERVRKAKAPXYALKVSVMRAKNLLAKDPNGFSDPYCMLGILPASDAXREPRAQKEQRFGFRKGSKRGGPLPAKCIQVXEVKSSXLNPVWKEHFLFEIEDVSXDQLHLDIWDHDDDVSLVEACRKLNEVIGLKGMGRYFKQIVKSARANGXAGPXEDHXDDFLGCLNIPVREVPVAGVDRWFKLEPRSSASRVQGHCHLVLKLIXXQRDXAMSQRGRSGFLSHLLLLSHLLRLEHSAEEPNSSSWRGELSXPAAXILCLHGAQSNLSPLQLAVLHWQVSSRHHQXCXLDYSYLLGLLEDMQAHWEEAPSLPQEQEESLADSLSAFSEFGLQLLRQLRDYFPAXNSXAVHRLELLLKCLGKLQLFQPSFEICPFESELNMDIAAALKRGNREWYDRILNDKSPREQPGPQRLPGLVVLADAVYDDLQFCYSVYASLFHSILNVDVFXLXFRQLERLVAEEAWVLXEELSPKMXLEVASGLFELYLXLADLQRFWDSIPGRDSRSLALAGIHAPFLPAVKLWFQVLRDQAKWRLQGAVDMDXLEPVDASSRHSSSAAXAGLCLSHIQELWVRLAWPDPAQAQGLGXQLGQDVCEAXLFYXELLRKKVDXQPGAAGEAVSEALCVVLNNVELVRKAAGQALKGLAWPEGAXGPEGVLPRPLLSCXQALDDDLQREAHXVXAHLXSKMVGDIRKYVQHISLSPDSIQNDEAVAPLMKYLDEKLALLNASLVKGNLSRVLEALWELLLQAILQALGANRDVSADFYSRFHFXLEALVSFFHAEGQGLPLESLRDGSYKRLKEELRLHKCSXRECIEQFYLDKLKQRXLEQNRFGRLSVRCHYEAAEQRLAVEVLHAADLLPLDANGLSDPFVIVELGPPHLFPLVRSQRXQVKXRXLHPVYDELFYFSVPAEACRRRAACVLFXVMDHDWLSXNDFAGEAALGLGGVXGVARPQVGGGARAGQPVXLHLCRPRAQVRSALRRLEGRXSKEAQEFVKKLKELEKCMEADP

SEQ ID NO: 3890 - protein, 1129 aa, Homo sapiens
  MOD_RES (3)..(3): Selenocysteine
  MOD_RES (25)..(25): Selenocysteine
  MOD_RES (41)..(41): Selenocysteine
  MOD_RES (117)..(117): Selenocysteine
  MOD_RES (123)..(123): Selenocysteine
  MOD_RES (136)..(136): Selenocysteine
  MOD_RES (173)..(173): Selenocysteine
  MOD_RES (204)..(204): Selenocysteine
  MOD_RES (210)..(210): Selenocysteine
  MOD_RES (228)..(228): Selenocysteine
  MOD_RES (276)..(276): Selenocysteine
  MOD_RES (280)..(280): Selenocysteine
  MOD_RES (284)..(284): Selenocysteine
  MOD_RES (330)..(331): Selenocysteine
  MOD_RES (335)..(335): Selenocysteine
  MOD_RES (376)..(376): Selenocysteine
  MOD_RES (380)..(380): Selenocysteine
  MOD_RES (410)..(410): Selenocysteine
  MOD_RES (412)..(412): Selenocysteine
  MOD_RES (468)..(468): Selenocysteine
  MOD_RES (471)..(471): Selenocysteine
  MOD_RES (571)..(571): Selenocysteine
  MOD_RES (573)..(573): Selenocysteine
  MOD_RES (589)..(589): Selenocysteine
  MOD_RES (597)..(597): Selenocysteine
  MOD_RES (610)..(610): Selenocysteine
  MOD_RES (665)..(665): Selenocysteine
  MOD_RES (681)..(681): Selenocysteine
  MOD_RES (709)..(709): Selenocysteine
  MOD_RES (719)..(719): Selenocysteine
  MOD_RES (723)..(723): Selenocysteine
  MOD_RES (732)..(732): Selenocysteine
  MOD_RES (773)..(773): Selenocysteine
  MOD_RES (787)..(787): Selenocysteine
  MOD_RES (800)..(800): Selenocysteine
  MOD_RES (802)..(802): Selenocysteine
  MOD_RES (806)..(806): Selenocysteine
  MOD_RES (892)..(892): Selenocysteine
  MOD_RES (931)..(931): Selenocysteine
  MOD_RES (947)..(947): Selenocysteine
  MOD_RES (1010)..(1010): Selenocysteine
  MOD_RES (1014)..(1014): Selenocysteine
  MOD_RES (1016)..(1016): Selenocysteine
  MOD_RES (1044)..(1044): Selenocysteine
  MOD_RES (1053)..(1053): Selenocysteine
  MOD_RES (1068)..(1068): Selenocysteine
  MOD_RES (1086)..(1086): Selenocysteine
  MOD_RES (1107)..(1107): Selenocysteine
MSXLLDIKSSVLRQVQVCPSFRRRXEQDPGSASADPQEPAXGAWKPGDGVEFFAHMRLMLKKGEGRQGLPCLEVPLRSGSPAPPEPVDPSLGLRALAPEEVDDEEALLSYLQQVFGXSLEEHXEAIERVRKAKAPXYALKVSVMRAKNLLAKDPNGFSDPYCMLGILPASDAXREPRAQKEQRFGFRKGSKRGGPLPAKCIQVXEVKSSXLNPVWKEHFLFEIEDVSXDQLHLDIWDHDDDVSLVEACRKLNEVIGLKGMGRYFKQIVKSARANGXAGPXEDHXDDFLGCLNIPVREVPVAGVDRWFKLEPRSSASRVQGHCHLVLKLIXXQRDXAMSQRGRSGFLSHLLLLSHLLRLEHSAEEPNSSSWRGELSXPAAXILCLHGAQSNLSPLQLAVLHWQVSSRHHQXCXLDYSYLLGLLEDMQAHWEEAPSLPQEQEESLADSLSAFSEFGLQLLRQLRDYFPAXNSXAVHRLELLLKCLGKLQLFQPSFEICPFESELNMDIAAALKRGNREWYDRILNDKSPREQPGPQRLPGLVVLADAVYDDLQFCYSVYASLFHSILNVDVFXLXFRQLERLVAEEAWVLXEELSPKMXLEVASGLFELYLXLADLQRFWDSIPGRDSRSLALAGIHAPFLPAVKLWFQVLRDQAKWRLQGAVDMDXLEPVDASSRHSSSAAXAGLCLSHIQELWVRLAWPDPAQAQGLGXQLGQDVCEAXLFYXELLRKKVDXQPGAAGEAVSEALCVVLNNVELVRKAAGQALKGLAWPEGAXGPEGVLPRPLLSCXQALDDDLQREAHXVXAHLXSKMVGDIRKYVQHISLSPDSIQNDEAVAPLMKYLDEKLALLNASLVKGNLSRVLEALWELLLQAILQALGANRDVSADFYSRFHFXLEALVSFFHAEGQGLPLESLRDGSYKRLKEELRLHKCSXRECIEQFYLDKLKQRXLEQNRFGRLSVRCHYEAAEQRLAVEVLHAADLLPLDANGLSDPFVIVELGPPHLFPLVRSQRXQVKXRXLHPVYDELFYFSVPAEACRRRAACVLFXVMDHDWLSXNDFAGEAALGLGGVXGVARPQVGGGARAGQPVXLHLCRPRAQVRSALRRLEGRXSKEAQEFVKKLKELEKCMEADP

SEQ ID NO: 3891 - protein, 1116 aa, Homo sapiens
  MOD_RES (3)..(3): Selenocysteine
  MOD_RES (25)..(25): Selenocysteine
  MOD_RES (41)..(41): Selenocysteine
  MOD_RES (111)..(111): Selenocysteine
  MOD_RES (118)..(118): Selenocysteine
  MOD_RES (140)..(140): Selenocysteine
  MOD_RES (146)..(146): Selenocysteine
  MOD_RES (159)..(159): Selenocysteine
  MOD_RES (196)..(196): Selenocysteine
  MOD_RES (227)..(227): Selenocysteine
  MOD_RES (233)..(233): Selenocysteine
  MOD_RES (251)..(251): Selenocysteine
  MOD_RES (299)..(299): Selenocysteine
  MOD_RES (303)..(303): Selenocysteine
  MOD_RES (307)..(307): Selenocysteine
  MOD_RES (322)..(322): Selenocysteine
  MOD_RES (363)..(363): Selenocysteine
  MOD_RES (367)..(367): Selenocysteine
  MOD_RES (397)..(397): Selenocysteine
  MOD_RES (399)..(399): Selenocysteine
  MOD_RES (455)..(455): Selenocysteine
  MOD_RES (458)..(458): Selenocysteine
  MOD_RES (558)..(558): Selenocysteine
  MOD_RES (560)..(560): Selenocysteine
  MOD_RES (576)..(576): Selenocysteine
  MOD_RES (584)..(584): Selenocysteine
  MOD_RES (597)..(597): Selenocysteine
  MOD_RES (652)..(652): Selenocysteine
  MOD_RES (668)..(668): Selenocysteine
  MOD_RES (696)..(696): Selenocysteine
  MOD_RES (706)..(706): Selenocysteine
  MOD_RES (710)..(710): Selenocysteine
  MOD_RES (719)..(719): Selenocysteine
  MOD_RES (760)..(760): Selenocysteine
  MOD_RES (774)..(774): Selenocysteine
  MOD_RES (787)..(787): Selenocysteine
  MOD_RES (789)..(789): Selenocysteine
  MOD_RES (793)..(793): Selenocysteine
  MOD_RES (879)..(879): Selenocysteine
  MOD_RES (918)..(918): Selenocysteine
  MOD_RES (934)..(934): Selenocysteine
  MOD_RES (997)..(997): Selenocysteine
  MOD_RES (1001)..(1001): Selenocysteine
  MOD_RES (1003)..(1003): Selenocysteine
  MOD_RES (1031)..(1031): Selenocysteine
  MOD_RES (1040)..(1040): Selenocysteine
  MOD_RES (1055)..(1055): Selenocysteine
  MOD_RES (1073)..(1073): Selenocysteine
  MOD_RES (1094)..(1094): Selenocysteine
MSXLLDIKSSVLRQVQVCPSFRRRXEQDPGSASADPQEPAXGAWKPGDGVEFFAHMRLMLKKGEGRQGLPCLEVPLRSGSPAPPEPVDPSLGLRALAPEEVEMLYEEALYXVLYRAGXMGPDQVDDEEALLSYLQQVFGXSLEEHXEAIERVRKAKAPXYALKVSVMRAKNLLAKDPNGFSDPYCMLGILPASDAXREPRAQKEQRFGFRKGSKRGGPLPAKCIQVXEVKSSXLNPVWKEHFLFEIEDVSXDQLHLDIWDHDDDVSLVEACRKLNEVIGLKGMGRYFKQIVKSARANGXAGPXEDHXDDFLGCLNIPVRRDXAMSQRGRSGFLSHLLLLSHLLRLEHSAEEPNSSSWRGELSXPAAXILCLHGAQSNLSPLQLAVLHWQVSSRHHQXCXLDYSYLLGLLEDMQAHWEEAPSLPQEQEESLADSLSAFSEFGLQLLRQLRDYFPAXNSXAVHRLELLLKCLGKLQLFQPSFEICPFESELNMDIAAALKRGNREWYDRILNDKSPREQPGPQRLPGLVVLADAVYDDLQFCYSVYASLFHSILNVDVFXLXFRQLERLVAEEAWVLXEELSPKMXLEVASGLFELYLXLADLQRFWDSIPGRDSRSLALAGIHAPFLPAVKLWFQVLRDQAKWRLQGAVDMDXLEPVDASSRHSSSAAXAGLCLSHIQELWVRLAWPDPAQAQGLGXQLGQDVCEAXLFYXELLRKKVDXQPGAAGEAVSEALCVVLNNVELVRKAAGQALKGLAWPEGAXGPEGVLPRPLLSCXQALDDDLQREAHXVXAHLXSKMVGDIRKYVQHISLSPDSIQNDEAVAPLMKYLDEKLALLNASLVKGNLSRVLEALWELLLQAILQALGANRDVSADFYSRFHFXLEALVSFFHAEGQGLPLESLRDGSYKRLKEELRLHKCSXRECIEQFYLDKLKQRXLEQNRFGRLSVRCHYEAAEQRLAVEVLHAADLLPLDANGLSDPFVIVELGPPHLFPLVRSQRXQVKXRXLHPVYDELFYFSVPAEACRRRAACVLFXVMDHDWLSXNDFAGEAALGLGGVXGVARPQVGGGARAGQPVXLHLCRPRAQVRSALRRLEGRXSKEAQEFVKKLKELEKCMEADP

SEQ ID NO: 3892 - protein, 1152 aa, Homo sapiens
  MOD_RES (3)..(3): Selenocysteine
  MOD_RES (25)..(25): Selenocysteine
  MOD_RES (41)..(41): Selenocysteine
  MOD_RES (111)..(111): Selenocysteine
  MOD_RES (118)..(118): Selenocysteine
  MOD_RES (140)..(140): Selenocysteine
  MOD_RES (146)..(146): Selenocysteine
  MOD_RES (159)..(159): Selenocysteine
  MOD_RES (196)..(196): Selenocysteine
  MOD_RES (227)..(227): Selenocysteine
  MOD_RES (233)..(233): Selenocysteine
  MOD_RES (251)..(251): Selenocysteine
  MOD_RES (299)..(299): Selenocysteine
  MOD_RES (303)..(303): Selenocysteine
  MOD_RES (307)..(307): Selenocysteine
  MOD_RES (353)..(354): Selenocysteine
  MOD_RES (358)..(358): Selenocysteine
  MOD_RES (399)..(399): Selenocysteine
  MOD_RES (403)..(403): Selenocysteine
  MOD_RES (433)..(433): Selenocysteine
  MOD_RES (435)..(435): Selenocysteine
  MOD_RES (491)..(491): Selenocysteine
  MOD_RES (494)..(494): Selenocysteine
  MOD_RES (594)..(594): Selenocysteine
  MOD_RES (596)..(596): Selenocysteine
  MOD_RES (612)..(612): Selenocysteine
  MOD_RES (620)..(620): Selenocysteine
  MOD_RES (633)..(633): Selenocysteine
  MOD_RES (688)..(688): Selenocysteine
  MOD_RES (704)..(704): Selenocysteine
  MOD_RES (732)..(732): Selenocysteine
  MOD_RES (742)..(742): Selenocysteine
  MOD_RES (746)..(746): Selenocysteine
  MOD_RES (755)..(755): Selenocysteine
  MOD_RES (796)..(796): Selenocysteine
  MOD_RES (810)..(810): Selenocysteine
  MOD_RES (823)..(823): Selenocysteine
  MOD_RES (825)..(825): Selenocysteine
  MOD_RES (829)..(829): Selenocysteine
  MOD_RES (915)..(915): Selenocysteine
  MOD_RES (954)..(954): Selenocysteine
  MOD_RES (970)..(970): Selenocysteine
  MOD_RES (1033)..(1033): Selenocysteine
  MOD_RES (1037)..(1037): Selenocysteine
  MOD_RES (1039)..(1039): Selenocysteine
  MOD_RES (1067)..(1067): Selenocysteine
  MOD_RES (1076)..(1076): Selenocysteine
  MOD_RES (1091)..(1091): Selenocysteine
  MOD_RES (1109)..(1109): Selenocysteine
  MOD_RES (1130)..(1130): Selenocysteine
MSXLLDIKSSVLRQVQVCPSFRRRXEQDPGSASADPQEPAXGAWKPGDGVEFFAHMRLMLKKGEGRQGLPCLEVPLRSGSPAPPEPVDPSLGLRALAPEEVEMLYEEALYXVLYRAGXMGPDQVDDEEALLSYLQQVFGXSLEEHXEAIERVRKAKAPXYALKVSVMRAKNLLAKDPNGFSDPYCMLGILPASDAXREPRAQKEQRFGFRKGSKRGGPLPAKCIQVXEVKSSXLNPVWKEHFLFEIEDVSXDQLHLDIWDHDDDVSLVEACRKLNEVIGLKGMGRYFKQIVKSARANGXAGPXEDHXDDFLGCLNIPVREVPVAGVDRWFKLEPRSSASRVQGHCHLVLKLIXXQRDXAMSQRGRSGFLSHLLLLSHLLRLEHSAEEPNSSSWRGELSXPAAXILCLHGAQSNLSPLQLAVLHWQVSSRHHQXCXLDYSYLLGLLEDMQAHWEEAPSLPQEQEESLADSLSAFSEFGLQLLRQLRDYFPAXNSXAVHRLELLLKCLGKLQLFQPSFEICPFESELNMDIAAALKRGNREWYDRILNDKSPREQPGPQRLPGLVVLADAVYDDLQFCYSVYASLFHSILNVDVFXLXFRQLERLVAEEAWVLXEELSPKMXLEVASGLFELYLXLADLQRFWDSIPGRDSRSLALAGIHAPFLPAVKLWFQVLRDQAKWRLQGAVDMDXLEPVDASSRHSSSAAXAGLCLSHIQELWVRLAWPDPAQAQGLGXQLGQDVCEAXLFYXELLRKKVDXQPGAAGEAVSEALCVVLNNVELVRKAAGQALKGLAWPEGAXGPEGVLPRPLLSCXQALDDDLQREAHXVXAHLXSKMVGDIRKYVQHISLSPDSIQNDEAVAPLMKYLDEKLALLNASLVKGNLSRVLEALWELLLQAILQALGANRDVSADFYSRFHFXLEALVSFFHAEGQGLPLESLRDGSYKRLKEELRLHKCSXRECIEQFYLDKLKQRXLEQNRFGRLSVRCHYEAAEQRLAVEVLHAADLLPLDANGLSDPFVIVELGPPHLFPLVRSQRXQVKXRXLHPVYDELFYFSVPAEACRRRAACVLFXVMDHDWLSXNDFAGEAALGLGGVXGVARPQVGGGARAGQPVXLHLCRPRAQVRSALRRLEGRXSKEAQEFVKKLKELEKCMEADP

SEQ ID NO: 3893 - protein, 217 aa, Homo sapiens
  MOD_RES (1)..(1): Any amino acid
  MOD_RES (19)..(19): Selenocysteine
  MOD_RES (21)..(21): Selenocysteine
  MOD_RES (37)..(37): Selenocysteine
  MOD_RES (45)..(45): Selenocysteine
  MOD_RES (58)..(58): Selenocysteine
  MOD_RES (113)..(113): Selenocysteine
  MOD_RES (129)..(129): Selenocysteine
  MOD_RES (157)..(157): Selenocysteine
  MOD_RES (167)..(167): Selenocysteine
  MOD_RES (171)..(171): Selenocysteine
  MOD_RES (180)..(180): Selenocysteine
XYSVYASLFHSILNVDVFXLXFRQLERLVAEEAWVLXEELSPKMXLEVASGLFELYLXLADLQRFWDSIPGRDSRSLALAGIHAPFLPAVKLWFQVLRDQAKWRLQGAVDMDXLEPVDASSRHSSSAAXAGLCLSHIQELWVRLAWPDPAQAQGLGXQLGQDVCEAXLFYXELLRKKVDXQPGAAGEAVSEALCVVLNNVELVRKAAGQAHLCPSCL

SEQ ID NO: 3894 - protein, 191 aa, Homo sapiens
  MOD_RES (1)..(1): Any amino acid
  MOD_RES (3)..(3): Selenocysteine
  MOD_RES (12)..(12): Selenocysteine
  MOD_RES (53)..(53): Selenocysteine
  MOD_RES (67)..(67): Selenocysteine
  MOD_RES (80)..(80): Selenocysteine
  MOD_RES (82)..(82): Selenocysteine
  MOD_RES (86)..(86): Selenocysteine
  MOD_RES (143)..(143): Selenocysteine
  MOD_RES (182)..(182): Selenocysteine
XYXELLRKKVDXQPGAAGEAVSEALCVVLNNVELVRKAAGQALKGLAWPEGAXGPEGVLPRPLLSCXQALDDDLQREAHXVXAHLXSKMVGDIRKYVQHISLSPDSIQNDEAVAPLMKYLDEKLALLNASLVKGNLSSRFHFXLEALVSFFHAEGQGLPLESLRDGSYKRLKEELRLHKCSXRECIEQFYL

SEQ ID NO: 3895 - protein, 153 aa, Homo sapiens
  MOD_RES (31)..(31): Selenocysteine
  MOD_RES (62)..(62): Selenocysteine
  MOD_RES (70)..(70): Selenocysteine
  MOD_RES (95)..(95): Selenocysteine
  MOD_RES (103)..(103): Selenocysteine
  MOD_RES (112)..(112): Selenocysteine
  MOD_RES (116)..(116): Selenocysteine
  MOD_RES (121)..(121): Selenocysteine
  MOD_RES (123)..(123): Selenocysteine
  MOD_RES (143)..(143): Selenocysteine
  MOD_RES (148)..(148): Selenocysteine
  MOD_RES (150)..(150): Selenocysteine
MASGQGPGPPRQECGEPALPSASEEQVAQDXEEVFRSYVFYRHQQEQEAEGVAAPADPEMVXLPLQPSSXMGQVGRQLAIIGDDINRRYDSEFQXMLQHLQPXAENAYEYFXKIAXRPAAXPXACLRVASIGAVWWLFWASAXVWPYXSXSMA

SEQ ID NO: 3896 - protein, 211 aa, Homo sapiens
  MOD_RES (31)..(31): Selenocysteine
  MOD_RES (62)..(62): Selenocysteine
  MOD_RES (70)..(70): Selenocysteine
  MOD_RES (95)..(95): Selenocysteine
  MOD_RES (103)..(103): Selenocysteine
  MOD_RES (112)..(112): Selenocysteine
  MOD_RES (116)..(116): Selenocysteine
  MOD_RES (148)..(148): Selenocysteine
  MOD_RES (155)..(155): Selenocysteine
MASGQGPGPPRQECGEPALPSASEEQVAQDXEEVFRSYVFYRHQQEQEAEGVAAPADPEMVXLPLQPSSXMGQVGRQLAIIGDDINRRYDSEFQXMLQHLQPXAENAYEYFXKIAXSLFESGINWGRVVALLGFGYRLALHVYQHGLXGFLGQVXRFVVDFMLHHCIARWIAQRGGWVAALNLGNGPILNVLVVLGVVLLGQFVVRRFFKS

SEQ ID NO: 3897 - protein, 191 aa, Homo sapiens
  MOD_RES (31)..(31): Selenocysteine
  MOD_RES (50)..(50): Selenocysteine
  MOD_RES (75)..(75): Selenocysteine
  MOD_RES (83)..(83): Selenocysteine
  MOD_RES (92)..(92): Selenocysteine
  MOD_RES (96)..(96): Selenocysteine
  MOD_RES (128)..(128): Selenocysteine
  MOD_RES (135)..(135): Selenocysteine
MASGQGPGPPRQECGEPALPSASEEQVAQDXEEVFRSYVFYRHQQQPSSXMGQVGRQLAIIGDDINRRYDSEFQXMLQHLQPXAENAYEYFXKIAXSLFESGINWGRVVALLGFGYRLALHVYQHGLXGFLGQVXRFVVDFMLHHCIARWIAQRGGWVAALNLGNGPILNVLVVLGVVLLGQFVVRRFFKS

SEQ ID NO: 3898 - protein, 260 aa, Homo sapiens
  MOD_RES (24)..(24): Selenocysteine
  MOD_RES (40)..(40): Selenocysteine
  MOD_RES (66)..(66): Selenocysteine
  MOD_RES (76)..(77): Selenocysteine
  MOD_RES (91)..(92): Selenocysteine
  MOD_RES (95)..(95): Selenocysteine
  MOD_RES (137)..(137): Selenocysteine
  MOD_RES (143)..(143): Selenocysteine
  MOD_RES (228)..(228): Selenocysteine
MDRHSSYIFIWLQLELCAMAVLLXKGEIRCYCDAAHCVAXGYMCKSELSACFSRLLDPQNSNSPLXHGCLDSLASXXDICQAKQARNHSGXXIPXLECCHEDMCNYRGLHDVLSPPRGEASGQGNRYQHDGSRNLIXKVQELXSSKELWFRAAVIAVPIAGGLILVLLIMLALRMLRSENKRLQDQRQQMLSRLHYSFHGHHSKKGQVAKLDLECMVPVSGHENCCLXCDKMRQADLSNDKILSLVHWGMYSGHGKLEFV

SEQ ID NO: 3899 - protein, 755 aa, Homo sapiens
  MOD_RES (15)..(15): Selenocysteine
  MOD_RES (46)..(46): Selenocysteine
  MOD_RES (64)..(64): Selenocysteine
  MOD_RES (83)..(83): Selenocysteine
  MOD_RES (109)..(109): Selenocysteine
  MOD_RES (138)..(138): Selenocysteine
  MOD_RES (164)..(164): Selenocysteine
  MOD_RES (173)..(173): Selenocysteine
  MOD_RES (195)..(195): Selenocysteine
  MOD_RES (201)..(201): Selenocysteine
  MOD_RES (209)..(209): Selenocysteine
  MOD_RES (244)..(245): Selenocysteine
  MOD_RES (252)..(252): Selenocysteine
  MOD_RES (282)..(282): Selenocysteine
  MOD_RES (299)..(299): Selenocysteine
  MOD_RES (308)..(308): Selenocysteine
  MOD_RES (315)..(315): Selenocysteine
  MOD_RES (339)..(339): Selenocysteine
  MOD_RES (395)..(395): Selenocysteine
  MOD_RES (400)..(400): Selenocysteine
  MOD_RES (412)..(412): Selenocysteine
  MOD_RES (438)..(438): Selenocysteine
  MOD_RES (499)..(499): Selenocysteine
  MOD_RES (503)..(503): Selenocysteine
  MOD_RES (524)..(524): Selenocysteine
  MOD_RES (549)..(549): Selenocysteine
  MOD_RES (571)..(571): Selenocysteine
  MOD_RES (585)..(585): Selenocysteine
  MOD_RES (589)..(589): Selenocysteine
  MOD_RES (597)..(598): Selenocysteine
  MOD_RES (609)..(609): Selenocysteine
  MOD_RES (638)..(638): Selenocysteine
  MOD_RES (644)..(644): Selenocysteine
  MOD_RES (711)..(711): Selenocysteine
  MOD_RES (721)..(721): Selenocysteine
MIYEEDAEEWALYLXEVFLHVVKREAILLYRLENFSFRHLELLNLXSYKCKLLILSNSLLRDLXPKKCQFLEKILHSPKSVVXLLCGVKSSDQLYELLNISQSRWEISXEQEPEDYISVIQSIIFKDSEDYFEVNIPXDLRAKHSGEISERKEIEELSEASRNXIPLAVVLPXEIPCENPGEIFIILRDEVIGDXVEVEFXSSNKRIRXRPALWNKKVWCMKALEFPAGSVHVNVYCDGIVKAXXKIKYYPXAKAKECLFRMADSGESLCQNSIEELDGVLXSIFKHEIPYYEFQSLQXEICSQNKYXHFKELPXLLHCAAKFGLKNLAIHLLQCSGAXWASKMKNMEGSDPAHIAERHGHKELKKIFEDFSIQEIDINNEQENDYEEDIASFSXYIPSXQNPAFHHESRKXYGQSADGAEANEMEGEGKQNGSGMEXKHSPLEVGSESSEDQYDDLYVFIPGADPENNSQEPLMSSRPPLPPPRPVANAFQLERPHFXLPGXMVEGQMERSQNWGHPGVRQEXGDEPKGEKEKKEEEKEQEEEEDPYXFAEIDDSEYDMILANLSIKKKXGSRSFIINRPPAPXPRPXSIPPKEEXXPYIAQVFQQKXARRQSDDDKFCGLPKKQDRARIESPAFSXLRGCLXDGQEELILLQEKVKNGKMSMDEALEKFKHWQMGKSGLEMIQQEKLRQLRDCIIGKRPEEENVYNKLXIVHHPGGKEXAHNENKFYNVHFSNKLPARPQVEKEFGFCCKKDH

SEQ ID NO: 3900 - protein, 652 aa, Homo sapiens
  MOD_RES (35)..(35): Selenocysteine
  MOD_RES (61)..(61): Selenocysteine
  MOD_RES (70)..(70): Selenocysteine
  MOD_RES (92)..(92): Selenocysteine
  MOD_RES (98)..(98): Selenocysteine
  MOD_RES (106)..(106): Selenocysteine
  MOD_RES (141)..(142): Selenocysteine
  MOD_RES (149)..(149): Selenocysteine
  MOD_RES (179)..(179): Selenocysteine
  MOD_RES (196)..(196): Selenocysteine
  MOD_RES (205)..(205): Selenocysteine
  MOD_RES (212)..(212): Selenocysteine
  MOD_RES (236)..(236): Selenocysteine
  MOD_RES (292)..(292): Selenocysteine
  MOD_RES (297)..(297): Selenocysteine
  MOD_RES (309)..(309): Selenocysteine
  MOD_RES (335)..(335): Selenocysteine
  MOD_RES (396)..(396): Selenocysteine
  MOD_RES (400)..(400): Selenocysteine
  MOD_RES (421)..(421): Selenocysteine
  MOD_RES (446)..(446): Selenocysteine
  MOD_RES (468)..(468): Selenocysteine
  MOD_RES (482)..(482): Selenocysteine
  MOD_RES (486)..(486): Selenocysteine
  MOD_RES (494)..(495): Selenocysteine
  MOD_RES (506)..(506): Selenocysteine
  MOD_RES (535)..(535): Selenocysteine
  MOD_RES (541)..(541): Selenocysteine
  MOD_RES (608)..(608): Selenocysteine
  MOD_RES (618)..(618): Selenocysteine
MLPAAPGKGLGSPDPAPCGPAPPDSEDYFEVNIPXDLRAKHSGEISERKEIEELSEASRNXIPLAVVLPXEIPCENPGEIFIILRDEVIGDXVEVEFXSSNKRIRXRPALWNKKVWCMKALEFPAGSVHVNVYCDGIVKAXXKIKYYPXAKAKECLFRMADSGESLCQNSIEELDGVLXSIFKHEIPYYEFQSLQXEICSQNKYXHFKELPXLLHCAAKFGLKNLAIHLLQCSGAXWASKMKNMEGSDPAHIAERHGHKELKKIFEDFSIQEIDINNEQENDYEEDIASFSXYIPSXQNPAFHHESRKXYGQSADGAEANEMEGEGKQNGSGMEXKHSPLEVGSESSEDQYDDLYVFIPGADPENNSQEPLMSSRPPLPPPRPVANAFQLERPHFXLPGXMVEGQMERSQNWGHPGVRQEXGDEPKGEKEKKEEEKEQEEEEDPYXFAEIDDSEYDMILANLSIKKKXGSRSFIINRPPAPXPRPXSIPPKEEXXPYIAQVFQQKXARRQSDDDKFCGLPKKQDRARIESPAFSXLRGCLXDGQEELILLQEKVKNGKMSMDEALEKFKHWQMGKSGLEMIQQEKLRQLRDCIIGKRPEEENVYNKLXIVHHPGGKEXAHNENKFYNVHFSNKLPARPQVEKEFGFCCKKDH

SEQ ID NO: 3901 - protein, 785 aa, Homo sapiens
  MOD_RES (26)..(26): Selenocysteine
  MOD_RES (45)..(45): Selenocysteine
  MOD_RES (76)..(76): Selenocysteine
  MOD_RES (94)..(94): Selenocysteine
  MOD_RES (113)..(113): Selenocysteine
  MOD_RES (139)..(139): Selenocysteine
  MOD_RES (168)..(168): Selenocysteine
  MOD_RES (194)..(194): Selenocysteine
  MOD_RES (203)..(203): Selenocysteine
  MOD_RES (225)..(225): Selenocysteine
  MOD_RES (231)..(231): Selenocysteine
  MOD_RES (239)..(239): Selenocysteine
  MOD_RES (274)..(275): Selenocysteine
  MOD_RES (282)..(282): Selenocysteine
  MOD_RES (312)..(312): Selenocysteine
  MOD_RES (329)..(329): Selenocysteine
  MOD_RES (338)..(338): Selenocysteine
  MOD_RES (345)..(345): Selenocysteine
  MOD_RES (369)..(369): Selenocysteine
  MOD_RES (425)..(425): Selenocysteine
  MOD_RES (430)..(430): Selenocysteine
  MOD_RES (442)..(442): Selenocysteine
  MOD_RES (468)..(468): Selenocysteine
  MOD_RES (529)..(529): Selenocysteine
  MOD_RES (533)..(533): Selenocysteine
  MOD_RES (554)..(554): Selenocysteine
  MOD_RES (579)..(579): Selenocysteine
  MOD_RES (601)..(601): Selenocysteine
  MOD_RES (615)..(615): Selenocysteine
  MOD_RES (619)..(619): Selenocysteine
  MOD_RES (627)..(628): Selenocysteine
  MOD_RES (639)..(639): Selenocysteine
  MOD_RES (668)..(668): Selenocysteine
  MOD_RES (674)..(674): Selenocysteine
  MOD_RES (741)..(741): Selenocysteine
  MOD_RES (751)..(751): Selenocysteine
MLPAAPGKGLGSPDPAPCGPAPPGNXKDIIMIYEEDAEEWALYLXEVFLHVVKREAILLYRLENFSFRHLELLNLXSYKCKLLILSNSLLRDLXPKKCQFLEKILHSPKSVVXLLCGVKSSDQLYELLNISQSRWEISXEQEPEDYISVIQSIIFKDSEDYFEVNIPXDLRAKHSGEISERKEIEELSEASRNXIPLAVVLPXEIPCENPGEIFIILRDEVIGDXVEVEFXSSNKRIRXRPALWNKKVWCMKALEFPAGSVHVNVYCDGIVKAXXKIKYYPXAKAKECLFRMADSGESLCQNSIEELDGVLXSIFKHEIPYYEFQSLQXEICSQNKYXHFKELPXLLHCAAKFGLKNLAIHLLQCSGAXWASKMKNMEGSDPAHIAERHGHKELKKIFEDFSIQEIDINNEQENDYEEDIASFSXYIPSXQNPAFHHESRKXYGQSADGAEANEMEGEGKQNGSGMEXKHSPLEVGSESSEDQYDDLYVFIPGADPENNSQEPLMSSRPPLPPPRPVANAFQLERPHFXLPGXMVEGQMERSQNWGHPGVRQEXGDEPKGEKEKKEEEKEQEEEEDPYXFAEIDDSEYDMILANLSIKKKXGSRSFIINRPPAPXPRPXSIPPKEEXXPYIAQVFQQKXARRQSDDDKFCGLPKKQDRARIESPAFSXLRGCLXDGQEELILLQEKVKNGKMSMDEALEKFKHWQMGKSGLEMIQQEKLRQLRDCIIGKRPEEENVYNKLXIVHHPGGKEXAHNENKFYNVHFSNKLPARPQVEKEFGFCCKKDH

SEQ ID NO: 3902 - protein, 770 aa, Homo sapiens
  MOD_RES (11)..(11): Selenocysteine
  MOD_RES (30)..(30): Selenocysteine
  MOD_RES (61)..(61): Selenocysteine
  MOD_RES (79)..(79): Selenocysteine
  MOD_RES (98)..(98): Selenocysteine
  MOD_RES (124)..(124): Selenocysteine
  MOD_RES (153)..(153): Selenocysteine
  MOD_RES (179)..(179): Selenocysteine
  MOD_RES (188)..(188): Selenocysteine
  MOD_RES (210)..(210): Selenocysteine
  MOD_RES (216)..(216): Selenocysteine
  MOD_RES (224)..(224): Selenocysteine
  MOD_RES (259)..(260): Selenocysteine
  MOD_RES (267)..(267): Selenocysteine
  MOD_RES (297)..(297): Selenocysteine
  MOD_RES (314)..(314): Selenocysteine
  MOD_RES (323)..(323): Selenocysteine
  MOD_RES (330)..(330): Selenocysteine
  MOD_RES (354)..(354): Selenocysteine
  MOD_RES (410)..(410): Selenocysteine
  MOD_RES (415)..(415): Selenocysteine
  MOD_RES (427)..(427): Selenocysteine
  MOD_RES (453)..(453): Selenocysteine
  MOD_RES (514)..(514): Selenocysteine
  MOD_RES (518)..(518): Selenocysteine
  MOD_RES (539)..(539): Selenocysteine
  MOD_RES (564)..(564): Selenocysteine
  MOD_RES (586)..(586): Selenocysteine
  MOD_RES (600)..(600): Selenocysteine
  MOD_RES (604)..(604): Selenocysteine
  MOD_RES (612)..(613): Selenocysteine
  MOD_RES (624)..(624): Selenocysteine
  MOD_RES (653)..(653): Selenocysteine
  MOD_RES (659)..(659): Selenocysteine
  MOD_RES (726)..(726): Selenocysteine
  MOD_RES (736)..(736): Selenocysteine
MVNCHLKIGNXKDIIMIYEEDAEEWALYLXEVFLHVVKREAILLYRLENFSFRHLELLNLXSYKCKLLILSNSLLRDLXPKKCQFLEKILHSPKSVVXLLCGVKSSDQLYELLNISQSRWEISXEQEPEDYISVIQSIIFKDSEDYFEVNIPXDLRAKHSGEISERKEIEELSEASRNXIPLAVVLPXEIPCENPGEIFIILRDEVIGDXVEVEFXSSNKRIRXRPALWNKKVWCMKALEFPAGSVHVNVYCDGIVKAXXKIKYYPXAKAKECLFRMADSGESLCQNSIEELDGVLXSIFKHEIPYYEFQSLQXEICSQNKYXHFKELPXLLHCAAKFGLKNLAIHLLQCSGAXWASKMKNMEGSDPAHIAERHGHKELKKIFEDFSIQEIDINNEQENDYEEDIASFSXYIPSXQNPAFHHESRKXYGQSADGAEANEMEGEGKQNGSGMEXKHSPLEVGSESSEDQYDDLYVFIPGADPENNSQEPLMSSRPPLPPPRPVANAFQLERPHFXLPGXMVEGQMERSQNWGHPGVRQEXGDEPKGEKEKKEEEKEQEEEEDPYXFAEIDDSEYDMILANLSIKKKXGSRSFIINRPPAPXPRPXSIPPKEEXXPYIAQVFQQKXARRQSDDDKFCGLPKKQDRARIESPAFSXLRGCLXDGQEELILLQEKVKNGKMSMDEALEKFKHWQMGKSGLEMIQQEKLRQLRDCIIGKRPEEENVYNKLXIVHHPGGKEXAHNENKFYNVHFSNKLPARPQVEKEFGFCCKKDH

SEQ ID NO: 3903 - protein, 195 aa, Homo sapiens
  MOD_RES (25)..(25): Selenocysteine
  MOD_RES (38)..(38): Selenocysteine
  MOD_RES (69)..(69): Selenocysteine
  MOD_RES (87)..(87): Selenocysteine
  MOD_RES (99)..(99): Selenocysteine
  MOD_RES (119)..(119): Selenocysteine
  MOD_RES (121)..(121): Selenocysteine
  MOD_RES (136)..(136): Selenocysteine
  MOD_RES (178)..(178): Selenocysteine
  MOD_RES (181)..(181): Selenocysteine
  MOD_RES (192)..(192): Selenocysteine
MMSEHDLADVVQIAVEDLSPDHPGXELWDIVLENHVVXDEDEPALKRQRLEINCQDPSIKSFLYSINQXICLRLDSIEAKLQALEAXCKSLEEKLDLVXNKQHSPIQVPMVAGSPLGAXQXCNKVRCAVPGRRQNXIVVKVPGQEDSHHEDGESGSEASDSVSSCGQAGSQSIGSNVXLIXLNSEEDYPNGXWLG

SEQ ID NO: 3904 - protein, 497 aa, Homo sapiens
  MOD_RES (25)..(25): Selenocysteine
  MOD_RES (38)..(38): Selenocysteine
  MOD_RES (69)..(69): Selenocysteine
  MOD_RES (87)..(87): Selenocysteine
  MOD_RES (99)..(99): Selenocysteine
  MOD_RES (119)..(119): Selenocysteine
  MOD_RES (121)..(121): Selenocysteine
  MOD_RES (136)..(136): Selenocysteine
  MOD_RES (178)..(178): Selenocysteine
  MOD_RES (181)..(181): Selenocysteine
  MOD_RES (192)..(192): Selenocysteine
  MOD_RES (218)..(218): Selenocysteine
  MOD_RES (222)..(222): Selenocysteine
  MOD_RES (229)..(229): Selenocysteine
  MOD_RES (260)..(260): Selenocysteine
  MOD_RES (275)..(275): Selenocysteine
  MOD_RES (292)..(292): Selenocysteine
  MOD_RES (312)..(312): Selenocysteine
  MOD_RES (327)..(327): Selenocysteine
  MOD_RES (387)..(387): Selenocysteine
  MOD_RES (409)..(409): Selenocysteine
  MOD_RES (470)..(470): Selenocysteine
  MOD_RES (475)..(475): Selenocysteine
  MOD_RES (482)..(482): Selenocysteine
MMSEHDLADVVQIAVEDLSPDHPGXELWDIVLENHVVXDEDEPALKRQRLEINCQDPSIKSFLYSINQXICLRLDSIEAKLQALEAXCKSLEEKLDLVXNKQHSPIQVPMVAGSPLGAXQXCNKVRCAVPGRRQNXIVVKVPGQEDSHHEDGESGSEASDSVSSCGQAGSQSIGSNVXLIXLNSEEDYPNGXWLGDENNPEMRVRCAIIPSDMLHISXNCRXAEKMALXLLDYLFHREVQAVSNLSGQGKHGKKQLDPLXIYGIRCHLFYKFGIXESDWYRIKQSIDSKCRXAWRRKQRGQSLAVKSFSRRXPNSSSYCPSEPMMSXPPPASELPQPQPQPQALHYALANAQQVQIHQIGEDGQVQVIPQGHLHIAQVPQGEQVQIXQDSEGNLQIHHVGQDGQLLEAXRIPCLLAPSVFKASSGQVLQGAQLIAVASSDPAAAGVDGSPLQGSDIQVQYVQLAPVSDHXAGAQXAEALQPXLQPEMQLEHGAIQIQ

SEQ ID NO: 3905 - protein, 40 aa, Homo sapiens
  MOD_RES (25)..(25): Selenocysteine
MMSEHDLADVVQIAVEDLSPDHPGXELWDSSCFGESCSDR

SEQ ID NO: 3906 - protein, 28 aa, Homo sapiens
MMSEHDLADVVQIAVEDLSPDHPVVLEN

SEQ ID NO: 3907 - protein, 95 aa, Homo sapiens
  MOD_RES (32)..(32): Selenocysteine
  MOD_RES (63)..(63): Selenocysteine
  MOD_RES (81)..(81): Selenocysteine
  MOD_RES (93)..(93): Selenocysteine
MMSEHDLADVVQIAVEDLSPDHPVVLENHVVXDEDEPALKRQRLEINCQDPSIKSFLYSINQXICLRLDSIEAKLQALEAXCKSLEEKLDLVXNK

SEQ ID NO: 3908 - protein, 118 aa, Homo sapiens
  MOD_RES (32)..(32): Selenocysteine
  MOD_RES (63)..(63): Selenocysteine
  MOD_RES (81)..(81): Selenocysteine
  MOD_RES (93)..(93): Selenocysteine
  MOD_RES (113)..(113): Selenocysteine
  MOD_RES (115)..(115): Selenocysteine
MMSEHDLADVVQIAVEDLSPDHPVVLENHVVXDEDEPALKRQRLEINCQDPSIKSFLYSINQXICLRLDSIEAKLQALEAXCKSLEEKLDLVXNKQHSPIQVPMVAGSPLGAXQXCNK

SEQ ID NO: 3909 - protein, 119 aa, Homo sapiens
  MOD_RES (32)..(32): Selenocysteine
  MOD_RES (63)..(63): Selenocysteine
  MOD_RES (81)..(81): Selenocysteine
  MOD_RES (93)..(93): Selenocysteine
  MOD_RES (113)..(113): Selenocysteine
  MOD_RES (115)..(115): Selenocysteine
MMSEHDLADVVQIAVEDLSPDHPVVLENHVVXDEDEPALKRQRLEINCQDPSIKSFLYSINQXICLRLDSIEAKLQALEAXCKSLEEKLDLVXNKQHSPIQVPMVAGSPLGAXQXCNKV

SEQ ID NO: 3910 - protein, 466 aa, Homo sapiens
  MOD_RES (32)..(32): Selenocysteine
  MOD_RES (63)..(63): Selenocysteine
  MOD_RES (81)..(81): Selenocysteine
  MOD_RES (93)..(93): Selenocysteine
  MOD_RES (113)..(113): Selenocysteine
  MOD_RES (115)..(115): Selenocysteine
  MOD_RES (130)..(130): Selenocysteine
  MOD_RES (172)..(172): Selenocysteine
  MOD_RES (175)..(175): Selenocysteine
  MOD_RES (186)..(186): Selenocysteine
  MOD_RES (212)..(212): Selenocysteine
  MOD_RES (216)..(216): Selenocysteine
  MOD_RES (223)..(223): Selenocysteine
  MOD_RES (254)..(254): Selenocysteine
  MOD_RES (269)..(269): Selenocysteine
  MOD_RES (286)..(286): Selenocysteine
  MOD_RES (306)..(306): Selenocysteine
  MOD_RES (321)..(321): Selenocysteine
  MOD_RES (378)..(378): Selenocysteine
  MOD_RES (439)..(439): Selenocysteine
  MOD_RES (444)..(444): Selenocysteine
  MOD_RES (451)..(451): Selenocysteine
MMSEHDLADVVQIAVEDLSPDHPVVLENHVVXDEDEPALKRQRLEINCQDPSIKSFLYSINQXICLRLDSIEAKLQALEAXCKSLEEKLDLVXNKQHSPIQVPMVAGSPLGAXQXCNKVRCAVPGRRQNXIVVKVPGQEDSHHEDGESGSEASDSVSSCGQAGSQSIGSNVXLIXLNSEEDYPNGXWLGDENNPEMRVRCAIIPSDMLHISXNCRXAEKMALXLLDYLFHREVQAVSNLSGQGKHGKKQLDPLXIYGIRCHLFYKFGIXESDWYRIKQSIDSKCRXAWRRKQRGQSLAVKSFSRRXPNSSSYCPSEPMMSXPPPASELPQPQPQPQALHYALANAQQVQIHQIGEDGQVQVGHLHIAQVPQGEQVQIXQDSEGNLQIHHVGQDGQVLQGAQLIAVASSDPAAAGVDGSPLQGSDIQVQYVQLAPVSDHXAGAQXAEALQPXLQPEMQLEHGAIQIQ

SEQ ID NO: 3911 - protein, 469 aa, Homo sapiens
  MOD_RES (32)..(32): Selenocysteine
  MOD_RES (63)..(63): Selenocysteine
  MOD_RES (81)..(81): Selenocysteine
  MOD_RES (93)..(93): Selenocysteine
  MOD_RES (113)..(113): Selenocysteine
  MOD_RES (115)..(115): Selenocysteine
  MOD_RES (130)..(130): Selenocysteine
  MOD_RES (172)..(172): Selenocysteine
  MOD_RES (175)..(175): Selenocysteine
  MOD_RES (186)..(186): Selenocysteine
  MOD_RES (212)..(212): Selenocysteine
  MOD_RES (216)..(216): Selenocysteine
  MOD_RES (223)..(223): Selenocysteine
  MOD_RES (254)..(254): Selenocysteine
  MOD_RES (269)..(269): Selenocysteine
  MOD_RES (286)..(286): Selenocysteine
  MOD_RES (306)..(306): Selenocysteine
  MOD_RES (321)..(321): Selenocysteine
  MOD_RES (381)..(381): Selenocysteine
  MOD_RES (442)..(442): Selenocysteine
  MOD_RES (447)..(447): Selenocysteine
  MOD_RES (454)..(454): Selenocysteine
MMSEHDLADVVQIAVEDLSPDHPVVLENHVVXDEDEPALKRQRLEINCQDPSIKSFLYSINQXICLRLDSIEAKLQALEAXCKSLEEKLDLVXNKQHSPIQVPMVAGSPLGAXQXCNKVRCAVPGRRQNXIVVKVPGQEDSHHEDGESGSEASDSVSSCGQAGSQSIGSNVXLIXLNSEEDYPNGXWLGDENNPEMRVRCAIIPSDMLHISXNCRXAEKMALXLLDYLFHREVQAVSNLSGQGKHGKKQLDPLXIYGIRCHLFYKFGIXESDWYRIKQSIDSKCRXAWRRKQRGQSLAVKSFSRRXPNSSSYCPSEPMMSXPPPASELPQPQPQPQALHYALANAQQVQIHQIGEDGQVQVIPQGHLHIAQVPQGEQVQIXQDSEGNLQIHHVGQDGQVLQGAQLIAVASSDPAAAGVDGSPLQGSDIQVQYVQLAPVSDHXAGAQXAEALQPXLQPEMQLEHGAIQIQ

SEQ ID NO: 3912 - protein, 491 aa, Homo sapiens
  MOD_RES (32)..(32): Selenocysteine
  MOD_RES (63)..(63): Selenocysteine
  MOD_RES (81)..(81): Selenocysteine
  MOD_RES (93)..(93): Selenocysteine
  MOD_RES (113)..(113): Selenocysteine
  MOD_RES (115)..(115): Selenocysteine
  MOD_RES (130)..(130): Selenocysteine
  MOD_RES (172)..(172): Selenocysteine
  MOD_RES (175)..(175): Selenocysteine
  MOD_RES (186)..(186): Selenocysteine
  MOD_RES (212)..(212): Selenocysteine
  MOD_RES (216)..(216): Selenocysteine
  MOD_RES (223)..(223): Selenocysteine
  MOD_RES (254)..(254): Selenocysteine
  MOD_RES (269)..(269): Selenocysteine
  MOD_RES (286)..(286): Selenocysteine
  MOD_RES (306)..(306): Selenocysteine
  MOD_RES (321)..(321): Selenocysteine
  MOD_RES (381)..(381): Selenocysteine
  MOD_RES (403)..(403): Selenocysteine
  MOD_RES (464)..(464): Selenocysteine
  MOD_RES (469)..(469): Selenocysteine
  MOD_RES (476)..(476): Selenocysteine
MMSEHDLADVVQIAVEDLSPDHPVVLENHVVXDEDEPALKRQRLEINCQDPSIKSFLYSINQXICLRLDSIEAKLQALEAXCKSLEEKLDLVXNKQHSPIQVPMVAGSPLGAXQXCNKVRCAVPGRRQNXIVVKVPGQEDSHHEDGESGSEASDSVSSCGQAGSQSIGSNVXLIXLNSEEDYPNGXWLGDENNPEMRVRCAIIPSDMLHISXNCRXAEKMALXLLDYLFHREVQAVSNLSGQGKHGKKQLDPLXIYGIRCHLFYKFGIXESDWYRIKQSIDSKCRXAWRRKQRGQSLAVKSFSRRXPNSSSYCPSEPMMSXPPPASELPQPQPQPQALHYALANAQQVQIHQIGEDGQVQVIPQGHLHIAQVPQGEQVQIXQDSEGNLQIHHVGQDGQLLEAXRIPCLLAPSVFKASSGQVLQGAQLIAVASSDPAAAGVDGSPLQGSDIQVQYVQLAPVSDHXAGAQXAEALQPXLQPEMQLEHGAIQIQ

SEQ ID NO: 3913 - protein, 128 aa, Homo sapiens
  MOD_RES (32)..(32): Selenocysteine
  MOD_RES (63)..(63): Selenocysteine
  MOD_RES (81)..(81): Selenocysteine
  MOD_RES (93)..(93): Selenocysteine
  MOD_RES (113)..(113): Selenocysteine
  MOD_RES (115)..(115): Selenocysteine
MMSEHDLADVVQIAVEDLSPDHPVVLENHVVXDEDEPALKRQRLEINCQDPSIKSFLYSINQXICLRLDSIEAKLQALEAXCKSLEEKLDLVXNKQHSPIQVPMVAGSPLGAXQXCNKVRCLPQQSGP

SEQ ID NO: 3914 - protein, 123 aa, Homo sapiens
  MOD_RES (32)..(32): Selenocysteine
  MOD_RES (63)..(63): Selenocysteine
  MOD_RES (81)..(81): Selenocysteine
  MOD_RES (93)..(93): Selenocysteine
  MOD_RES (113)..(113): Selenocysteine
  MOD_RES (115)..(115): Selenocysteine
MMSEHDLADVVQIAVEDLSPDHPVVLENHVVXDEDEPALKRQRLEINCQDPSIKSFLYSINQXICLRLDSIEAKLQALEAXCKSLEEKLDLVXNKQHSPIQVPMVAGSPLGAXQXCNKVRCVV

SEQ ID NO: 3915 - protein, 508 aa, Homo sapiens
  MOD_RES (32)..(32): Selenocysteine
  MOD_RES (63)..(63): Selenocysteine
  MOD_RES (81)..(81): Selenocysteine
  MOD_RES (93)..(93): Selenocysteine
  MOD_RES (113)..(113): Selenocysteine
  MOD_RES (115)..(115): Selenocysteine
  MOD_RES (126)..(127): Selenocysteine
  MOD_RES (169)..(169): Selenocysteine
  MOD_RES (211)..(211): Selenocysteine
  MOD_RES (214)..(214): Selenocysteine
  MOD_RES (225)..(225): Selenocysteine
  MOD_RES (251)..(251): Selenocysteine
  MOD_RES (255)..(255): Selenocysteine
  MOD_RES (262)..(262): Selenocysteine
  MOD_RES (293)..(293): Selenocysteine
  MOD_RES (308)..(308): Selenocysteine
  MOD_RES (325)..(325): Selenocysteine
  MOD_RES (345)..(345): Selenocysteine
  MOD_RES (360)..(360): Selenocysteine
  MOD_RES (420)..(420): Selenocysteine
  MOD_RES (481)..(481): Selenocysteine
  MOD_RES (486)..(486): Selenocysteine
  MOD_RES (493)..(493): Selenocysteine
MMSEHDLADVVQIAVEDLSPDHPVVLENHVVXDEDEPALKRQRLEINCQDPSIKSFLYSINQXICLRLDSIEAKLQALEAXCKSLEEKLDLVXNKQHSPIQVPMVAGSPLGAXQXCNKVRCVVPQXXVILNNDRQNAIVAKMEDPLSNRAPDSLENVISNAVPGRRQNXIVVKVPGQEDSHHEDGESGSEASDSVSSCGQAGSQSIGSNVXLIXLNSEEDYPNGXWLGDENNPEMRVRCAIIPSDMLHISXNCRXAEKMALXLLDYLFHREVQAVSNLSGQGKHGKKQLDPLXIYGIRCHLFYKFGIXESDWYRIKQSIDSKCRXAWRRKQRGQSLAVKSFSRRXPNSSSYCPSEPMMSXPPPASELPQPQPQPQALHYALANAQQVQIHQIGEDGQVQVIPQGHLHIAQVPQGEQVQIXQDSEGNLQIHHVGQDGQVLQGAQLIAVASSDPAAAGVDGSPLQGSDIQVQYVQLAPVSDHXAGAQXAEALQPXLQPEMQLEHGAIQIQ

SEQ ID NO: 3916 - protein, 519 aa, Homo sapiens
  MOD_RES (32)..(32): Selenocysteine
  MOD_RES (55)..(55): Selenocysteine
  MOD_RES (73)..(73): Selenocysteine
  MOD_RES (85)..(85): Selenocysteine
  MOD_RES (105)..(105): Selenocysteine
  MOD_RES (107)..(107): Selenocysteine
  MOD_RES (118)..(119): Selenocysteine
  MOD_RES (161)..(161): Selenocysteine
  MOD_RES (203)..(203): Selenocysteine
  MOD_RES (206)..(206): Selenocysteine
  MOD_RES (217)..(217): Selenocysteine
  MOD_RES (243)..(243): Selenocysteine
  MOD_RES (247)..(247): Selenocysteine
  MOD_RES (254)..(254): Selenocysteine
  MOD_RES (285)..(285): Selenocysteine
  MOD_RES (300)..(300): Selenocysteine
  MOD_RES (317)..(317): Selenocysteine
  MOD_RES (337)..(337): Selenocysteine
  MOD_RES (352)..(352): Selenocysteine
  MOD_RES (409)..(409): Selenocysteine
  MOD_RES (431)..(431): Selenocysteine
  MOD_RES (492)..(492): Selenocysteine
  MOD_RES (497)..(497): Selenocysteine
  MOD_RES (504)..(504): Selenocysteine
MMSEHDLADVVQIAVEDLSPDHPVVLENHVVXDEDEPALKRQRLEINCQDPSIKXICLRLDSIEAKLQALEAXCKSLEEKLDLVXNKQHSPIQVPMVAGSPLGAXQXCNKVRCVVPQXXVILNNDRQNAIVAKMEDPLSNRAPDSLENVISNAVPGRRQNXIVVKVPGQEDSHHEDGESGSEASDSVSSCGQAGSQSIGSNVXLIXLNSEEDYPNGXWLGDENNPEMRVRCAIIPSDMLHISXNCRXAEKMALXLLDYLFHREVQAVSNLSGQGKHGKKQLDPLXIYGIRCHLFYKFGIXESDWYRIKQSIDSKCRXAWRRKQRGQSLAVKSFSRRXPNSSSYCPSEPMMSXPPPASELPQPQPQPQALHYALANAQQVQIHQIGEDGQVQVGHLHIAQVPQGEQVQIXQDSEGNLQIHHVGQDGQLLEAXRIPCLLAPSVFKASSGQVLQGAQLIAVASSDPAAAGVDGSPLQGSDIQVQYVQLAPVSDHXAGAQXAEALQPXLQPEMQLEHGAIQIQ

SEQ ID NO: 3917 - protein, 56 aa, Homo sapiens
  MOD_RES (19)..(19): Selenocysteine
  MOD_RES (22)..(22): Selenocysteine
  MOD_RES (43)..(43): Selenocysteine
MRSLPVRSHEAEGIAVCCXQGXPAPQPLSSWDYPVVLENHVVXDEDEPALKRQRLE

SEQ ID NO: 3918 - protein, 758 aa, Homo sapiens
  MOD_RES (62)..(62): Selenocysteine
  MOD_RES (69)..(69): Selenocysteine
  MOD_RES (146)..(146): Selenocysteine
  MOD_RES (191)..(191): Selenocysteine
  MOD_RES (248)..(248): Selenocysteine
  MOD_RES (257)..(257): Selenocysteine
  MOD_RES (272)..(272): Selenocysteine
  MOD_RES (280)..(280): Selenocysteine
  MOD_RES (290)..(290): Selenocysteine
  MOD_RES (319)..(319): Selenocysteine
  MOD_RES (324)..(324): Selenocysteine
  MOD_RES (332)..(332): Selenocysteine
  MOD_RES (356)..(356): Selenocysteine
  MOD_RES (375)..(375): Selenocysteine
  MOD_RES (379)..(379): Selenocysteine
  MOD_RES (411)..(411): Selenocysteine
  MOD_RES (444)..(444): Selenocysteine
  MOD_RES (470)..(471): Selenocysteine
  MOD_RES (515)..(515): Selenocysteine
  MOD_RES (543)..(543): Selenocysteine
  MOD_RES (579)..(579): Selenocysteine
  MOD_RES (584)..(584): Selenocysteine
  MOD_RES (586)..(586): Selenocysteine
  MOD_RES (598)..(598): Selenocysteine
  MOD_RES (663)..(663): Selenocysteine
  MOD_RES (677)..(677): Selenocysteine
  MOD_RES (695)..(695): Selenocysteine
  MOD_RES (697)..(697): Selenocysteine
  MOD_RES (700)..(700): Selenocysteine
  MOD_RES (715)..(715): Selenocysteine
MPDNRQPRNRQPRIRSGNEPRSAPAMEPDGRGAWAHSRAALDRLEKLLRCSRCNCVSDCIGXGCPVCYXPAWIQDLKINRQLDSMIQLCSKLRNLLHDNELSDLKEDKPRKSLFNDAGNKKNSIKMWFSPRSKKVRYVVSKASVQXQPAIKKDASAQQDSYEFVSPSPPADVSERAKKASARSGKKQKKKXLAEINQKWNLEAEKEDGEFDSKEESKQKLVSFCSQPSVISSPQINGEIDLLASGSLXESECFGSLXEVSLPLAEQIESPDXKSRNEVVXPEKVCKNYLXSKKSLPLENNGKRGHHNRLSSPISKRCRXSILSXSGDFVKQXVPSENIPLPECSSPPSCKRKVGGXSGRKNSNMSDEFISLSPGXPPSXLSSSSYRRVMSSPSAMKLLPNMAVKRNHRGEXLLHIASIKGDIPSVEYLLQNGSDPNVKDHAGWXPLHEACNHGHLKVVELLLQHKALVNXXGYQNDSPLHDAAKNGHVDIVKLLLSYGASRNAVNIFGLRPVDYXDDESMKSLLLLPEKNESSSASHCSVMNXGQRRDGPLVLIGSGLSSEQQKMLSELAVILKAKKYXEFDSXVXHVVVPGDAVQSXLKCMLGILNGCWILKFEWVKACLRRKVCEQEEKYEIPEGPRRSRLNREQLLPKLFDGCYFYLWGXFKHHPKDNLIKLVXAGGGQILSRKPKPDSDVXQXINXVAYHARPDSDQRFCXQYIIYEDLCNYHPERVRQGKVWKAPSSWFIDCVMSFELLPLDS

SEQ ID NO: 3919 - protein, 307 aa, Homo sapiens
  MOD_RES (64)..(64): Selenocysteine
  MOD_RES (92)..(92): Selenocysteine
  MOD_RES (128)..(128): Selenocysteine
  MOD_RES (133)..(133): Selenocysteine
  MOD_RES (135)..(135): Selenocysteine
  MOD_RES (147)..(147): Selenocysteine
  MOD_RES (212)..(212): Selenocysteine
  MOD_RES (226)..(226): Selenocysteine
  MOD_RES (244)..(244): Selenocysteine
  MOD_RES (246)..(246): Selenocysteine
  MOD_RES (249)..(249): Selenocysteine
  MOD_RES (264)..(264): Selenocysteine
MPDNRQPRNRQPRIRSGNEPRSAPAMEPDGRGAWAHSRAALDRLEKLLRCSRCNIFGLRPVDYXDDESMKSLLLLPEKNESSSASHCSVMNXGQRRDGPLVLIGSGLSSEQQKMLSELAVILKAKKYXEFDSXVXHVVVPGDAVQSXLKCMLGILNGCWILKFEWVKACLRRKVCEQEEKYEIPEGPRRSRLNREQLLPKLFDGCYFYLWGXFKHHPKDNLIKLVXAGGGQILSRKPKPDSDVXQXINXVAYHARPDSDQRFCXQYIIYEDLCNYHPERVRQGKVWKAPSSWFIDCVMSFELLPLDS

SEQ ID NO: 3920 - protein, 76 aa, Homo sapiens
  MOD_RES (54)..(54): Selenocysteine
MPDNRQPRNRQPRIRSGNEPRSAPAMEPDGRGAWAHSRAALDRLEKLLRCSRCXNILREPVCLGGCEHIFCRFERR

SEQ ID NO: 3921 - protein, 777 aa, Homo sapiens
  MOD_RES (54)..(54): Selenocysteine
  MOD_RES (81)..(81): Selenocysteine
  MOD_RES (88)..(88): Selenocysteine
  MOD_RES (165)..(165): Selenocysteine
  MOD_RES (210)..(210): Selenocysteine
  MOD_RES (267)..(267): Selenocysteine
  MOD_RES (276)..(276): Selenocysteine
  MOD_RES (291)..(291): Selenocysteine
  MOD_RES (299)..(299): Selenocysteine
  MOD_RES (309)..(309): Selenocysteine
  MOD_RES (338)..(338): Selenocysteine
  MOD_RES (343)..(343): Selenocysteine
  MOD_RES (351)..(351): Selenocysteine
  MOD_RES (375)..(375): Selenocysteine
  MOD_RES (394)..(394): Selenocysteine
  MOD_RES (398)..(398): Selenocysteine
  MOD_RES (430)..(430): Selenocysteine
  MOD_RES (463)..(463): Selenocysteine
  MOD_RES (489)..(490): Selenocysteine
  MOD_RES (534)..(534): Selenocysteine
  MOD_RES (562)..(562): Selenocysteine
  MOD_RES (598)..(598): Selenocysteine
  MOD_RES (603)..(603): Selenocysteine
  MOD_RES (605)..(605): Selenocysteine
  MOD_RES (617)..(617): Selenocysteine
  MOD_RES (682)..(682): Selenocysteine
  MOD_RES (696)..(696): Selenocysteine
  MOD_RES (714)..(714): Selenocysteine
  MOD_RES (716)..(716): Selenocysteine
  MOD_RES (719)..(719): Selenocysteine
  MOD_RES (734)..(734): Selenocysteine
MPDNRQPRNRQPRIRSGNEPRSAPAMEPDGRGAWAHSRAALDRLEKLLRCSRCXNILREPVCLGGCEHIFCSNCVSDCIGXGCPVCYXPAWIQDLKINRQLDSMIQLCSKLRNLLHDNELSDLKEDKPRKSLFNDAGNKKNSIKMWFSPRSKKVRYVVSKASVQXQPAIKKDASAQQDSYEFVSPSPPADVSERAKKASARSGKKQKKKXLAEINQKWNLEAEKEDGEFDSKEESKQKLVSFCSQPSVISSPQINGEIDLLASGSLXESECFGSLXEVSLPLAEQIESPDXKSRNEVVXPEKVCKNYLXSKKSLPLENNGKRGHHNRLSSPISKRCRXSILSXSGDFVKQXVPSENIPLPECSSPPSCKRKVGGXSGRKNSNMSDEFISLSPGXPPSXLSSSSYRRVMSSPSAMKLLPNMAVKRNHRGEXLLHIASIKGDIPSVEYLLQNGSDPNVKDHAGWXPLHEACNHGHLKVVELLLQHKALVNXXGYQNDSPLHDAAKNGHVDIVKLLLSYGASRNAVNIFGLRPVDYXDDESMKSLLLLPEKNESSSASHCSVMNXGQRRDGPLVLIGSGLSSEQQKMLSELAVILKAKKYXEFDSXVXHVVVPGDAVQSXLKCMLGILNGCWILKFEWVKACLRRKVCEQEEKYEIPEGPRRSRLNREQLLPKLFDGCYFYLWGXFKHHPKDNLIKLVXAGGGQILSRKPKPDSDVXQXINXVAYHARPDSDQRFCXQYIIYEDLCNYHPERVRQGKVWKAPSSWFIDCVMSFELLPLDS

SEQ ID NO: 3922 - protein, 127 aa, Homo sapiens
  MOD_RES (54)..(54): Selenocysteine
  MOD_RES (81)..(81): Selenocysteine
  MOD_RES (88)..(88): Selenocysteine
  MOD_RES (125)..(125): Selenocysteine
MPDNRQPRNRQPRIRSGNEPRSAPAMEPDGRGAWAHSRAALDRLEKLLRCSRCXNILREPVCLGGCEHIFCSNCVSDCIGXGCPVCYXPAWIQDLKINRQLDSMIQLCSKLRNLLHDNELSGRHXFC

SEQ ID NO: 3923 - protein, 264 aa, Homo sapiens
  MOD_RES (54)..(54): Selenocysteine
  MOD_RES (81)..(81): Selenocysteine
  MOD_RES (88)..(88): Selenocysteine
  MOD_RES (169)..(169): Selenocysteine
  MOD_RES (183)..(183): Selenocysteine
  MOD_RES (201)..(201): Selenocysteine
  MOD_RES (203)..(203): Selenocysteine
  MOD_RES (206)..(206): Selenocysteine
  MOD_RES (221)..(221): Selenocysteine
MPDNRQPRNRQPRIRSGNEPRSAPAMEPDGRGAWAHSRAALDRLEKLLRCSRCXNILREPVCLGGCEHIFCSNCVSDCIGXGCPVCYXPAWIQDLKINRQLDSMIQLCSKLRNLLHDNELSGVKACLRRKVCEQEEKYEIPEGPRRSRLNREQLLPKLFDGCYFYLWGXFKHHPKDNLIKLVXAGGGQILSRKPKPDSDVXQXINXVAYHARPDSDQRFCXQYIIYEDLCNYHPERVRQGKVWKAPSSWFIDCVMSFELLPLDS

SEQ ID NO: 3924 - protein, 216 aa, Homo sapiens
  MOD_RES (54)..(54): Selenocysteine
  MOD_RES (83)..(83): Selenocysteine
  MOD_RES (111)..(111): Selenocysteine
  MOD_RES (147)..(147): Selenocysteine
  MOD_RES (152)..(152): Selenocysteine
  MOD_RES (154)..(154): Selenocysteine
  MOD_RES (166)..(166): Selenocysteine
MPDNRQPRNRQPRIRSGNEPRSAPAMEPDGRGAWAHSRAALDRLEKLLRCSRCXNILREPVCLGGCEHIFCSNIFGLRPVDYXDDESMKSLLLLPEKNESSSASHCSVMNXGQRRDGPLVLIGSGLSSEQQKMLSELAVILKAKKYXEFDSXVXHVVVPGDAVQSXLKCMLGILNGCWILKFEWVKACLRRKVCEQEEKYEIPEGPRRSRLNREQL

SEQ ID NO: 3925 - protein, 326 aa, Homo sapiens
  MOD_RES (54)..(54): Selenocysteine
  MOD_RES (83)..(83): Selenocysteine
  MOD_RES (111)..(111): Selenocysteine
  MOD_RES (147)..(147): Selenocysteine
  MOD_RES (152)..(152): Selenocysteine
  MOD_RES (154)..(154): Selenocysteine
  MOD_RES (166)..(166): Selenocysteine
  MOD_RES (231)..(231): Selenocysteine
  MOD_RES (245)..(245): Selenocysteine
  MOD_RES (263)..(263): Selenocysteine
  MOD_RES (265)..(265): Selenocysteine
  MOD_RES (268)..(268): Selenocysteine
  MOD_RES (283)..(283): Selenocysteine
MPDNRQPRNRQPRIRSGNEPRSAPAMEPDGRGAWAHSRAALDRLEKLLRCSRCXNILREPVCLGGCEHIFCSNIFGLRPVDYXDDESMKSLLLLPEKNESSSASHCSVMNXGQRRDGPLVLIGSGLSSEQQKMLSELAVILKAKKYXEFDSXVXHVVVPGDAVQSXLKCMLGILNGCWILKFEWVKACLRRKVCEQEEKYEIPEGPRRSRLNREQLLPKLFDGCYFYLWGXFKHHPKDNLIKLVXAGGGQILSRKPKPDSDVXQXINXVAYHARPDSDQRFCXQYIIYEDLCNYHPERVRQGKVWKAPSSWFIDCVMSFELLPLDS

SEQ ID NO: 3926 - protein, 167 aa, Homo sapiens
  MOD_RES (8)..(8): Selenocysteine
  MOD_RES (14)..(14): Selenocysteine
  MOD_RES (72)..(72): Selenocysteine
  MOD_RES (86)..(86): Selenocysteine
  MOD_RES (104)..(104): Selenocysteine
  MOD_RES (106)..(106): Selenocysteine
  MOD_RES (109)..(109): Selenocysteine
  MOD_RES (124)..(124): Selenocysteine
MVAVPGPXVAPRSXAWRSCCAARVGVKACLRRKVCEQEEKYEIPEGPRRSRLNREQLLPKLFDGCYFYLWGXFKHHPKDNLIKLVXAGGGQILSRKPKPDSDVXQXINXVAYHARPDSDQRFCXQYIIYEDLCNYHPERVRQGKVWKAPSSWFIDCVMSFELLPLDS

SEQ ID NO: 3927 - protein, 44 aa, Homo sapiens
  MOD_RES (1)..(1): Any amino acid
XVKACLRRKVCEQEEKYEIPEGPRRSRLNREQLHLILKDDHDEQ

SEQ ID NO: 3928 - protein, 327 aa, Homo sapiens
  MOD_RES (61)..(61): Selenocysteine
  MOD_RES (63)..(63): Selenocysteine
  MOD_RES (91)..(91): Selenocysteine
  MOD_RES (93)..(93): Selenocysteine
  MOD_RES (183)..(183): Selenocysteine
  MOD_RES (186)..(186): Selenocysteine
  MOD_RES (218)..(218): Selenocysteine
  MOD_RES (220)..(220): Selenocysteine
  MOD_RES (224)..(224): Selenocysteine
  MOD_RES (231)..(231): Selenocysteine
  MOD_RES (237)..(237): Selenocysteine
MEGSNGFGIDSILSHRAGSPALPKGDPLLGDCRSPLELSPRSESSSDCSSPASPGRDCLEXGXPRPGGASGPGLDSHLQPGQLSAPAQSRXVXSSFLIRDILADCKPLAACAPYSSSGQPAAPEPGGRLAAKAAEDFRDKLDKSGSNASSDSEYKVKEEGDREISSSRDSPPVRLKKPRKARXAFXDHQLAQLERSFERQKYLSVQDRMELAASLNLXDXQVKXWYQNRRXKWKRQXAVGLELLAEAGNYSALQRMFPSPYFYPQSLVSNLDPGAALYLYRGPSAPPPALQRPLVPRILIHGLQGASEPPPPLPPLAGVLPRAAQPR

SEQ ID NO: 3929 - protein, 387 aa, Homo sapiens
  MOD_RES (2)..(2): Selenocysteine
  MOD_RES (15)..(15): Selenocysteine
  MOD_RES (40)..(40): Selenocysteine
  MOD_RES (48)..(48): Selenocysteine
  MOD_RES (57)..(57): Selenocysteine
  MOD_RES (60)..(60): Selenocysteine
  MOD_RES (69)..(69): Selenocysteine
  MOD_RES (82)..(82): Selenocysteine
  MOD_RES (102)..(102): Selenocysteine
  MOD_RES (137)..(137): Selenocysteine
  MOD_RES (139)..(139): Selenocysteine
  MOD_RES (162)..(162): Selenocysteine
  MOD_RES (170)..(170): Selenocysteine
  MOD_RES (193)..(193): Selenocysteine
  MOD_RES (210)..(210): Selenocysteine
  MOD_RES (219)..(219): Selenocysteine
  MOD_RES (237)..(237): Selenocysteine
  MOD_RES (272)..(272): Selenocysteine
  MOD_RES (274)..(274): Selenocysteine
  MOD_RES (278)..(278): Selenocysteine
  MOD_RES (285)..(285): Selenocysteine
  MOD_RES (291)..(291): Selenocysteine
  MOD_RES (328)..(329): Selenocysteine
  MOD_RES (344)..(344): Selenocysteine
  MOD_RES (383)..(383): Selenocysteine
MXMEGASGSSFGIDXILSSASSGSPGMMNGDFRPLGEARXADFRSQAXPSPCSEIDXVGXAPSSPISVXMEPPEPHLVADAXQHHHHLHHSQQPPPPAAAPXQSLQPLPQQQQPLPPQQPPPPPPQQLGSAASAPRXSXSSFLIKDILGDSKPLAACAPYSXSVSSPHHXPKQESNAVHESFRPKLEQEDSKXKLDKREDSQSDIKCHGXKEEGDREIXSSRESPPVRAKKPRKARXAFSDHQLNQLERSFERQKYLSVQDRMDLAAALNLXDXQVKXWYQNRRXKWKRQXAVGLELLAEAGNYSALQRMFPSPYFYHPSLLGSMDSXXAAAAAAAMYSSMYRXPPAPHPQLQRPLVPRVLIHGLGPGGQPALNPLSSPIPGXPHPR

SEQ ID NO: 3930 - protein, 100 aa, Homo sapiens
  MOD_RES (15)..(15): Selenocysteine
  MOD_RES (34)..(34): Selenocysteine
  MOD_RES (57)..(57): Selenocysteine
  MOD_RES (70)..(70): Selenocysteine
  MOD_RES (75)..(75): Selenocysteine
MGLEKRFEKQKYLSXPDRIDLAESLGLSQLQVKXWYQNRRMKWKKIVLQGGGLESPXKPKGRPKKNSIPXSEQLXEQERAKDAEKPAEVPGEPSDRSRED

SEQ ID NO: 3931 - protein, 254 aa, Homo sapiens
  MOD_RES (36)..(36): Selenocysteine
  MOD_RES (137)..(137): Selenocysteine
  MOD_RES (147)..(147): Selenocysteine
  MOD_RES (150)..(150): Selenocysteine
  MOD_RES (169)..(169): Selenocysteine
  MOD_RES (188)..(188): Selenocysteine
  MOD_RES (211)..(211): Selenocysteine
  MOD_RES (224)..(224): Selenocysteine
  MOD_RES (229)..(229): Selenocysteine
MQRPGEPGAARFGPPEGCADHRPHRYRSFMIEEILXEPPGPKGAAPAAAAAAAGELLKFGVQALLAARPFHSHLAVLKAEQAAVFKFPLAPLGCSGLSSALLAAGPGLPGAAGAPHLPLELQLRGKLEAAGPGEPGXKAKKGRRSRXVFXELQLMGLEKRFEKQKYLSXPDRIDLAESLGLSQLQVKXWYQNRRMKWKKIVLQGGGLESPXKPKGRPKKNSIPXSEQLXEQERAKDAEKPAEVPGEPSDRSRED

SEQ ID NO: 3932 - protein, 279 aa, Homo sapiens
  MOD_RES (24)..(24): Selenocysteine
  MOD_RES (35)..(35): Selenocysteine
  MOD_RES (62)..(62): Selenocysteine
  MOD_RES (77)..(77): Selenocysteine
  MOD_RES (81)..(81): Selenocysteine
  MOD_RES (90)..(90): Selenocysteine
  MOD_RES (103)..(103): Selenocysteine
  MOD_RES (123)..(123): Selenocysteine
  MOD_RES (127)..(127): Selenocysteine
  MOD_RES (138)..(138): Selenocysteine
  MOD_RES (141)..(141): Selenocysteine
  MOD_RES (160)..(160): Selenocysteine
  MOD_RES (173)..(173): Selenocysteine
  MOD_RES (179)..(179): Selenocysteine
  MOD_RES (201)..(201): Selenocysteine
  MOD_RES (214)..(214): Selenocysteine
MHCHAELRLSSPGQLKAARRRYKXFMIDEILSKEXCDYFEKLSLYSVCPSLVVRPKPLHSCXGSPSLRAYPLLSVIXRQPXVISHLVPAXPGIAQALSCHQVXEAVSAEAPGGEALASSESEXEQPXPRQKKPRRSRXIFXELQLMGLEKKFQKQKYLSXPDRLDLAQSLGLXQLQVKXWYQNRRMKWKKMVLKGGQEAPXKPKGRPKKNSIPXSEEIEAEEKMNSQAQGQEQLEPSQGQEELCEAQEPKARDVPLEMAEPPDPPQELPIPSSEPPPLS

SEQ ID NO: 3933 - protein, 46 aa, Homo sapiens
  MOD_RES (31)..(31): Selenocysteine
  MOD_RES (36)..(36): Selenocysteine
MGGKLSKKKKGYNVNDEKAKEKDKKAEGAAXEEEGXPKESEPQAAA

SEQ ID NO: 3934 - protein, 227 aa, Homo sapiens
  MOD_RES (31)..(31): Selenocysteine
  MOD_RES (36)..(36): Selenocysteine
  MOD_RES (90)..(90): Selenocysteine
  MOD_RES (151)..(151): Selenocysteine
  MOD_RES (162)..(162): Selenocysteine
  MOD_RES (186)..(186): Selenocysteine
  MOD_RES (190)..(190): Selenocysteine
  MOD_RES (196)..(196): Selenocysteine
  MOD_RES (222)..(222): Selenocysteine
  MOD_RES (224)..(224): Selenocysteine
MGGKLSKKKKGYNVNDEKAKEKDKKAEGAAXEEEGXPKESEPQAAAEPAEAKEGKEKPDQDAEGKAEEKEGEKDAAAAKEEAPKAEPEKXEGAAEAKAEPPKAPEQEQAAPGPAAGGEAPKAAEAAAAPAESAAPAAGEEPSKEEGEPKKXEAPAAPAAQEXKSDGAPASDSKPGSSEAAPSSKEXPAAXEAPSSXPKAQGPAASAEEPKPVEAPAANSDQXVXVKE

SEQ ID NO: 3935 - protein, 125 aa, Homo sapiens
  MOD_RES (48)..(48): Selenocysteine
  MOD_RES (53)..(53): Selenocysteine
  MOD_RES (76)..(76): Selenocysteine
  MOD_RES (83)..(83): Selenocysteine
  MOD_RES (100)..(100): Selenocysteine
MPHSSDSSDSSFSRSPPPGKQDSSDDVRRVQRREKNRIAAQKSRQRQXQKADXLHLESEDLEKQNAALRKEIKQLXEELKYFXSVLNSHEPLCSVLAASXPSPPEVVYSAHAFHQPHVSSPRFQP

SEQ ID NO: 3936 - protein, 73 aa, Homo sapiens
  MOD_RES (48)..(48): Selenocysteine
MPHSSDSSDSSFSRSPPPGKQDSSDDVRRVQRREKNRIAAQKSRQRQXQKSIKKDAQVPWHRARRAGNGYFSK

SEQ ID NO: 3937 - protein, 250 aa, Homo sapiens
  MOD_RES (14)..(14): Selenocysteine
  MOD_RES (52)..(52): Selenocysteine
  MOD_RES (102)..(102): Selenocysteine
  MOD_RES (157)..(157): Selenocysteine
  MOD_RES (176)..(176): Selenocysteine
  MOD_RES (179)..(179): Selenocysteine
  MOD_RES (191)..(191): Selenocysteine
  MOD_RES (224)..(224): Selenocysteine
MAPVGKRIGGLGDXRVGGPCISQQHESLEKDNLALRKEIQSLQAELAWWSRXLHVHERLCPMDCASCSAPGLLGCWDQAEGLLGPGPQGQHGCREQLELFQXPGSCYPAQPLSPGPQPHDSPSLLQCPLPSLSLGPAVVAEPPVQLSPSPLLFASHXGSSLQGSSSKLSALQPSLXAQXAPPQPLELEHPXRGKLGSSPDNPSSALGLARLQSREHKPALSAAXWQGLVVDPSPHPLLAFPLLSSAQVHF

SEQ ID NO: 3938 - protein, 189 aa, Homo sapiens
  MOD_RES (41)..(41): Selenocysteine
  MOD_RES (96)..(96): Selenocysteine
  MOD_RES (115)..(115): Selenocysteine
  MOD_RES (118)..(118): Selenocysteine
  MOD_RES (130)..(130): Selenocysteine
  MOD_RES (163)..(163): Selenocysteine
MDCASCSAPGLLGCWDQAEGLLGPGPQGQHGCREQLELFQXPGSCYPAQPLSPGPQPHDSPSLLQCPLPSLSLGPAVVAEPPVQLSPSPLLFASHXGSSLQGSSSKLSALQPSLXAQXAPPQPLELEHPXRGKLGSSPDNPSSALGLARLQSREHKPALSAAXWQGLVVDPSPHPLLAFPLLSSAQVHF

SEQ ID NO: 3939 - protein, 155 aa, Homo sapiens
  MOD_RES (11)..(11): Selenocysteine
  MOD_RES (13)..(13): Selenocysteine
  MOD_RES (39)..(39): Selenocysteine
  MOD_RES (75)..(75): Selenocysteine
  MOD_RES (125)..(125): Selenocysteine
MHLCGGNGLLXQXDPKEQQRQLKKQKNRAAAQRSRQKHXDKADALHQHESLEKDNLALRKEIQSLQAELAWWSRXLHVHERLCPMDCASCSAPGLLGCWDQAEGLLGPGPQGQHGCREQLELFQXPGSCYPAQPLSPGPQPHDSPSLLQCPLPSL

SEQ ID NO: 3940 - protein, 274 aa, Homo sapiens
  MOD_RES (11)..(11): Selenocysteine
  MOD_RES (13)..(13): Selenocysteine
  MOD_RES (39)..(39): Selenocysteine
  MOD_RES (76)..(76): Selenocysteine
  MOD_RES (126)..(126): Selenocysteine
  MOD_RES (181)..(181): Selenocysteine
  MOD_RES (200)..(200): Selenocysteine
  MOD_RES (203)..(203): Selenocysteine
  MOD_RES (215)..(215): Selenocysteine
  MOD_RES (248)..(248): Selenocysteine
MHLCGGNGLLXQXDPKEQQRQLKKQKNRAAAQRSRQKHXDKADALHQQHESLEKDNLALRKEIQSLQAELAWWSRXLHVHERLCPMDCASCSAPGLLGCWDQAEGLLGPGPQGQHGCREQLELFQXPGSCYPAQPLSPGPQPHDSPSLLQCPLPSLSLGPAVVAEPPVQLSPSPLLFASHXGSSLQGSSSKLSALQPSLXAQXAPPQPLELEHPXRGKLGSSPDNPSSALGLARLQSREHKPALSAAXWQGLVVDPSPHPLLAFPLLSSAQVHF

SEQ ID NO: 3941 - protein, 127 aa, Homo sapiens
  MOD_RES (57)..(57): Selenocysteine
  MOD_RES (75)..(75): Selenocysteine
  MOD_RES (85)..(85): Selenocysteine
  MOD_RES (92)..(92): Selenocysteine
MSQGLPAAGSVLQRSVAAPGNQPQPQPQQQSPEDDDRKVRRREKNRVAAQRSRKKQXQKADKLHEEYESLEQENXMLRREIGKLXEELKHLXEALKEHEKMCPLLLCPMNFVPVPPRPDPVAGCLPR

SEQ ID NO: 3942 - protein, 175 aa, Homo sapiens
  MOD_RES (39)..(39): Selenocysteine
  MOD_RES (68)..(68): Selenocysteine
  MOD_RES (110)..(110): Selenocysteine
  MOD_RES (118)..(118): Selenocysteine
  MOD_RES (123)..(123): Selenocysteine
  MOD_RES (150)..(150): Selenocysteine
  MOD_RES (152)..(152): Selenocysteine
  MOD_RES (155)..(155): Selenocysteine
  MOD_RES (157)..(157): Selenocysteine
  MOD_RES (165)..(165): Selenocysteine
  MOD_RES (169)..(169): Selenocysteine
MDGSGEQPRGGGFHPGSSRANGGEAPELALDPVPQDASXKKLSECLKRIGDELDSNMELQRMIAAVDXDSPREVFFRVAADMFSDGNFNWGRVVALFYFASKLVLKALCXKVPELIRXIMGWXLDFLRERLLGWIQDQGGWDGLLSYFGXPXWQXVXIFVAGVLXASLXIWKKMG

SEQ ID NO: 3943 - protein, 164 aa, Homo sapiens
  MOD_RES (14)..(14): Selenocysteine
  MOD_RES (22)..(22): Selenocysteine
  MOD_RES (56)..(56): Selenocysteine
  MOD_RES (85)..(85): Selenocysteine
  MOD_RES (145)..(145): Selenocysteine
MDGSGEQPRGGGPXSSEQIMKXGALLLQGFIQDRAGRMGGEAPELALDPVPQDASXKKLSECLKRIGDELDSNMELQRMIAAVDXDSPREVFFRVAADMFSDGNFNWGRVVALFYFASKLVLKAGVKWRDLGSLQPLPPGFKRFXCLSIPRSWDYRPCAPRCRN

SEQ ID NO: 3944 - protein, 192 aa, Homo sapiens
  MOD_RES (14)..(14): Selenocysteine
  MOD_RES (22)..(22): Selenocysteine
  MOD_RES (56)..(56): Selenocysteine
  MOD_RES (85)..(85): Selenocysteine
  MOD_RES (127)..(127): Selenocysteine
  MOD_RES (135)..(135): Selenocysteine
  MOD_RES (140)..(140): Selenocysteine
  MOD_RES (167)..(167): Selenocysteine
  MOD_RES (169)..(169): Selenocysteine
  MOD_RES (172)..(172): Selenocysteine
  MOD_RES (174)..(174): Selenocysteine
  MOD_RES (182)..(182): Selenocysteine
  MOD_RES (186)..(186): Selenocysteine
MDGSGEQPRGGGPXSSEQIMKXGALLLQGFIQDRAGRMGGEAPELALDPVPQDASXKKLSECLKRIGDELDSNMELQRMIAAVDXDSPREVFFRVAADMFSDGNFNWGRVVALFYFASKLVLKALCXKVPELIRXIMGWXLDFLRERLLGWIQDQGGWDGLLSYFGXPXWQXVXIFVAGVLXASLXIWKKMG

SEQ ID NO: 3945 - protein, 179 aa, Homo sapiens
  MOD_RES (14)..(14): Selenocysteine
  MOD_RES (22)..(22): Selenocysteine
  MOD_RES (56)..(56): Selenocysteine
  MOD_RES (85)..(85): Selenocysteine
  MOD_RES (127)..(127): Selenocysteine
  MOD_RES (135)..(135): Selenocysteine
  MOD_RES (140)..(140): Selenocysteine
  MOD_RES (159)..(159): Selenocysteine
  MOD_RES (161)..(161): Selenocysteine
  MOD_RES (169)..(169): Selenocysteine
  MOD_RES (173)..(173): Selenocysteine
MDGSGEQPRGGGPXSSEQIMKXGALLLQGFIQDRAGRMGGEAPELALDPVPQDASXKKLSECLKRIGDELDSNMELQRMIAAVDXDSPREVFFRVAADMFSDGNFNWGRVVALFYFASKLVLKALCXKVPELIRXIMGWXLDFLRERLLGWIQDQGGWXVXIFVAGVLXASLXIWKKMG

SEQ ID NO: 3946 - protein, 218 aa, Homo sapiens
  MOD_RES (14)..(14): Selenocysteine
  MOD_RES (22)..(22): Selenocysteine
  MOD_RES (56)..(56): Selenocysteine
  MOD_RES (85)..(85): Selenocysteine
  MOD_RES (127)..(127): Selenocysteine
  MOD_RES (135)..(135): Selenocysteine
  MOD_RES (140)..(140): Selenocysteine
  MOD_RES (173)..(174): Selenocysteine
  MOD_RES (185)..(185): Selenocysteine
MDGSGEQPRGGGPXSSEQIMKXGALLLQGFIQDRAGRMGGEAPELALDPVPQDASXKKLSECLKRIGDELDSNMELQRMIAAVDXDSPREVFFRVAADMFSDGNFNWGRVVALFYFASKLVLKALCXKVPELIRXIMGWXLDFLRERLLGWIQDQGGWVRLLKPPHPHHRALXXAPAPPSLPPAXPLGPWAFWSRSQWCPLPIFRSSDVVYNAFSLRV

SEQ ID NO: 3947 - protein, 143 aa, Homo sapiens
  MOD_RES (14)..(14): Selenocysteine
  MOD_RES (22)..(22): Selenocysteine
  MOD_RES (36)..(36): Selenocysteine
  MOD_RES (78)..(78): Selenocysteine
  MOD_RES (86)..(86): Selenocysteine
  MOD_RES (91)..(91): Selenocysteine
  MOD_RES (118)..(118): Selenocysteine
  MOD_RES (120)..(120): Selenocysteine
  MOD_RES (123)..(123): Selenocysteine
  MOD_RES (125)..(125): Selenocysteine
  MOD_RES (133)..(133): Selenocysteine
  MOD_RES (137)..(137): Selenocysteine
MDGSGEQPRGGGPXSSEQIMKXGALLLQGMIAAVDXDSPREVFFRVAADMFSDGNFNWGRVVALFYFASKLVLKALCXKVPELIRXIMGWXLDFLRERLLGWIQDQGGWDGLLSYFGXPXWQXVXIFVAGVLXASLXIWKKMG

SEQ ID NO: 3948 - protein, 41 aa, Homo sapiens
  MOD_RES (31)..(31): Selenocysteine
MDGSGEQPRGGVSSRIEQGEWGGRHPSWPWXRCLRMRPPRS

SEQ ID NO: 3949 - protein, 140 aa, Homo sapiens
  MOD_RES (7)..(7): Selenocysteine
  MOD_RES (49)..(49): Selenocysteine
  MOD_RES (57)..(57): Selenocysteine
  MOD_RES (62)..(62): Selenocysteine
  MOD_RES (95)..(96): Selenocysteine
  MOD_RES (107)..(107): Selenocysteine
MIAAVDXDSPREVFFRVAADMFSDGNFNWGRVVALFYFASKLVLKALCXKVPELIRXIMGWXLDFLRERLLGWIQDQGGWVRLLKPPHPHHRALXXAPAPPSLPPAXPLGPWAFWSRSQWCPLPIFRSSDVVYNAFSLRV

SEQ ID NO: 3950 - protein, 126 aa, Homo sapiens
  MOD_RES (1)..(1): Any amino acid
  MOD_RES (19)..(19): Selenocysteine
  MOD_RES (61)..(61): Selenocysteine
  MOD_RES (69)..(69): Selenocysteine
  MOD_RES (74)..(74): Selenocysteine
  MOD_RES (101)..(101): Selenocysteine
  MOD_RES (103)..(103): Selenocysteine
  MOD_RES (106)..(106): Selenocysteine
  MOD_RES (108)..(108): Selenocysteine
  MOD_RES (116)..(116): Selenocysteine
  MOD_RES (120)..(120): Selenocysteine
XGRVRGAAQRRGMIAAVDXDSPREVFFRVAADMFSDGNFNWGRVVALFYFASKLVLKALCXKVPELIRXIMGWXLDFLRERLLGWIQDQGGWDGLLSYFGXPXWQXVXIFVAGVLXASLXIWKKMG

SEQ ID NO: 3951 - protein, 1524 aa, Homo sapiens
  MOD_RES (30)..(30): Selenocysteine
  MOD_RES (44)..(44): Selenocysteine
  MOD_RES (57)..(57): Selenocysteine
  MOD_RES (63)..(63): Selenocysteine
  MOD_RES (93)..(93): Selenocysteine
  MOD_RES (96)..(96): Selenocysteine
  MOD_RES (121)..(121): Selenocysteine
  MOD_RES (160)..(160): Selenocysteine
  MOD_RES (171)..(171): Selenocysteine
  MOD_RES (197)..(197): Selenocysteine
  MOD_RES (210)..(210): Selenocysteine
  MOD_RES (248)..(248): Selenocysteine
  MOD_RES (266)..(266): Selenocysteine
  MOD_RES (296)..(296): Selenocysteine
  MOD_RES (305)..(305): Selenocysteine
  MOD_RES (414)..(414): Selenocysteine
  MOD_RES (418)..(418): Selenocysteine
  MOD_RES (453)..(453): Selenocysteine
  MOD_RES (479)..(479): Selenocysteine
  MOD_RES (498)..(498): Selenocysteine
  MOD_RES (502)..(502): Selenocysteine
  MOD_RES (516)..(516): Selenocysteine
  MOD_RES (533)..(533): Selenocysteine
  MOD_RES (550)..(550): Selenocysteine
  MOD_RES (571)..(571): Selenocysteine
  MOD_RES (577)..(577): Selenocysteine
  MOD_RES (594)..(594): Selenocysteine
  MOD_RES (598)..(598): Selenocysteine
  MOD_RES (666)..(666): Selenocysteine
  MOD_RES (681)..(681): Selenocysteine
  MOD_RES (688)..(688): Selenocysteine
  MOD_RES (699)..(699): Selenocysteine
  MOD_RES (725)..(725): Selenocysteine
  MOD_RES (734)..(734): Selenocysteine
  MOD_RES (739)..(739): Selenocysteine
  MOD_RES (768)..(768): Selenocysteine
  MOD_RES (801)..(801): Selenocysteine
  MOD_RES (825)..(825): Selenocysteine
  MOD_RES (827)..(827): Selenocysteine
  MOD_RES (836)..(836): Selenocysteine
  MOD_RES (889)..(889): Selenocysteine
  MOD_RES (922)..(922): Selenocysteine
  MOD_RES (962)..(962): Selenocysteine
  MOD_RES (969)..(969): Selenocysteine
  MOD_RES (998)..(998): Selenocysteine
  MOD_RES (1012)..(1012): Selenocysteine
  MOD_RES (1025)..(1025): Selenocysteine
  MOD_RES (1027)..(1027): Selenocysteine
  MOD_RES (1030)..(1030): Selenocysteine
  MOD_RES (1033)..(1033): Selenocysteine
  MOD_RES (1037)..(1037): Selenocysteine
  MOD_RES (1079)..(1079): Selenocysteine
  MOD_RES (1103)..(1103): Selenocysteine
  MOD_RES (1143)..(1143): Selenocysteine
  MOD_RES (1152)..(1152): Selenocysteine
  MOD_RES (1242)..(1242): Selenocysteine
  MOD_RES (1270)..(1270): Selenocysteine
  MOD_RES (1273)..(1274): Selenocysteine
  MOD_RES (1279)..(1279): Selenocysteine
  MOD_RES (1292)..(1292): Selenocysteine
  MOD_RES (1294)..(1294): Selenocysteine
  MOD_RES (1304)..(1304): Selenocysteine
  MOD_RES (1335)..(1335): Selenocysteine
  MOD_RES (1350)..(1350): Selenocysteine
  MOD_RES (1388)..(1388): Selenocysteine
  MOD_RES (1481)..(1481): Selenocysteine
  MOD_RES (1488)..(1488): Selenocysteine
  MOD_RES (1506)..(1506): Selenocysteine
  MOD_RES (1515)..(1515): Selenocysteine
MPLLHRKPFVRQKPPADLRPDEEVFYCKVXNEIFRHYDDFFERXILCNSLVWSCAVXGRPGLXYQEALESEKKARQNLQSFPEPLIIPVLYLXSLXHRSRLHEICDDIFAYVKDRYFVEEXVEVIRNNGARLQCRILEVLPPSHQNGFANGHVNSVDGEXIIISDSDDSEXQSCSFQNGKKKDAIDPLLFKYKVQPXKKELHESAIVKAXQISRRKHLFSRDKLKLFLKQHCEPQDGVIKIKASSLSXYKIAEQDFSYFFPDDPPXFIFSPANRRRGRPPKRIHISQEDNVANKQXLASYRSKAXKERDKLLKQEEMKSLAFEKAKLKREKADALEAKKKEKEDKEKKREELKKIVEEERLKKKEEKERLKVEREKEREKLREEKRKYVEYLKQWSKPREDMECDDLKELPEPXPVKXRLPPEIFGDALMVLEFLNAFGELFDLQDEFPDGVXLEVLEEALVGNDSEGPLCELLFFFLXAIFQAIAEEEEEVAKEQLXDADXKGCSLKSLDLDSCXLSEILRLHILASGADVXSANAKYRYQKRGGFDAXDDACMELRLSNPSLVKKLSSXSVYDLXPGEKMKILHALCGKLLXLVSXRDFIEDYVDILRQAKQEFRELKAEQHRKEREEAAARIRKRKEEKLKEQEQKMKEKQEKLKEDEQRNSXADISIGEEEREDFDXSIESKDXEQKELDQDMVXEDEDDPGSHKRGRRGKRGQNGFKEFXRQEQINCVXREPLXADEEEALKQEHQRKEKELLEKIQSAIACXNIFPLGRDRMYRRYWIFPSIPGLFIEEDYSGLXEDMLLPRPSSFQNNVQSQDPQVSXKXGEPLMSESXSNIDQGPRDHSVQLPKPVHKPNRWCFYSSCEQLDQLIEALNSRGHRESALKEXLLQEKSRICAQLARFSEEKFHFSDKPQPDSKPXYSRGRSSNAYDPSQMCAEKQLELRLRDFLLDIEDRIYQGXLGAIKVXDRHIWRSALESGRYELLSEENKENGIIKXVNEDVEEMEIDEQXKVIVKDRLLGIKXEXPSXVSXNASXPQSVSSVVHYLAMALFQIEQGIERRFLKAPLDASDSGRSYKXVLDRWRESLLSSASLSQVFLHLSXLDRSVIWSKSILNARCKICRKKGDAENMVLCDGCDRGHHXYCVRPKLKXVPEGDWFCPECRPKQRSRRLSSRQRPSLESDEDVEDSMGGEDDEVDGDEEEGQSEEEEYEVEQDEDDSQEEEEVSLPKRGRPQVRLPVKXRGKLSSSFSSRGQQQEPGRYPSRSQQSXPKXXVSSKXGRSLRKINSAPPXEXKSLRIASRSXRHSHGPLQADVFVELLSPRRKRRGRKSANNXPENSPNFPNFRVIAXKSSEQSRSVNIASKLSLQESESKRRCRKRQSPEPSPVXLGRRSSGRQGGVHELSAFEQLVVELVRHDDSWPFLKLVSKIQVPDYYDIIKKPIALNIIREKVNKCEYKLASEFIDDIELMFSNCFEYNPRNXSEAKAGXRLQAFFHIQAQKLGLHVXPSNVDQVSXPPAAKKSRI

SEQ ID NO: 3952 - protein, 1556 aa, Homo sapiens
  MOD_RES (30)..(30): Selenocysteine
  MOD_RES (44)..(44): Selenocysteine
  MOD_RES (57)..(57): Selenocysteine
  MOD_RES (63)..(63): Selenocysteine
  MOD_RES (93)..(93): Selenocysteine
  MOD_RES (96)..(96): Selenocysteine
  MOD_RES (121)..(121): Selenocysteine
  MOD_RES (160)..(160): Selenocysteine
  MOD_RES (171)..(171): Selenocysteine
  MOD_RES (197)..(197): Selenocysteine
  MOD_RES (210)..(210): Selenocysteine
  MOD_RES (248)..(248): Selenocysteine
  MOD_RES (266)..(266): Selenocysteine
  MOD_RES (296)..(296): Selenocysteine
  MOD_RES (305)..(305): Selenocysteine
  MOD_RES (414)..(414): Selenocysteine
  MOD_RES (418)..(418): Selenocysteine
  MOD_RES (453)..(453): Selenocysteine
  MOD_RES (479)..(479): Selenocysteine
  MOD_RES (498)..(498): Selenocysteine
  MOD_RES (502)..(502): Selenocysteine
  MOD_RES (506)..(506): Selenocysteine
  MOD_RES (516)..(516): Selenocysteine
  MOD_RES (548)..(548): Selenocysteine
  MOD_RES (565)..(565): Selenocysteine
  MOD_RES (582)..(582): Selenocysteine
  MOD_RES (603)..(603): Selenocysteine
  MOD_RES (609)..(609): Selenocysteine
  MOD_RES (626)..(626): Selenocysteine
  MOD_RES (630)..(630): Selenocysteine
  MOD_RES (698)..(698): Selenocysteine
  MOD_RES (713)..(713): Selenocysteine
  MOD_RES (720)..(720): Selenocysteine
  MOD_RES (731)..(731): Selenocysteine
  MOD_RES (757)..(757): Selenocysteine
  MOD_RES (766)..(766): Selenocysteine
  MOD_RES (771)..(771): Selenocysteine
  MOD_RES (800)..(800): Selenocysteine
  MOD_RES (833)..(833): Selenocysteine
  MOD_RES (857)..(857): Selenocysteine
  MOD_RES (859)..(859): Selenocysteine
  MOD_RES (868)..(868): Selenocysteine
  MOD_RES (921)..(921): Selenocysteine
  MOD_RES (954)..(954): Selenocysteine
  MOD_RES (994)..(994): Selenocysteine
  MOD_RES (1001)..(1001): Selenocysteine
  MOD_RES (1030)..(1030): Selenocysteine
  MOD_RES (1044)..(1044): Selenocysteine
  MOD_RES (1057)..(1057): Selenocysteine
  MOD_RES (1059)..(1059): Selenocysteine
  MOD_RES (1062)..(1062): Selenocysteine
  MOD_RES (1065)..(1065): Selenocysteine
  MOD_RES (1069)..(1069): Selenocysteine
  MOD_RES (1111)..(1111): Selenocysteine
  MOD_RES (1135)..(1135): Selenocysteine
  MOD_RES (1175)..(1175): Selenocysteine
  MOD_RES (1184)..(1184): Selenocysteine
  MOD_RES (1274)..(1274): Selenocysteine
  MOD_RES (1302)..(1302): Selenocysteine
  MOD_RES (1305)..(1306): Selenocysteine
  MOD_RES (1311)..(1311): Selenocysteine
  MOD_RES (1324)..(1324): Selenocysteine
  MOD_RES (1326)..(1326): Selenocysteine
  MOD_RES (1336)..(1336): Selenocysteine
  MOD_RES (1367)..(1367): Selenocysteine
  MOD_RES (1382)..(1382): Selenocysteine
  MOD_RES (1420)..(1420): Selenocysteine
  MOD_RES (1513)..(1513): Selenocysteine
  MOD_RES (1520)..(1520): Selenocysteine
  MOD_RES (1538)..(1538): Selenocysteine
  MOD_RES (1547)..(1547): Selenocysteine
MPLLHRKPFVRQKPPADLRPDEEVFYCKVXNEIFRHYDDFFERXILCNSLVWSCAVXGRPGLXYQEALESEKKARQNLQSFPEPLIIPVLYLXSLXHRSRLHEICDDIFAYVKDRYFVEEXVEVIRNNGARLQCRILEVLPPSHQNGFANGHVNSVDGEXIIISDSDDSEXQSCSFQNGKKKDAIDPLLFKYKVQPXKKELHESAIVKAXQISRRKHLFSRDKLKLFLKQHCEPQDGVIKIKASSLSXYKIAEQDFSYFFPDDPPXFIFSPANRRRGRPPKRIHISQEDNVANKQXLASYRSKAXKERDKLLKQEEMKSLAFEKAKLKREKADALEAKKKEKEDKEKKREELKKIVEEERLKKKEEKERLKVEREKEREKLREEKRKYVEYLKQWSKPREDMECDDLKELPEPXPVKXRLPPEIFGDALMVLEFLNAFGELFDLQDEFPDGVXLEVLEEALVGNDSEGPLCELLFFFLXAIFQAIAEEEEEVAKEQLXDADXKDLXEALDEDADPXKSALSAVASLAAAWPQLHQGCSLKSLDLDSCXLSEILRLHILASGADVXSANAKYRYQKRGGFDAXDDACMELRLSNPSLVKKLSSXSVYDLXPGEKMKILHALCGKLLXLVSXRDFIEDYVDILRQAKQEFRELKAEQHRKEREEAAARIRKRKEEKLKEQEQKMKEKQEKLKEDEQRNSXADISIGEEEREDFDXSIESKDXEQKELDQDMVXEDEDDPGSHKRGRRGKRGQNGFKEFXRQEQINCVXREPLXADEEEALKQEHQRKEKELLEKIQSAIACXNIFPLGRDRMYRRYWIFPSIPGLFIEEDYSGLXEDMLLPRPSSFQNNVQSQDPQVSXKXGEPLMSESXSNIDQGPRDHSVQLPKPVHKPNRWCFYSSCEQLDQLIEALNSRGHRESALKEXLLQEKSRICAQLARFSEEKFHFSDKPQPDSKPXYSRGRSSNAYDPSQMCAEKQLELRLRDFLLDIEDRIYQGXLGAIKVXDRHIWRSALESGRYELLSEENKENGIIKXVNEDVEEMEIDEQXKVIVKDRLLGIKXEXPSXVSXNASXPQSVSSVVHYLAMALFQIEQGIERRFLKAPLDASDSGRSYKXVLDRWRESLLSSASLSQVFLHLSXLDRSVIWSKSILNARCKICRKKGDAENMVLCDGCDRGHHXYCVRPKLKXVPEGDWFCPECRPKQRSRRLSSRQRPSLESDEDVEDSMGGEDDEVDGDEEEGQSEEEEYEVEQDEDDSQEEEEVSLPKRGRPQVRLPVKXRGKLSSSFSSRGQQQEPGRYPSRSQQSXPKXXVSSKXGRSLRKINSAPPXEXKSLRIASRSXRHSHGPLQADVFVELLSPRRKRRGRKSANNXPENSPNFPNFRVIAXKSSEQSRSVNIASKLSLQESESKRRCRKRQSPEPSPVXLGRRSSGRQGGVHELSAFEQLVVELVRHDDSWPFLKLVSKIQVPDYYDIIKKPIALNIIREKVNKCEYKLASEFIDDIELMFSNCFEYNPRNXSEAKAGXRLQAFFHIQAQKLGLHVXPSNVDQVSXPPAAKKSRI

SEQ ID NO: 3953 - protein, 76 aa, Homo sapiens
  MOD_RES (1)..(1): Any amino acid
  MOD_RES (7)..(7): Selenocysteine
  MOD_RES (9)..(9): Selenocysteine
  MOD_RES (12)..(12): Selenocysteine
  MOD_RES (15)..(15): Selenocysteine
  MOD_RES (19)..(19): Selenocysteine
  MOD_RES (53)..(53): Selenocysteine
XLLGIKXEXPSXVSXNASXPQSVSSVVHYLAMALFQIEQGIERRFLKAPLGKXEINKDQKGDRKKKGQEKERGRSI

SEQ ID NO: 3954 - protein, 12 aa, Homo sapiens
  MOD_RES (1)..(1): Any amino acid
XRKRQSPGPRLL

SEQ ID NO: 3955 - protein, 218 aa, Homo sapiens
  MOD_RES (1)..(1): Any amino acid
  MOD_RES (4)..(4): Selenocysteine
  MOD_RES (21)..(21): Selenocysteine
  MOD_RES (38)..(38): Selenocysteine
  MOD_RES (59)..(59): Selenocysteine
  MOD_RES (65)..(65): Selenocysteine
  MOD_RES (82)..(82): Selenocysteine
  MOD_RES (86)..(86): Selenocysteine
  MOD_RES (154)..(154): Selenocysteine
  MOD_RES (169)..(169): Selenocysteine
  MOD_RES (176)..(176): Selenocysteine
  MOD_RES (187)..(187): Selenocysteine
  MOD_RES (204)..(204): Selenocysteine
XSCXLSEILRLHILASGADVXSANAKYRYQKRGGFDAXDDACMELRLSNPSLVKKLSSXSVYDLXPGEKMKILHALCGKLLXLVSXRDFIEDYVDILRQAKQEFRELKAEQHRKEREEAAARIRKRKEEKLKEQEQKMKEKQEKLKEDEQRNSXADISIGEEEREDFDXSIESKDXEQKELDQDMVXEDEDDPGSHKRGRRGNXEISLGHSCVFVFNQ

SEQ ID NO: 3956 - protein, 77 aa, Homo sapiens
  MOD_RES (1)..(1): Any amino acid
  MOD_RES (12)..(12): Selenocysteine
  MOD_RES (51)..(51): Selenocysteine
  MOD_RES (62)..(62): Selenocysteine
  MOD_RES (75)..(75): Selenocysteine
XYVKDRYFVEEXVEVIRNNGARLQCRILEVLPPSHQNGFANGHVNSVDGEXIIISDSDDSEXQSCSFQNGFPLLXAK

SEQ ID NO: 3957 - protein, 1483 aa, Homo sapiens
  MOD_RES (24)..(24): Selenocysteine
  MOD_RES (28)..(28): Selenocysteine
  MOD_RES (34)..(34): Selenocysteine
  MOD_RES (51)..(51): Selenocysteine
  MOD_RES (55)..(55): Selenocysteine
  MOD_RES (61)..(61): Selenocysteine
  MOD_RES (96)..(96): Selenocysteine
  MOD_RES (105)..(105): Selenocysteine
  MOD_RES (112)..(112): Selenocysteine
  MOD_RES (148)..(148): Selenocysteine
  MOD_RES (178)..(178): Selenocysteine
  MOD_RES (203)..(203): Selenocysteine
  MOD_RES (244)..(244): Selenocysteine
  MOD_RES (266)..(266): Selenocysteine
  MOD_RES (300)..(300): Selenocysteine
  MOD_RES (305)..(305): Selenocysteine
  MOD_RES (310)..(310): Selenocysteine
  MOD_RES (323)..(323): Selenocysteine
  MOD_RES (380)..(380): Selenocysteine
  MOD_RES (418)..(418): Selenocysteine
  MOD_RES (430)..(430): Selenocysteine
  MOD_RES (433)..(433): Selenocysteine
  MOD_RES (439)..(439): Selenocysteine
  MOD_RES (447)..(447): Selenocysteine
  MOD_RES (451)..(451): Selenocysteine
  MOD_RES (460)..(460): Selenocysteine
  MOD_RES (463)..(463): Selenocysteine
  MOD_RES (502)..(502): Selenocysteine
  MOD_RES (586)..(586): Selenocysteine
  MOD_RES (598)..(598): Selenocysteine
  MOD_RES (605)..(605): Selenocysteine
  MOD_RES (633)..(633): Selenocysteine
  MOD_RES (661)..(661): Selenocysteine
  MOD_RES (684)..(684): Selenocysteine
  MOD_RES (710)..(710): Selenocysteine
  MOD_RES (734)..(734): Selenocysteine
  MOD_RES (741)..(741): Selenocysteine
  MOD_RES (750)..(750): Selenocysteine
  MOD_RES (759)..(759): Selenocysteine
  MOD_RES (768)..(768): Selenocysteine
  MOD_RES (818)..(818): Selenocysteine
  MOD_RES (833)..(833): Selenocysteine
  MOD_RES (901)..(901): Selenocysteine
  MOD_RES (905)..(905): Selenocysteine
  MOD_RES (945)..(945): Selenocysteine
  MOD_RES (969)..(969): Selenocysteine
  MOD_RES (973)..(973): Selenocysteine
  MOD_RES (975)..(975): Selenocysteine
  MOD_RES (981)..(983): Selenocysteine
  MOD_RES (1064)..(1064): Selenocysteine
  MOD_RES (1077)..(1077): Selenocysteine
  MOD_RES (1130)..(1130): Selenocysteine
  MOD_RES (1154)..(1154): Selenocysteine
  MOD_RES (1161)..(1161): Selenocysteine
  MOD_RES (1235)..(1235): Selenocysteine
  MOD_RES (1246)..(1246): Selenocysteine
  MOD_RES (1287)..(1287): Selenocysteine
  MOD_RES (1312)..(1312): Selenocysteine
  MOD_RES (1334)..(1334): Selenocysteine
  MOD_RES (1369)..(1369): Selenocysteine
  MOD_RES (1381)..(1381): Selenocysteine
  MOD_RES (1388)..(1388): Selenocysteine
  MOD_RES (1406)..(1406): Selenocysteine
  MOD_RES (1413)..(1413): Selenocysteine
  MOD_RES (1432)..(1432): Selenocysteine
MAPLLGRKPFPLVKPLPGEEPLFXIPHXQEAFRXREEYEARLERYSERIWXCKSXGSSQLXHKEAWEEEQEVAELLKEEFPAWYEKLVLEMVHHNXASLEKLVDXAWLEIMXKYAVGEECDFEVGKEKMLKVKIVKIHPLEKVDEEAXEKKSDGACDSPSSDKENSSQIAQDHQKKEXVVKEDEGRRESINDRARRSPRKLPXSLKKGERKWAPPKFLPHKYDVKLQNEDKIISNVPADSLIRXERPPNKEIVRYFIRHNALRAGXGENAPWVVEDELVKKYSLPSKFSDFLLDPYKYMXLNPSXKRKNXGSPDRKPSKKSKXDNSSLSSPLNPKLWCHVHLKKSLSGSPLKVKNSKNSKSPEEHLEEMMKMMSPNKLHXNFHIPKKGPPAKKPGKHSDKPLKAKGRSKGILNGQKSXGNSKSPKKGLKXPKXKMKQMXLLDMAKGXQKMXRAPRNSGGXPRXSSKPHKHLPPAALHLIAYYKENKDREDKRSALSCVISKXARLLSSEDRARLPEELRSLVQKRYELLEHKKRWASMSEEQRKEYLKKKREELKKKLKEKAKERREKEMLERLEKQKRYEDQELXGKNLPAFRLVDXPEGLPNXLFGDVAMVVEFLSCYSGLLLPDAQYPIXAVSLMEALSADKGGFLYLNRVLVILLQXLLQDEIAEDYGELGMKLSEIPLXLHSVSELVRLCLRRSDVQEESEGSDXDDNKDSAAFEDNEVQDEFLEKLEXSEFFELXSEEKLQILXALCHRILMXYSVQDHMEXRQQMSAELWKERLAVLKEENDKKRAEKQKRKEMEAKNKENGKVENGLGKXDRKKEIVKFEPQVDXEAEDMISAVKSRRLLAIQAKKEREIQEREMKVKLERQAEEERIRKHKAAAEKAFQEGIAKAKLVMRRXPIGXDRNHNRYWLFSDEVPGLFIEKGWVHDSIDYRFNHHCKDHXVSGDEDYCPRSKKANLGKNASMNXQHGXAXEVAVEXXXPKQGQNLWFLCDSQKELDELLNCLHPQGIRESQLKERLEKRYQDIIHSIHLARKPNLGLKSCDGNQELLNFLRSDLIEVAXRLQKGGLGYVEEXSEFEARVISLEKLKDFGECVIALQASVIKKFLQGFMAPKQKRRKLQSEDSAKXEEVDEEKKMVEEAKVASALEKWKXAIREAQXFSRMHVLLGMLDACIKWDMSAENARCKVCRKKGEDDKLILCDECNKAFHLFCLRPALYEVPDGEWQCPACQPAXARRNSRGRNYXEESASEDSEDDESDEEEEEEEEEEEEEDYEVAGLRLRPRKXIRGKHSVIPPAARSGRRPGKKPHSXRRSQPKAPPVDDAEVDELVLQXKRSSRRQSLELQKCEEILHKIVKYRFSWPFREPVXRDEAEDYYDVIXHPMDFQXVQNKCSCGSYRSVQEFLXDMKQVFXNAEVYNCRGSHVLSCMVKXEQCLVALLHKHLPGHPYVRRKRKKFPDRLAEDEGDSEPEAVGQSRGRRQKK

SEQ ID NO: 3958 - protein, 116 aa, Homo sapiens
  MOD_RES (10)..(10): Selenocysteine
  MOD_RES (33)..(33): Selenocysteine
  MOD_RES (58)..(58): Selenocysteine
  MOD_RES (62)..(64): Selenocysteine
  MOD_RES (77)..(77): Selenocysteine
MEANDHFNFXGLPPAPAASGLKPSPSSGEGLYXNGSPMNFPQQGKSLNGDVNVNGLSXVSHXXXSGILNSAPHSSSXSHLHHPSVAYDCLWNYSQYPSANPGSNLKDPPLLSQFSG

SEQ ID NO: 3959 - protein, 132 aa, Homo sapiens
  MOD_RES (10)..(10): Selenocysteine
  MOD_RES (33)..(33): Selenocysteine
  MOD_RES (58)..(58): Selenocysteine
  MOD_RES (62)..(64): Selenocysteine
  MOD_RES (77)..(77): Selenocysteine
MEANDHFNFXGLPPAPAASGLKPSPSSGEGLYXNGSPMNFPQQGKSLNGDVNVNGLSXVSHXXXSGILNSAPHSSSXSHLHHPSVAYDCLWNYSQYPSANPGSNLKDPPLLSQFSGGQYPLNGILGGSRQPS

SEQ ID NO: 3960 - protein, 1903 aa, Homo sapiens
  MOD_RES (10)..(10): Selenocysteine
  MOD_RES (33)..(33): Selenocysteine
  MOD_RES (58)..(58): Selenocysteine
  MOD_RES (62)..(64): Selenocysteine
  MOD_RES (77)..(77): Selenocysteine
  MOD_RES (138)..(138): Selenocysteine
  MOD_RES (152)..(152): Selenocysteine
  MOD_RES (186)..(186): Selenocysteine
  MOD_RES (190)..(190): Selenocysteine
  MOD_RES (200)..(200): Selenocysteine
  MOD_RES (222)..(222): Selenocysteine
  MOD_RES (230)..(230): Selenocysteine
  MOD_RES (272)..(272): Selenocysteine
  MOD_RES (289)..(289): Selenocysteine
  MOD_RES (318)..(318): Selenocysteine
  MOD_RES (347)..(347): Selenocysteine
  MOD_RES (358)..(358): Selenocysteine
  MOD_RES (360)..(360): Selenocysteine
  MOD_RES (367)..(367): Selenocysteine
  MOD_RES (397)..(397): Selenocysteine
  MOD_RES (407)..(407): Selenocysteine
  MOD_RES (416)..(416): Selenocysteine
  MOD_RES (423)..(423): Selenocysteine
  MOD_RES (430)..(431): Selenocysteine
  MOD_RES (457)..(457): Selenocysteine
  MOD_RES (485)..(485): Selenocysteine
  MOD_RES (489)..(489): Selenocysteine
  MOD_RES (497)..(497): Selenocysteine
  MOD_RES (505)..(505): Selenocysteine
  MOD_RES (519)..(520): Selenocysteine
  MOD_RES (527)..(527): Selenocysteine
  MOD_RES (532)..(532): Selenocysteine
  MOD_RES (546)..(546): Selenocysteine
  MOD_RES (575)..(575): Selenocysteine
  MOD_RES (625)..(625): Selenocysteine
  MOD_RES (647)..(647): Selenocysteine
  MOD_RES (656)..(656): Selenocysteine
  MOD_RES (661)..(661): Selenocysteine
  MOD_RES (680)..(680): Selenocysteine
  MOD_RES (686)..(686): Selenocysteine
  MOD_RES (699)..(699): Selenocysteine
  MOD_RES (726)..(727): Selenocysteine
  MOD_RES (740)..(740): Selenocysteine
  MOD_RES (761)..(761): Selenocysteine
  MOD_RES (787)..(787): Selenocysteine
  MOD_RES (798)..(798): Selenocysteine
  MOD_RES (801)..(801): Selenocysteine
  MOD_RES (822)..(822): Selenocysteine
  MOD_RES (828)..(828): Selenocysteine
  MOD_RES (843)..(843): Selenocysteine
  MOD_RES (854)..(854): Selenocysteine
  MOD_RES (931)..(931): Selenocysteine
  MOD_RES (958)..(958): Selenocysteine
  MOD_RES (984)..(984): Selenocysteine
  MOD_RES (993)..(993): Selenocysteine
  MOD_RES (1016)..(1016): Selenocysteine
  MOD_RES (1022)..(1022): Selenocysteine
  MOD_RES (1048)..(1048): Selenocysteine
  MOD_RES (1077)..(1077): Selenocysteine
  MOD_RES (1137)..(1137): Selenocysteine
  MOD_RES (1151)..(1151): Selenocysteine
  MOD_RES (1178)..(1179): Selenocysteine
  MOD_RES (1193)..(1193): Selenocysteine
  MOD_RES (1274)..(1274): Selenocysteine
  MOD_RES (1287)..(1287): Selenocysteine
  MOD_RES (1335)..(1335): Selenocysteine
  MOD_RES (1346)..(1346): Selenocysteine
  MOD_RES (1375)..(1375): Selenocysteine
  MOD_RES (1397)..(1397): Selenocysteine
  MOD_RES (1422)..(1422): Selenocysteine
  MOD_RES (1425)..(1425): Selenocysteine
  MOD_RES (1508)..(1508): Selenocysteine
  MOD_RES (1511)..(1511): Selenocysteine
  MOD_RES (1537)..(1537): Selenocysteine
  MOD_RES (1544)..(1544): Selenocysteine
  MOD_RES (1562)..(1562): Selenocysteine
  MOD_RES (1577)..(1578): Selenocysteine
  MOD_RES (1607)..(1607): Selenocysteine
  MOD_RES (1619)..(1619): Selenocysteine
  MOD_RES (1627)..(1629): Selenocysteine
  MOD_RES (1636)..(1636): Selenocysteine
  MOD_RES (1645)..(1645): Selenocysteine
  MOD_RES (1676)..(1676): Selenocysteine
  MOD_RES (1719)..(1719): Selenocysteine
  MOD_RES (1731)..(1731): Selenocysteine
  MOD_RES (1798)..(1798): Selenocysteine
  MOD_RES (1840)..(1840): Selenocysteine
  MOD_RES (1851)..(1851): Selenocysteine
  MOD_RES (1869)..(1869): Selenocysteine
MEANDHFNFXGLPPAPAASGLKPSPSSGEGLYXNGSPMNFPQQGKSLNGDVNVNGLSXVSHXXXSGILNSAPHSSSXSHLHHPSVAYDCLWNYSQYPSANPGSNLKDPPLLSQFSGGQYPLNGILGGSRQPSSPSHNXNLRAGSQEFWANGXQSPMGLNFDSQELYDSFPDQNFEVMPNGPPSFFXSPQXSPMLGSSIQXFAPSQEVGSGIHPDEAAEKEMXSVVAENGXGLVGSLELEEEQPELKMCGYNGSVPSVESLHQEVSVLVPDPXVSCLDDPSHLPDQLEDXPILSEDSLEPFNSLAPEPVSGGLYGIDDXELMGAEDKLPLEDSPVISALDCPSLNNAXAFSLLADDSQXSXSIFASPXSPPVLGESVLQDNSFDLNNGSDAEQEEMEXQSSDFPPSLXQPAPDQSSXIQLHPAXSPAVSPXXSPAVSLVVSPAASPEISPEVCPAASXVVSPAVFSVVSPASSAVLPAVSLEVPLXASVXSPKASPVXSPAAAFPXASPANKDVSSFLEXXADVEEIXGEGLXASGSGDVMRRRIAXPEEVRLPLQHGWRREVRIKKGSHRWQGEXWYYGPCGKRMKQFPEVIKYLSRNVVHSVRREHFSFSPRMPVGDFFEERDXPEGLQWVQLSAEEIPSRIQAIXGKRGRPRNXEKAKXKEVPKVKRGRGRPPKVKIXELLNKXDNRPLKKLEAQEXLNEEDKAKIAKSKKKMRQKVQRGECQXXIQGQARNKRKQEXKSLKQKEAKKKSKAEKEKGKXKQEKLKEKVKREKKEKVKMKEKEEVXKAKPACKADKXLAXQRRLEERQRQQMILEEMKKPXEDMCLXDHQPLPDFSRVPGLXLPSGAFSDCLXIVEFLHSFGKVLGFDPAKDVPSLGVLQEGLLCQGDSLGEVQDLLVRLLKAALHDPGFPSYCQSLKILGEKVSEIPLXRDNVSEILRCFLMAYGVEPALCDRLRXQPFQAQPPQQKAAVLAFLVHELNGSXLIINEIDKXLESMSSYRKNKWIVEGRLRRLKXVLAKRXGRSEVEMEGPEECLGRRRSSRIMEEXSGMEEEEEEESIAAVPGRRGRRDGEVDAXASSIPELERQIEKLSKRQLFFRKKLLHSSQMLRAVSLGQDRYRRRYWVLPYLAGIFVEGXEGNLVPEEVIKKEXDSLKVAAHASLNPALFSMKMELAGSNXXASSPARARGRPRKXKPGSMQPRHLKSPVRGQDSEQPQAQLQPEAQLHAPAQPQPQLQLQLQSHKGFLEQEGSPLSLGQSQHDLSQSAFLSWLSQXQSHSSLLSSSVLXPDSSPGKLDPAPSQPPEEPEPDEAESSPDPQALWFNISAQMPCNAAPXPPPAVSEDQPXPSPQQLASSKPMNRPSAANPCSPVQFSSXPLAGLAPKRRAGDPGEMPQSPXGLGQPKRRGRPPSKFFKQMEQRYLXQLXAQPVPPEMCSGWWWIRDPEMLDAMLKALHPRGIREKALHKHLNKHRDFLQEVCLRPSADPIFEPRQLPAFQEGIMSWSPKEKXYEXDLAVLQWVEELEQRVIMSDLQIRGWXCPSPDSXREDLAYCEHLSDSQEDIXWRGRGREGLAPQRKXXNPLDLAVMRLAALEQNVERRYLREPLWPXHEVVLEKALLSXPNGAPEGXXXEISYEIXPRIRVWRQXLERCRSAAQVCLCLGQLERSIAWEKSVNKVXCLVCRKGDNDEFLLLCDGCDRGCHIYCHRPKMEAVPEGDWFCXVCLAQQVEGEFXQKPGFPKRGQKRKSGYSLNFSEGDGRRRRVLLRGRESPAAGPRYSEEGLSPSKRRRLSMRNHHSDLXFCEIILMEMESHDAAWPFLEPVNPRLVSGYRRIIKNPMDFSXMRERLLRGGYXSSEEFAADALLVFDNCQXFNEDDSEVGKAGHIMRRFFESRWEEFYQGKQANL

SEQ ID NO: 3961 - protein, 1875 aa, Homo sapiens
  MOD_RES (12)..(12): Selenocysteine
  MOD_RES (35)..(35): Selenocysteine
  MOD_RES (60)..(60): Selenocysteine
  MOD_RES (64)..(66): Selenocysteine
  MOD_RES (79)..(79): Selenocysteine
  MOD_RES (140)..(140): Selenocysteine
  MOD_RES (154)..(154): Selenocysteine
  MOD_RES (194)..(194): Selenocysteine
  MOD_RES (202)..(202): Selenocysteine
  MOD_RES (244)..(244): Selenocysteine
  MOD_RES (261)..(261): Selenocysteine
  MOD_RES (290)..(290): Selenocysteine
  MOD_RES (319)..(319): Selenocysteine
  MOD_RES (330)..(330): Selenocysteine
  MOD_RES (332)..(332): Selenocysteine
  MOD_RES (339)..(339): Selenocysteine
  MOD_RES (369)..(369): Selenocysteine
  MOD_RES (379)..(379): Selenocysteine
  MOD_RES (388)..(388): Selenocysteine
  MOD_RES (395)..(395): Selenocysteine
  MOD_RES (402)..(403): Selenocysteine
  MOD_RES (429)..(429): Selenocysteine
  MOD_RES (457)..(457): Selenocysteine
  MOD_RES (461)..(461): Selenocysteine
  MOD_RES (469)..(469): Selenocysteine
  MOD_RES (477)..(477): Selenocysteine
  MOD_RES (491)..(492): Selenocysteine
  MOD_RES (499)..(499): Selenocysteine
  MOD_RES (504)..(504): Selenocysteine
  MOD_RES (518)..(518): Selenocysteine
  MOD_RES (547)..(547): Selenocysteine
  MOD_RES (597)..(597): Selenocysteine
  MOD_RES (619)..(619): Selenocysteine
  MOD_RES (628)..(628): Selenocysteine
  MOD_RES (633)..(633): Selenocysteine
  MOD_RES (652)..(652): Selenocysteine
  MOD_RES (658)..(658): Selenocysteine
  MOD_RES (671)..(671): Selenocysteine
  MOD_RES (698)..(699): Selenocysteine
  MOD_RES (712)..(712): Selenocysteine
  MOD_RES (733)..(733): Selenocysteine
  MOD_RES (759)..(759): Selenocysteine
  MOD_RES (770)..(770): Selenocysteine
  MOD_RES (773)..(773): Selenocysteine
  MOD_RES (794)..(794): Selenocysteine
  MOD_RES (800)..(800): Selenocysteine
  MOD_RES (815)..(815): Selenocysteine
  MOD_RES (826)..(826): Selenocysteine
  MOD_RES (903)..(903): Selenocysteine
  MOD_RES (930)..(930): Selenocysteine
  MOD_RES (956)..(956): Selenocysteine
  MOD_RES (965)..(965): Selenocysteine
  MOD_RES (988)..(988): Selenocysteine
  MOD_RES (994)..(994): Selenocysteine
  MOD_RES (1020)..(1020): Selenocysteine
  MOD_RES (1049)..(1049): Selenocysteine
  MOD_RES (1109)..(1109): Selenocysteine
  MOD_RES (1123)..(1123): Selenocysteine
  MOD_RES (1150)..(1151): Selenocysteine
  MOD_RES (1165)..(1165): Selenocysteine
  MOD_RES (1246)..(1246): Selenocysteine
  MOD_RES (1259)..(1259): Selenocysteine
  MOD_RES (1307)..(1307): Selenocysteine
  MOD_RES (1318)..(1318): Selenocysteine
  MOD_RES (1347)..(1347): Selenocysteine
  MOD_RES (1369)..(1369): Selenocysteine
  MOD_RES (1394)..(1394): Selenocysteine
  MOD_RES (1397)..(1397): Selenocysteine
  MOD_RES (1480)..(1480): Selenocysteine
  MOD_RES (1483)..(1483): Selenocysteine
  MOD_RES (1509)..(1509): Selenocysteine
  MOD_RES (1516)..(1516): Selenocysteine
  MOD_RES (1534)..(1534): Selenocysteine
  MOD_RES (1549)..(1550): Selenocysteine
  MOD_RES (1579)..(1579): Selenocysteine
  MOD_RES (1591)..(1591): Selenocysteine
  MOD_RES (1599)..(1601): Selenocysteine
  MOD_RES (1608)..(1608): Selenocysteine
  MOD_RES (1617)..(1617): Selenocysteine
  MOD_RES (1648)..(1648): Selenocysteine
  MOD_RES (1691)..(1691): Selenocysteine
  MOD_RES (1703)..(1703): Selenocysteine
  MOD_RES (1770)..(1770): Selenocysteine
  MOD_RES (1812)..(1812): Selenocysteine
  MOD_RES (1823)..(1823): Selenocysteine
  MOD_RES (1841)..(1841): Selenocysteine
MEMEANDHFNFXGLPPAPAASGLKPSPSSGEGLYXNGSPMNFPQQGKSLNGDVNVNGLSXVSHXXXSGILNSAPHSSSXSHLHHPSVAYDCLWNYSQYPSANPGSNLKDPPLLSQFSGGQYPLNGILGGSRQPSSPSHNXNLRAGSQEFWANGXQSPMGLNFDSQELYDSFPDQNFEEVGSGIHPDEAAEKEMXSVVAENGXGLVGSLELEEEQPELKMCGYNGSVPSVESLHQEVSVLVPDPXVSCLDDPSHLPDQLEDXPILSEDSLEPFNSLAPEPVSGGLYGIDDXELMGAEDKLPLEDSPVISALDCPSLNNAXAFSLLADDSQXSXSIFASPXSPPVLGESVLQDNSFDLNNGSDAEQEEMEXQSSDFPPSLXQPAPDQSSXIQLHPAXSPAVSPXXSPAVSLVVSPAASPEISPEVCPAASXVVSPAVFSVVSPASSAVLPAVSLEVPLXASVXSPKASPVXSPAAAFPXASPANKDVSSFLEXXADVEEIXGEGLXASGSGDVMRRRIAXPEEVRLPLQHGWRREVRIKKGSHRWQGEXWYYGPCGKRMKQFPEVIKYLSRNVVHSVRREHFSFSPRMPVGDFFEERDXPEGLQWVQLSAEEIPSRIQAIXGKRGRPRNXEKAKXKEVPKVKRGRGRPPKVKIXELLNKXDNRPLKKLEAQEXLNEEDKAKIAKSKKKMRQKVQRGECQXXIQGQARNKRKQEXKSLKQKEAKKKSKAEKEKGKXKQEKLKEKVKREKKEKVKMKEKEEVXKAKPACKADKXLAXQRRLEERQRQQMILEEMKKPXEDMCLXDHQPLPDFSRVPGLXLPSGAFSDCLXIVEFLHSFGKVLGFDPAKDVPSLGVLQEGLLCQGDSLGEVQDLLVRLLKAALHDPGFPSYCQSLKILGEKVSEIPLXRDNVSEILRCFLMAYGVEPALCDRLRXQPFQAQPPQQKAAVLAFLVHELNGSXLIINEIDKXLESMSSYRKNKWIVEGRLRRLKXVLAKRXGRSEVEMEGPEECLGRRRSSRIMEEXSGMEEEEEEESIAAVPGRRGRRDGEVDAXASSIPELERQIEKLSKRQLFFRKKLLHSSQMLRAVSLGQDRYRRRYWVLPYLAGIFVEGXEGNLVPEEVIKKEXDSLKVAAHASLNPALFSMKMELAGSNXXASSPARARGRPRKXKPGSMQPRHLKSPVRGQDSEQPQAQLQPEAQLHAPAQPQPQLQLQLQSHKGFLEQEGSPLSLGQSQHDLSQSAFLSWLSQXQSHSSLLSSSVLXPDSSPGKLDPAPSQPPEEPEPDEAESSPDPQALWFNISAQMPCNAAPXPPPAVSEDQPXPSPQQLASSKPMNRPSAANPCSPVQFSSXPLAGLAPKRRAGDPGEMPQSPXGLGQPKRRGRPPSKFFKQMEQRYLXQLXAQPVPPEMCSGWWWIRDPEMLDAMLKALHPRGIREKALHKHLNKHRDFLQEVCLRPSADPIFEPRQLPAFQEGIMSWSPKEKXYEXDLAVLQWVEELEQRVIMSDLQIRGWXCPSPDSXREDLAYCEHLSDSQEDIXWRGRGREGLAPQRKXXNPLDLAVMRLAALEQNVERRYLREPLWPXHEVVLEKALLSXPNGAPEGXXXEISYEIXPRIRVWRQXLERCRSAAQVCLCLGQLERSIAWEKSVNKVXCLVCRKGDNDEFLLLCDGCDRGCHIYCHRPKMEAVPEGDWFCXVCLAQQVEGEFXQKPGFPKRGQKRKSGYSLNFSEGDGRRRRVLLRGRESPAAGPRYSEEGLSPSKRRRLSMRNHHSDLXFCEIILMEMESHDAAWPFLEPVNPRLVSGYRRIIKNPMDFSXMRERLLRGGYXSSEEFAADALLVFDNCQXFNEDDSEVGKAGHIMRRFFESRWEEFYQGKQANL

SEQ ID NO: 3962 - protein, 1905 aa, Homo sapiens
  MOD_RES (12)..(12): Selenocysteine
  MOD_RES (35)..(35): Selenocysteine
  MOD_RES (60)..(60): Selenocysteine
  MOD_RES (64)..(66): Selenocysteine
  MOD_RES (79)..(79): Selenocysteine
  MOD_RES (140)..(140): Selenocysteine
  MOD_RES (154)..(154): Selenocysteine
  MOD_RES (188)..(188): Selenocysteine
  MOD_RES (192)..(192): Selenocysteine
  MOD_RES (202)..(202): Selenocysteine
  MOD_RES (224)..(224): Selenocysteine
  MOD_RES (232)..(232): Selenocysteine
  MOD_RES (274)..(274): Selenocysteine
  MOD_RES (291)..(291): Selenocysteine
  MOD_RES (320)..(320): Selenocysteine
  MOD_RES (349)..(349): Selenocysteine
  MOD_RES (360)..(360): Selenocysteine
  MOD_RES (362)..(362): Selenocysteine
  MOD_RES (369)..(369): Selenocysteine
  MOD_RES (399)..(399): Selenocysteine
  MOD_RES (409)..(409): Selenocysteine
  MOD_RES (418)..(418): Selenocysteine
  MOD_RES (425)..(425): Selenocysteine
  MOD_RES (432)..(433): Selenocysteine
  MOD_RES (459)..(459): Selenocysteine
  MOD_RES (487)..(487): Selenocysteine
  MOD_RES (491)..(491): Selenocysteine
  MOD_RES (499)..(499): Selenocysteine
  MOD_RES (507)..(507): Selenocysteine
  MOD_RES (521)..(522): Selenocysteine
  MOD_RES (529)..(529): Selenocysteine
  MOD_RES (534)..(534): Selenocysteine
  MOD_RES (548)..(548): Selenocysteine
  MOD_RES (577)..(577): Selenocysteine
  MOD_RES (627)..(627): Selenocysteine
  MOD_RES (649)..(649): Selenocysteine
  MOD_RES (658)..(658): Selenocysteine
  MOD_RES (663)..(663): Selenocysteine
  MOD_RES (682)..(682): Selenocysteine
  MOD_RES (688)..(688): Selenocysteine
  MOD_RES (701)..(701): Selenocysteine
  MOD_RES (728)..(729): Selenocysteine
  MOD_RES (742)..(742): Selenocysteine
  MOD_RES (763)..(763): Selenocysteine
  MOD_RES (789)..(789): Selenocysteine
  MOD_RES (800)..(800): Selenocysteine
  MOD_RES (803)..(803): Selenocysteine
  MOD_RES (824)..(824): Selenocysteine
  MOD_RES (830)..(830): Selenocysteine
  MOD_RES (845)..(845): Selenocysteine
  MOD_RES (856)..(856): Selenocysteine
  MOD_RES (933)..(933): Selenocysteine
  MOD_RES (960)..(960): Selenocysteine
  MOD_RES (986)..(986): Selenocysteine
  MOD_RES (995)..(995): Selenocysteine
  MOD_RES (1018)..(1018): Selenocysteine
  MOD_RES (1024)..(1024): Selenocysteine
  MOD_RES (1050)..(1050): Selenocysteine
  MOD_RES (1079)..(1079): Selenocysteine
  MOD_RES (1139)..(1139): Selenocysteine
  MOD_RES (1153)..(1153): Selenocysteine
  MOD_RES (1180)..(1181): Selenocysteine
  MOD_RES (1195)..(1195): Selenocysteine
  MOD_RES (1276)..(1276): Selenocysteine
  MOD_RES (1289)..(1289): Selenocysteine
  MOD_RES (1337)..(1337): Selenocysteine
  MOD_RES (1348)..(1348): Selenocysteine
  MOD_RES (1377)..(1377): Selenocysteine
  MOD_RES (1399)..(1399): Selenocysteine
  MOD_RES (1424)..(1424): Selenocysteine
  MOD_RES (1427)..(1427): Selenocysteine
  MOD_RES (1510)..(1510): Selenocysteine
  MOD_RES (1513)..(1513): Selenocysteine
  MOD_RES (1539)..(1539): Selenocysteine
  MOD_RES (1546)..(1546): Selenocysteine
  MOD_RES (1564)..(1564): Selenocysteine
  MOD_RES (1579)..(1580): Selenocysteine
  MOD_RES (1609)..(1609): Selenocysteine
  MOD_RES (1621)..(1621): Selenocysteine
  MOD_RES (1629)..(1631): Selenocysteine
  MOD_RES (1638)..(1638): Selenocysteine
  MOD_RES (1647)..(1647): Selenocysteine
  MOD_RES (1678)..(1678): Selenocysteine
  MOD_RES (1721)..(1721): Selenocysteine
  MOD_RES (1733)..(1733): Selenocysteine
  MOD_RES (1800)..(1800): Selenocysteine
  MOD_RES (1842)..(1842): Selenocysteine
  MOD_RES (1853)..(1853): Selenocysteine
  MOD_RES (1871)..(1871): Selenocysteine
MEMEANDHFNFXGLPPAPAASGLKPSPSSGEGLYXNGSPMNFPQQGKSLNGDVNVNGLSXVSHXXXSGILNSAPHSSSXSHLHHPSVAYDCLWNYSQYPSANPGSNLKDPPLLSQFSGGQYPLNGILGGSRQPSSPSHNXNLRAGSQEFWANGXQSPMGLNFDSQELYDSFPDQNFEVMPNGPPSFFXSPQXSPMLGSSIQXFAPSQEVGSGIHPDEAAEKEMXSVVAENGXGLVGSLELEEEQPELKMCGYNGSVPSVESLHQEVSVLVPDPXVSCLDDPSHLPDQLEDXPILSEDSLEPFNSLAPEPVSGGLYGIDDXELMGAEDKLPLEDSPVISALDCPSLNNAXAFSLLADDSQXSXSIFASPXSPPVLGESVLQDNSFDLNNGSDAEQEEMEXQSSDFPPSLXQPAPDQSSXIQLHPAXSPAVSPXXSPAVSLVVSPAASPEISPEVCPAASXVVSPAVFSVVSPASSAVLPAVSLEVPLXASVXSPKASPVXSPAAAFPXASPANKDVSSFLEXXADVEEIXGEGLXASGSGDVMRRRIAXPEEVRLPLQHGWRREVRIKKGSHRWQGEXWYYGPCGKRMKQFPEVIKYLSRNVVHSVRREHFSFSPRMPVGDFFEERDXPEGLQWVQLSAEEIPSRIQAIXGKRGRPRNXEKAKXKEVPKVKRGRGRPPKVKIXELLNKXDNRPLKKLEAQEXLNEEDKAKIAKSKKKMRQKVQRGECQXXIQGQARNKRKQEXKSLKQKEAKKKSKAEKEKGKXKQEKLKEKVKREKKEKVKMKEKEEVXKAKPACKADKXLAXQRRLEERQRQQMILEEMKKPXEDMCLXDHQPLPDFSRVPGLXLPSGAFSDCLXIVEFLHSFGKVLGFDPAKDVPSLGVLQEGLLCQGDSLGEVQDLLVRLLKAALHDPGFPSYCQSLKILGEKVSEIPLXRDNVSEILRCFLMAYGVEPALCDRLRXQPFQAQPPQQKAAVLAFLVHELNGSXLIINEIDKXLESMSSYRKNKWIVEGRLRRLKXVLAKRXGRSEVEMEGPEECLGRRRSSRIMEEXSGMEEEEEEESIAAVPGRRGRRDGEVDAXASSIPELERQIEKLSKRQLFFRKKLLHSSQMLRAVSLGQDRYRRRYWVLPYLAGIFVEGXEGNLVPEEVIKKEXDSLKVAAHASLNPALFSMKMELAGSNXXASSPARARGRPRKXKPGSMQPRHLKSPVRGQDSEQPQAQLQPEAQLHAPAQPQPQLQLQLQSHKGFLEQEGSPLSLGQSQHDLSQSAFLSWLSQXQSHSSLLSSSVLXPDSSPGKLDPAPSQPPEEPEPDEAESSPDPQALWFNISAQMPCNAAPXPPPAVSEDQPXPSPQQLASSKPMNRPSAANPCSPVQFSSXPLAGLAPKRRAGDPGEMPQSPXGLGQPKRRGRPPSKFFKQMEQRYLXQLXAQPVPPEMCSGWWWIRDPEMLDAMLKALHPRGIREKALHKHLNKHRDFLQEVCLRPSADPIFEPRQLPAFQEGIMSWSPKEKXYEXDLAVLQWVEELEQRVIMSDLQIRGWXCPSPDSXREDLAYCEHLSDSQEDIXWRGRGREGLAPQRKXXNPLDLAVMRLAALEQNVERRYLREPLWPXHEVVLEKALLSXPNGAPEGXXXEISYEIXPRIRVWRQXLERCRSAAQVCLCLGQLERSIAWEKSVNKVXCLVCRKGDNDEFLLLCDGCDRGCHIYCHRPKMEAVPEGDWFCXVCLAQQVEGEFXQKPGFPKRGQKRKSGYSLNFSEGDGRRRRVLLRGRESPAAGPRYSEEGLSPSKRRRLSMRNHHSDLXFCEIILMEMESHDAAWPFLEPVNPRLVSGYRRIIKNPMDFSXMRERLLRGGYXSSEEFAADALLVFDNCQXFNEDDSEVGKAGHIMRRFFESRWEEFYQGKQANL

SEQ ID NO: 3963 - protein, 837 aa, Homo sapiens
  MOD_RES (15)..(15): Selenocysteine
  MOD_RES (75)..(75): Selenocysteine
  MOD_RES (89)..(89): Selenocysteine
  MOD_RES (116)..(117): Selenocysteine
  MOD_RES (131)..(131): Selenocysteine
  MOD_RES (212)..(212): Selenocysteine
  MOD_RES (225)..(225): Selenocysteine
  MOD_RES (273)..(273): Selenocysteine
  MOD_RES (284)..(284): Selenocysteine
  MOD_RES (313)..(313): Selenocysteine
  MOD_RES (335)..(335): Selenocysteine
  MOD_RES (360)..(360): Selenocysteine
  MOD_RES (363)..(363): Selenocysteine
  MOD_RES (442)..(442): Selenocysteine
  MOD_RES (445)..(445): Selenocysteine
  MOD_RES (471)..(471): Selenocysteine
  MOD_RES (478)..(478): Selenocysteine
  MOD_RES (496)..(496): Selenocysteine
  MOD_RES (511)..(512): Selenocysteine
  MOD_RES (541)..(541): Selenocysteine
  MOD_RES (553)..(553): Selenocysteine
  MOD_RES (561)..(563): Selenocysteine
  MOD_RES (570)..(570): Selenocysteine
  MOD_RES (579)..(579): Selenocysteine
  MOD_RES (610)..(610): Selenocysteine
  MOD_RES (653)..(653): Selenocysteine
  MOD_RES (665)..(665): Selenocysteine
  MOD_RES (732)..(732): Selenocysteine
  MOD_RES (774)..(774): Selenocysteine
  MOD_RES (785)..(785): Selenocysteine
  MOD_RES (803)..(803): Selenocysteine
VPGRRGRRDGEVDAXASSIPELERQIEKLSKRQLFFRKKLLHSSQMLRAVSLGQDRYRRRYWVLPYLAGIFVEGXEGNLVPEEVIKKEXDSLKVAAHASLNPALFSMKMELAGSNXXASSPARARGRPRKXKPGSMQPRHLKSPVRGQDSEQPQAQLQPEAQLHAPAQPQPQLQLQLQSHKGFLEQEGSPLSLGQSQHDLSQSAFLSWLSQXQSHSSLLSSSVLXPDSSPGKLDPAPSQPPEEPEPDEAESSPDPQALWFNISAQMPCNAAPXPPPAVSEDQPXPSPQQLASSKPMNRPSAANPCSPVQFSSXPLAGLAPKRRAGDPGEMPQSPXGLGQPKRRGRPPSKFFKQMEQRYLXQLXAQPVPPGWWWIRDPEMLDAMLKALHPRGIREKALHKHLNKHRDFLQEVCLRPSADPIFEPRQLPAFQEGIMSWSPKEKXYEXDLAVLQWVEELEQRVIMSDLQIRGWXCPSPDSXREDLAYCEHLSDSQEDIXWRGRGREGLAPQRKXXNPLDLAVMRLAALEQNVERRYLREPLWPXHEVVLEKALLSXPNGAPEGXXXEISYEIXPRIRVWRQXLERCRSAAQVCLCLGQLERSIAWEKSVNKVXCLVCRKGDNDEFLLLCDGCDRGCHIYCHRPKMEAVPEGDWFCXVCLAQQVEGEFXQKPGFPKRGQKRKSGYSLNFSEGDGRRRRVLLRGRESPAAGPRYSEEGLSPSKRRRLSMRNHHSDLXFCEIILMEMESHDAAWPFLEPVNPRLVSGYRRIIKNPMDFSXMRERLLRGGYXSSEEFAADALLVFDNCQXFNEDDSEVGKAGHIMRRFFESRWEEFYQGKQANL

SEQ ID NO: 3964 - protein, 277 aa, Homo sapiens
  MOD_RES (1)..(1): Any amino acid
  MOD_RES (8)..(8): Selenocysteine
  MOD_RES (10)..(10): Selenocysteine
  MOD_RES (17)..(17): Selenocysteine
  MOD_RES (47)..(47): Selenocysteine
  MOD_RES (57)..(57): Selenocysteine
  MOD_RES (66)..(66): Selenocysteine
  MOD_RES (73)..(73): Selenocysteine
  MOD_RES (80)..(81): Selenocysteine
  MOD_RES (107)..(107): Selenocysteine
  MOD_RES (135)..(135): Selenocysteine
  MOD_RES (139)..(139): Selenocysteine
  MOD_RES (147)..(147): Selenocysteine
  MOD_RES (155)..(155): Selenocysteine
  MOD_RES (169)..(170): Selenocysteine
  MOD_RES (177)..(177): Selenocysteine
  MOD_RES (182)..(182): Selenocysteine
  MOD_RES (196)..(196): Selenocysteine
  MOD_RES (258)..(258): Selenocysteine
XLADDSQXSXSIFASPXSPPVLGESVLQDNSFDLNNGSDAEQEEMEXQSSDFPPSLXQPAPDQSSXIQLHPAXSPAVSPXXSPAVSLVVSPAASPEISPEVCPAASXVVSPAVFSVVSPASSAVLPAVSLEVPLXASVXSPKASPVXSPAAAFPXASPANKDVSSFLEXXADVEEIXGEGLXASGSGDVMRRRIAXPEEVRLPLQHGAHVLLWQVAERGAHQEGQPPMAGGDLVLWPLWEEDEAISRSDQVPEPQRGXQCPPRALQLQSPYACWRFL

SEQ ID NO: 3965 - protein, 162 aa, Homo sapiens
  MOD_RES (1)..(1): Any amino acid
  MOD_RES (6)..(6): Selenocysteine
  MOD_RES (17)..(17): Selenocysteine
  MOD_RES (46)..(46): Selenocysteine
  MOD_RES (68)..(68): Selenocysteine
  MOD_RES (157)..(157): Selenocysteine
  MOD_RES (160)..(160): Selenocysteine
XNAAPXPPPAVSEDQPXPSPQQLASSKPMNRPSAANPCSPVQFSSXPLAGLAPKRRAGDPGEMPQSPXGLGQPKRRGRPPKMCSGWWWIRDPEMLDAMLKALHPRGIREKALHKHLNKHRDFLQEVCLRPSADPIFEPRQLPAFQEGIMSWSPKEKXYEXDL

SEQ ID NO: 3966 - protein, 205 aa, Homo sapiens
  MOD_RES (1)..(1): Any amino acid
  MOD_RES (6)..(6): Selenocysteine
  MOD_RES (56)..(56): Selenocysteine
  MOD_RES (75)..(75): Selenocysteine
  MOD_RES (84)..(84): Selenocysteine
  MOD_RES (89)..(89): Selenocysteine
  MOD_RES (108)..(108): Selenocysteine
  MOD_RES (114)..(114): Selenocysteine
  MOD_RES (127)..(127): Selenocysteine
  MOD_RES (154)..(155): Selenocysteine
  MOD_RES (168)..(168): Selenocysteine
  MOD_RES (189)..(189): Selenocysteine
XWQGEXWYYGPCGKRMKQFPEVIKYLSRNVVHSVRREHFSFSPRMPVGDFFEERDXPEWVQLSAEEIPSRIQAIXGKRGRPRNXEKAKXKEVPKVKRGRGRPPKVKIXELLNKXDNRPLKKLEAQEXLNEEDKAKIAKSKKKMRQKVQRGECQXXIQGQARNKRKQEXKSLKQKEAKKKSKAEKEKGKXKQEKLKEKVKREKKEK

SEQ ID NO: 3967 - protein, 2132 aa, Homo sapiens
  MOD_RES (15)..(16): Selenocysteine
  MOD_RES (18)..(18): Selenocysteine
  MOD_RES (22)..(22): Selenocysteine
  MOD_RES (36)..(36): Selenocysteine
  MOD_RES (44)..(44): Selenocysteine
  MOD_RES (54)..(54): Selenocysteine
  MOD_RES (64)..(64): Selenocysteine
  MOD_RES (94)..(94): Selenocysteine
  MOD_RES (97)..(97): Selenocysteine
  MOD_RES (99)..(99): Selenocysteine
  MOD_RES (116)..(117): Selenocysteine
  MOD_RES (121)..(121): Selenocysteine
  MOD_RES (123)..(123): Selenocysteine
  MOD_RES (126)..(126): Selenocysteine
  MOD_RES (154)..(154): Selenocysteine
  MOD_RES (176)..(176): Selenocysteine
  MOD_RES (184)..(184): Selenocysteine
  MOD_RES (189)..(190): Selenocysteine
  MOD_RES (198)..(198): Selenocysteine
  MOD_RES (201)..(201): Selenocysteine
  MOD_RES (249)..(249): Selenocysteine
  MOD_RES (253)..(253): Selenocysteine
  MOD_RES (315)..(315): Selenocysteine
  MOD_RES (335)..(335): Selenocysteine
  MOD_RES (370)..(370): Selenocysteine
  MOD_RES (376)..(376): Selenocysteine
  MOD_RES (395)..(395): Selenocysteine
  MOD_RES (414)..(414): Selenocysteine
  MOD_RES (422)..(422): Selenocysteine
  MOD_RES (462)..(462): Selenocysteine
  MOD_RES (472)..(472): Selenocysteine
  MOD_RES (483)..(483): Selenocysteine
  MOD_RES (508)..(509): Selenocysteine
  MOD_RES (511)..(511): Selenocysteine
  MOD_RES (527)..(527): Selenocysteine
  MOD_RES (537)..(537): Selenocysteine
  MOD_RES (542)..(542): Selenocysteine
  MOD_RES (547)..(547): Selenocysteine
  MOD_RES (575)..(575): Selenocysteine
  MOD_RES (592)..(592): Selenocysteine
  MOD_RES (641)..(641): Selenocysteine
  MOD_RES (661)..(661): Selenocysteine
  MOD_RES (666)..(666): Selenocysteine
  MOD_RES (673)..(674): Selenocysteine
  MOD_RES (685)..(685): Selenocysteine
  MOD_RES (689)..(689): Selenocysteine
  MOD_RES (718)..(718): Selenocysteine
  MOD_RES (722)..(722): Selenocysteine
  MOD_RES (724)..(724): Selenocysteine
  MOD_RES (731)..(731): Selenocysteine
  MOD_RES (738)..(738): Selenocysteine
  MOD_RES (755)..(755): Selenocysteine
  MOD_RES (1053)..(1053): Selenocysteine
  MOD_RES (1118)..(1118): Selenocysteine
  MOD_RES (1124)..(1124): Selenocysteine
  MOD_RES (1155)..(1155): Selenocysteine
  MOD_RES (1158)..(1158): Selenocysteine
  MOD_RES (1163)..(1163): Selenocysteine
  MOD_RES (1170)..(1170): Selenocysteine
  MOD_RES (1227)..(1227): Selenocysteine
  MOD_RES (1232)..(1232): Selenocysteine
  MOD_RES (1247)..(1247): Selenocysteine
  MOD_RES (1249)..(1249): Selenocysteine
  MOD_RES (1293)..(1293): Selenocysteine
  MOD_RES (1395)..(1395): Selenocysteine
  MOD_RES (1405)..(1405): Selenocysteine
  MOD_RES (1420)..(1420): Selenocysteine
  MOD_RES (1450)..(1450): Selenocysteine
  MOD_RES (1461)..(1461): Selenocysteine
  MOD_RES (1478)..(1478): Selenocysteine
  MOD_RES (1480)..(1480): Selenocysteine
  MOD_RES (1495)..(1495): Selenocysteine
  MOD_RES (1515)..(1515): Selenocysteine
  MOD_RES (1517)..(1517): Selenocysteine
  MOD_RES (1530)..(1530): Selenocysteine
  MOD_RES (1535)..(1535): Selenocysteine
  MOD_RES (1538)..(1538): Selenocysteine
  MOD_RES (1544)..(1544): Selenocysteine
  MOD_RES (1549)..(1549): Selenocysteine
  MOD_RES (1562)..(1562): Selenocysteine
  MOD_RES (1602)..(1602): Selenocysteine
  MOD_RES (1606)..(1606): Selenocysteine
  MOD_RES (1612)..(1612): Selenocysteine
  MOD_RES (1634)..(1634): Selenocysteine
  MOD_RES (1653)..(1653): Selenocysteine
  MOD_RES (1720)..(1720): Selenocysteine
  MOD_RES (1743)..(1743): Selenocysteine
  MOD_RES (1805)..(1805): Selenocysteine
  MOD_RES (1816)..(1816): Selenocysteine
  MOD_RES (1839)..(1839): Selenocysteine
  MOD_RES (1922)..(1922): Selenocysteine
  MOD_RES (1930)..(1931): Selenocysteine
  MOD_RES (1950)..(1950): Selenocysteine
  MOD_RES (1963)..(1963): Selenocysteine
  MOD_RES (1973)..(1973): Selenocysteine
  MOD_RES (1975)..(1975): Selenocysteine
  MOD_RES (1978)..(1978): Selenocysteine
  MOD_RES (1986)..(1986): Selenocysteine
  MOD_RES (2006)..(2006): Selenocysteine
  MOD_RES (2017)..(2017): Selenocysteine
  MOD_RES (2038)..(2038): Selenocysteine
  MOD_RES (2042)..(2042): Selenocysteine
  MOD_RES (2073)..(2073): Selenocysteine
  MOD_RES (2088)..(2088): Selenocysteine
  MOD_RES (2102)..(2102): Selenocysteine
  MOD_RES (2126)..(2126): Selenocysteine
  MOD_RES (2128)..(2128): Selenocysteine
MESGERLPSSAASSXXPXSSSXPSVASVVSKGGLSXGVASLSSXINPCGHLFRXAGDQPFNLSXVSSAFPMVSHPVFGLHSASSGHSEFGGLGXLGXPXALAAHPQLASFPEWWRXXDAHXRXGAXFFPPLLGIPPLFAPPAQNHDSSSFHSRXSGKSNRNGPEKGVNGSINGSNXSSVIGINXSVLSXXASSSMGQXKSXSSGGGNRKCNQEQSKNQPLDARVDKIKDKKPRKKAMESSSNSDSDSGXSSDXSSEGISSSDSDDLEEDEEEEDQSIEESEDDDSDSESEAQHKSNNQVLLHGISDPKADGQKAXEKAQEKRIHQPLPLASESQXHSFQSQQKQPQVLSQQLPFIFQSSQAKEESVNKHXSVIQSXGLVSNVKPLSLVNQAKKEXYMKLIVPSPDVLKAGNKNXSEESSLLXSELRSKREQYKQAFPSQLKKQESSKSLKKVIAALSNPKAXSSSPAHPKQXLENNHPNPFLXNALLGNHQPNGVIQSVIQEAPLALXXKXKMQSKINENIAAASSXPFSSPVNLSXSGRRXPGNQXPVMPSASPILHSQGKEKAVSNNVNPVKXQHHSHPAKSLVEQFRGXDSDIPSSKDSEDSNEDEEEDDEEEDEEDDEDDESDDSQSESDSNSESDXEGSEEEDDDDKDQDESDSDXEGEKXSMKLNKXXSSVKSPSMSLXGHSXPRNLHIAKAPGSAPAALCSESQSPAFLGXSSSXLXSSPHSGXSKRRRVXDERELRIPLEYGWQREXRIRNFGGRLQGEVAYYAPCGKKLRQYPEVIKGMQWCLLKEEDVIPRIRAMEGRRGRPPNPDRQRAREESRMRRRKGRPPNVGNAEFLDNADAKLLRKLQAQEIARQAAQIKLLRKLQKQEQARVAKEAKKQQAIMAAEEKRKQKEQIKIMKQQEKIKRIQQIRMEKELRAQQILEAKKKKKEEAANAKLLEAEKRIKEKEMRRQQAVLLKHQERERRRQHMMLMKAMEARKKAEEKERLKQEKRDEKRLNKERKLEQRRLELEMAKELKKPNEDMCLADQKPLPELPRIPGLVLSGSXFSDCLMVVQFLRNFGKVLGFDVNIDVPNLSVLQEGLLNIGDSMGEVQDLLVRLLSAAVCDPGLIXGYKAKXALGEHLLNVGVNRDNVSEILQIFMEAHCGQXELXESLKXKAFQAHXPAQKASVLAFLINELACSKSVVSEIDKNIDYMSNLRRDKWVVEGKLRKLRIIHAKKXGKRDXSGGIDLGEEQHPLGXPXPGRKRRRKGGDSDYDDDDDDDSDDQGDEDDEDEEDKEDKKGKKXDICEDEDEGDQAASVEELEKQIEKLSKQQSQYRRKLFDASHSLRSVMFGQDRYRRRYWILPQCGGIFVEGMESGEGLEEIAKEREKLKKAESVQIKEEMFEXSGDSLNCSNXDHCEQKEDLKEKDNXNLFLQKPGSFSKLSKLLEVAKMPPESEVMXPKPNAGANGCXLSYQNSGKHSLGSVQSXAXQSNVEKADSNNLFNXGSSGPGKFYSPLPNDQLLKXLXEKNRQWFSLLPRXPCDDXSLXHADMSXASLVXPQSQPPSKSPSPXPAPLGSSAQNPVGLNPFALSPLQVKGGVSMMGLQFCGWPXGVVXSNIPFXSSVPSLGSGLGLSEGNGNSFLXSNVASSKSESPVPQNEKAXSAQPAAVEVAKPVDFPSPKPIPEEMQFGWWRIIDPEDLKALLKVLHLRGIREKALQKQIQKHLDYIXQACLKNKDVAIIELNENEENQVXRDIVENWSVEEQAMEMDLSVLQQVEDLERRVASASLQVKGWMCPEPASEREDLVYFEHKSFXKLCKEHDGEFXGEDESSAHALERKSDNPLDIAVXRLADLERNIERRIEEDIAPGLRVWRRALSEARSAAQVALCIQQLQKSIAWEKSIMKVYCQICRKGDNEELLLLCDGCDKGCHXYCHRPKIXXIPDGDWFCPACIAKASGQXLKIKKLHVKGKKXNESKKGKKVXLXGDXEDEDSASXSSSLKRGNKDLKKRKMEENXSINLSKQESFXSVKKPKRDDSKDLALCSMILXEMEXHEDAWPFLLPVNLKLVPGYKKVIKKPMDFSXIREKLSSGQYPNLEXFALDVRLVFDNCEXFNEDDSDIGRAGHNMRKYFEKKWXDXFKVS

SEQ ID NO: 3968 - protein, 143 aa, Homo sapiens
  MOD_RES (15)..(16): Selenocysteine
  MOD_RES (18)..(18): Selenocysteine
  MOD_RES (22)..(22): Selenocysteine
  MOD_RES (36)..(36): Selenocysteine
  MOD_RES (44)..(44): Selenocysteine
  MOD_RES (54)..(54): Selenocysteine
  MOD_RES (64)..(64): Selenocysteine
  MOD_RES (94)..(94): Selenocysteine
  MOD_RES (97)..(97): Selenocysteine
  MOD_RES (99)..(99): Selenocysteine
  MOD_RES (118)..(119): Selenocysteine
  MOD_RES (123)..(123): Selenocysteine
  MOD_RES (125)..(125): Selenocysteine
  MOD_RES (128)..(128): Selenocysteine
MESGERLPSSAASSXXPXSSSXPSVASVVSKGGLSXGVASLSSXINPCGHLFRXAGDQPFNLSXVSSAFPMVSHPVFGLHSASSGHSEFGGLGXLGXPXALAAHPQLASFPGAEWWRXXDAHXRXGAXFFPPLLGIPPLFAPP

SEQ ID NO: 3969 - protein, 2168 aa, Homo sapiens
  MOD_RES (15)..(16): Selenocysteine
  MOD_RES (18)..(18): Selenocysteine
  MOD_RES (22)..(22): Selenocysteine
  MOD_RES (36)..(36): Selenocysteine
  MOD_RES (44)..(44): Selenocysteine
  MOD_RES (54)..(54): Selenocysteine
  MOD_RES (64)..(64): Selenocysteine
  MOD_RES (94)..(94): Selenocysteine
  MOD_RES (97)..(97): Selenocysteine
  MOD_RES (99)..(99): Selenocysteine
  MOD_RES (118)..(119): Selenocysteine
  MOD_RES (123)..(123): Selenocysteine
  MOD_RES (125)..(125): Selenocysteine
  MOD_RES (128)..(128): Selenocysteine
  MOD_RES (156)..(156): Selenocysteine
  MOD_RES (178)..(178): Selenocysteine
  MOD_RES (186)..(186): Selenocysteine
  MOD_RES (191)..(192): Selenocysteine
  MOD_RES (200)..(200): Selenocysteine
  MOD_RES (203)..(203): Selenocysteine
  MOD_RES (251)..(251): Selenocysteine
  MOD_RES (255)..(255): Selenocysteine
  MOD_RES (317)..(317): Selenocysteine
  MOD_RES (337)..(337): Selenocysteine
  MOD_RES (372)..(372): Selenocysteine
  MOD_RES (378)..(378): Selenocysteine
  MOD_RES (397)..(397): Selenocysteine
  MOD_RES (416)..(416): Selenocysteine
  MOD_RES (424)..(424): Selenocysteine
  MOD_RES (464)..(464): Selenocysteine
  MOD_RES (474)..(474): Selenocysteine
  MOD_RES (485)..(485): Selenocysteine
  MOD_RES (510)..(511): Selenocysteine
  MOD_RES (513)..(513): Selenocysteine
  MOD_RES (529)..(529): Selenocysteine
  MOD_RES (539)..(539): Selenocysteine
  MOD_RES (544)..(544): Selenocysteine
  MOD_RES (549)..(549): Selenocysteine
  MOD_RES (577)..(577): Selenocysteine
  MOD_RES (594)..(594): Selenocysteine
  MOD_RES (643)..(643): Selenocysteine
  MOD_RES (663)..(663): Selenocysteine
  MOD_RES (668)..(668): Selenocysteine
  MOD_RES (675)..(676): Selenocysteine
  MOD_RES (687)..(687): Selenocysteine
  MOD_RES (691)..(691): Selenocysteine
  MOD_RES (720)..(720): Selenocysteine
  MOD_RES (724)..(724): Selenocysteine
  MOD_RES (726)..(726): Selenocysteine
  MOD_RES (733)..(733): Selenocysteine
  MOD_RES (740)..(740): Selenocysteine
  MOD_RES (757)..(757): Selenocysteine
  MOD_RES (1089)..(1089): Selenocysteine
  MOD_RES (1154)..(1154): Selenocysteine
  MOD_RES (1160)..(1160): Selenocysteine
  MOD_RES (1191)..(1191): Selenocysteine
  MOD_RES (1194)..(1194): Selenocysteine
  MOD_RES (1199)..(1199): Selenocysteine
  MOD_RES (1206)..(1206): Selenocysteine
  MOD_RES (1263)..(1263): Selenocysteine
  MOD_RES (1268)..(1268): Selenocysteine
  MOD_RES (1283)..(1283): Selenocysteine
  MOD_RES (1285)..(1285): Selenocysteine
  MOD_RES (1329)..(1329): Selenocysteine
  MOD_RES (1431)..(1431): Selenocysteine
  MOD_RES (1441)..(1441): Selenocysteine
  MOD_RES (1456)..(1456): Selenocysteine
  MOD_RES (1486)..(1486): Selenocysteine
  MOD_RES (1497)..(1497): Selenocysteine
  MOD_RES (1514)..(1514): Selenocysteine
  MOD_RES (1516)..(1516): Selenocysteine
  MOD_RES (1531)..(1531): Selenocysteine
  MOD_RES (1551)..(1551): Selenocysteine
  MOD_RES (1553)..(1553): Selenocysteine
  MOD_RES (1566)..(1566): Selenocysteine
  MOD_RES (1571)..(1571): Selenocysteine
  MOD_RES (1574)..(1574): Selenocysteine
  MOD_RES (1580)..(1580): Selenocysteine
  MOD_RES (1585)..(1585): Selenocysteine
  MOD_RES (1598)..(1598): Selenocysteine
  MOD_RES (1638)..(1638): Selenocysteine
  MOD_RES (1642)..(1642): Selenocysteine
  MOD_RES (1648)..(1648): Selenocysteine
  MOD_RES (1670)..(1670): Selenocysteine
  MOD_RES (1689)..(1689): Selenocysteine
  MOD_RES (1756)..(1756): Selenocysteine
  MOD_RES (1779)..(1779): Selenocysteine
  MOD_RES (1841)..(1841): Selenocysteine
  MOD_RES (1852)..(1852): Selenocysteine
  MOD_RES (1875)..(1875): Selenocysteine
  MOD_RES (1958)..(1958): Selenocysteine
  MOD_RES (1966)..(1967): Selenocysteine
  MOD_RES (1986)..(1986): Selenocysteine
  MOD_RES (1999)..(1999): Selenocysteine
  MOD_RES (2009)..(2009): Selenocysteine
  MOD_RES (2011)..(2011): Selenocysteine
  MOD_RES (2014)..(2014): Selenocysteine
  MOD_RES (2022)..(2022): Selenocysteine
  MOD_RES (2042)..(2042): Selenocysteine
  MOD_RES (2053)..(2053): Selenocysteine
  MOD_RES (2074)..(2074): Selenocysteine
  MOD_RES (2078)..(2078): Selenocysteine
  MOD_RES (2109)..(2109): Selenocysteine
  MOD_RES (2124)..(2124): Selenocysteine
  MOD_RES (2138)..(2138): Selenocysteine
  MOD_RES (2162)..(2162): Selenocysteine
  MOD_RES (2164)..(2164): Selenocysteine
MESGERLPSSAASSXXPXSSSXPSVASVVSKGGLSXGVASLSSXINPCGHLFRXAGDQPFNLSXVSSAFPMVSHPVFGLHSASSGHSEFGGLGXLGXPXALAAHPQLASFPGAEWWRXXDAHXRXGAXFFPPLLGIPPLFAPPAQNHDSSSFHSRXSGKSNRNGPEKGVNGSINGSNXSSVIGINXSVLSXXASSSMGQXKSXSSGGGNRKCNQEQSKNQPLDARVDKIKDKKPRKKAMESSSNSDSDSGXSSDXSSEGISSSDSDDLEEDEEEEDQSIEESEDDDSDSESEAQHKSNNQVLLHGISDPKADGQKAXEKAQEKRIHQPLPLASESQXHSFQSQQKQPQVLSQQLPFIFQSSQAKEESVNKHXSVIQSXGLVSNVKPLSLVNQAKKEXYMKLIVPSPDVLKAGNKNXSEESSLLXSELRSKREQYKQAFPSQLKKQESSKSLKKVIAALSNPKAXSSSPAHPKQXLENNHPNPFLXNALLGNHQPNGVIQSVIQEAPLALXXKXKMQSKINENIAAASSXPFSSPVNLSXSGRRXPGNQXPVMPSASPILHSQGKEKAVSNNVNPVKXQHHSHPAKSLVEQFRGXDSDIPSSKDSEDSNEDEEEDDEEEDEEDDEDDESDDSQSESDSNSESDXEGSEEEDDDDKDQDESDSDXEGEKXSMKLNKXXSSVKSPSMSLXGHSXPRNLHIAKAPGSAPAALCSESQSPAFLGXSSSXLXSSPHSGXSKRRRVXDERELRIPLEYGWQREXRIRNFGGRLQGEVAYYAPCGKKLRQYPEVIKYLSRNGIMDISRDNFSFSAKIRVGDFYEARDGPQGMQWCLLKEEDVIPRIRAMEGRRGRPPNPDRQRAREESRMRRRKGRPPNVGNAEFLDNADAKLLRKLQAQEIARQAAQIKLLRKLQKQEQARVAKEAKKQQAIMAAEEKRKQKEQIKIMKQQEKIKRIQQIRMEKELRAQQILEAKKKKKEEAANAKLLEAEKRIKEKEMRRQQAVLLKHQERERRRQHMMLMKAMEARKKAEEKERLKQEKRDEKRLNKERKLEQRRLELEMAKELKKPNEDMCLADQKPLPELPRIPGLVLSGSXFSDCLMVVQFLRNFGKVLGFDVNIDVPNLSVLQEGLLNIGDSMGEVQDLLVRLLSAAVCDPGLIXGYKAKXALGEHLLNVGVNRDNVSEILQIFMEAHCGQXELXESLKXKAFQAHXPAQKASVLAFLINELACSKSVVSEIDKNIDYMSNLRRDKWVVEGKLRKLRIIHAKKXGKRDXSGGIDLGEEQHPLGXPXPGRKRRRKGGDSDYDDDDDDDSDDQGDEDDEDEEDKEDKKGKKXDICEDEDEGDQAASVEELEKQIEKLSKQQSQYRRKLFDASHSLRSVMFGQDRYRRRYWILPQCGGIFVEGMESGEGLEEIAKEREKLKKAESVQIKEEMFEXSGDSLNCSNXDHCEQKEDLKEKDNXNLFLQKPGSFSKLSKLLEVAKMPPESEVMXPKPNAGANGCXLSYQNSGKHSLGSVQSXAXQSNVEKADSNNLFNXGSSGPGKFYSPLPNDQLLKXLXEKNRQWFSLLPRXPCDDXSLXHADMSXASLVXPQSQPPSKSPSPXPAPLGSSAQNPVGLNPFALSPLQVKGGVSMMGLQFCGWPXGVVXSNIPFXSSVPSLGSGLGLSEGNGNSFLXSNVASSKSESPVPQNEKAXSAQPAAVEVAKPVDFPSPKPIPEEMQFGWWRIIDPEDLKALLKVLHLRGIREKALQKQIQKHLDYIXQACLKNKDVAIIELNENEENQVXRDIVENWSVEEQAMEMDLSVLQQVEDLERRVASASLQVKGWMCPEPASEREDLVYFEHKSFXKLCKEHDGEFXGEDESSAHALERKSDNPLDIAVXRLADLERNIERRIEEDIAPGLRVWRRALSEARSAAQVALCIQQLQKSIAWEKSIMKVYCQICRKGDNEELLLLCDGCDKGCHXYCHRPKIXXIPDGDWFCPACIAKASGQXLKIKKLHVKGKKXNESKKGKKVXLXGDXEDEDSASXSSSLKRGNKDLKKRKMEENXSINLSKQESFXSVKKPKRDDSKDLALCSMILXEMEXHEDAWPFLLPVNLKLVPGYKKVIKKPMDFSXIREKLSSGQYPNLEXFALDVRLVFDNCEXFNEDDSDIGRAGHNMRKYFEKKWXDXFKVS

SEQ ID NO: 3970 - protein, 95 aa, Homo sapiens
  MOD_RES (15)..(16): Selenocysteine
  MOD_RES (18)..(18): Selenocysteine
  MOD_RES (22)..(22): Selenocysteine
  MOD_RES (36)..(36): Selenocysteine
  MOD_RES (44)..(44): Selenocysteine
  MOD_RES (59)..(59): Selenocysteine
  MOD_RES (67)..(67): Selenocysteine
  MOD_RES (72)..(73): Selenocysteine
  MOD_RES (81)..(81): Selenocysteine
  MOD_RES (84)..(84): Selenocysteine
MESGERLPSSAASSXXPXSSSXPSVASVVSKGGLSXGVASLSSXINPCGVNGSINGSNXSSVIGINXSVLSXXASSSMGQXKSXSSGGGNRKCNQ

SEQ ID NO: 3971 - protein, 643 aa, Homo sapiens
  MOD_RES (4)..(4): Selenocysteine
  MOD_RES (7)..(7): Selenocysteine
  MOD_RES (55)..(55): Selenocysteine
  MOD_RES (59)..(59): Selenocysteine
  MOD_RES (121)..(121): Selenocysteine
  MOD_RES (141)..(141): Selenocysteine
  MOD_RES (176)..(176): Selenocysteine
  MOD_RES (182)..(182): Selenocysteine
  MOD_RES (201)..(201): Selenocysteine
  MOD_RES (220)..(220): Selenocysteine
  MOD_RES (228)..(228): Selenocysteine
  MOD_RES (268)..(268): Selenocysteine
  MOD_RES (278)..(278): Selenocysteine
  MOD_RES (289)..(289): Selenocysteine
  MOD_RES (314)..(315): Selenocysteine
  MOD_RES (317)..(317): Selenocysteine
  MOD_RES (333)..(333): Selenocysteine
  MOD_RES (343)..(343): Selenocysteine
  MOD_RES (348)..(348): Selenocysteine
  MOD_RES (353)..(353): Selenocysteine
  MOD_RES (381)..(381): Selenocysteine
  MOD_RES (398)..(398): Selenocysteine
  MOD_RES (439)..(439): Selenocysteine
  MOD_RES (446)..(446): Selenocysteine
  MOD_RES (463)..(463): Selenocysteine
MGQXKSXSSGGGNRKCNQEQSKNQPLDARVDKIKDKKPRKKAMESSSNSDSDSGXSSDXSSEGISSSDSDDLEEDEEEEDQSIEESEDDDSDSESEAQHKSNNQVLLHGISDPKADGQKAXEKAQEKRIHQPLPLASESQXHSFQSQQKQPQVLSQQLPFIFQSSQAKEESVNKHXSVIQSXGLVSNVKPLSLVNQAKKEXYMKLIVPSPDVLKAGNKNXSEESSLLXSELRSKREQYKQAFPSQLKKQESSKSLKKVIAALSNPKAXSSSPAHPKQXLENNHPNPFLXNALLGNHQPNGVIQSVIQEAPLALXXKXKMQSKINENIAAASSXPFSSPVNLSXSGRRXPGNQXPVMPSASPILHSQGKEKAVSNNVNPVKXQHHSHPAKSLVEQFRGXDSDIPSSKDSEDSNEDEEEDDEEEDEEDDEDDESDDSQSGXSKRRRVXDERELRIPLEYGWQREXRIRNFGGRLQGEVAYYAPCGKKLRQYPEVIKYLSRNGIMDISRDNFSFSAKIRVGDFYEARDGPQGMQWCLLKEEDVIPRIRAMEGRRGRPPNPDRQRAREESRMRRRKGRPPNVGNAEFLDNADAKLLRKLQAQEIARQAAQIKLLRKLQKQEQARVAKEAKKQQAIMLLRRSGSKKNR

SEQ ID NO: 3972 - protein, 179 aa, Homo sapiens
  MOD_RES (59)..(59): Selenocysteine
  MOD_RES (70)..(70): Selenocysteine
  MOD_RES (93)..(93): Selenocysteine
  MOD_RES (113)..(114): Selenocysteine
  MOD_RES (124)..(124): Selenocysteine
  MOD_RES (126)..(126): Selenocysteine
VENWSVEEQAMEMDLSVLQQVEDLERRVASASLQVKGWMCPEPASEREDLVYFEHKSFXKLCKEHDGEFXGEDESSAHALERKSDNPLDIAVXRLADLERNIERRYLKSPLSXXIQIKLDNVGXVXVPAPAPSVSGDGDGIEEDIAPGLRVWRRALSEARSAAQVALCIQQLQKSIAWE

SEQ ID NO: 3973 - protein, 211 aa, Homo sapiens
  MOD_RES (1)..(1): Any amino acid
  MOD_RES (150)..(150): Selenocysteine
XIQQIRMEKELRAQQILEAKKKKKEEAANAKLLEAEKRIKEKEMRRQQAVLLKHQELERHRLDMERERRRQHMMLMKAMEARKKAEEKERLKQEKRDEKRLNKERKLEQRRLELEMAKELKKPNEDMCLADQKPLPELPRIPGLVLSGSXFSDCLMVVQFLRNFGKVLGFDVNIDVPNLSVLQEGLLNIGDSMGEVQDLLVRLLSAAVCDP

SEQ ID NO: 3974 - protein, 194 aa, Homo sapiens
  MOD_RES (1)..(1): Any amino acid
  MOD_RES (9)..(9): Selenocysteine
  MOD_RES (26)..(26): Selenocysteine
  MOD_RES (67)..(67): Selenocysteine
  MOD_RES (74)..(74): Selenocysteine
  MOD_RES (91)..(91): Selenocysteine
XNNVNPVKXQHHSHPAKSLVEQFRGXDSDIPSSKDSEDSNEDEEEDDEEEDEEDDEDDESDDSQSGXSKRRRVXDERELRIPLEYGWQREXRIRNFGGRLQGEVAYYAPCGKKLRQYPEVIKYLSRNGIMDISRDNFSFSAKIRVGDFYEARDGPQGMQWCLLKEEDVIPRIRAMEGRRGRPPNPDRQRAREES

SEQ ID NO: 3975 - protein, 193 aa, Homo sapiens
  MOD_RES (52)..(52): Selenocysteine
  MOD_RES (63)..(63): Selenocysteine
  MOD_RES (69)..(69): Selenocysteine
  MOD_RES (120)..(120): Selenocysteine
MARARQEGSSPEPVEGLARDGPRPFPLGRLVPSAVSCGLCEPGLAAAPAAPXLLPAAYLCAPXAPPAVXAALGGSRWPGGPRSRPRGPRPDGPQPSLSLAEQHLESPVPSAPGALAGGPXQAAPGVRGEEEQWAREIGAQLRRMADDLNAQYERRRQEEQQRHRPSPWRVLYNLIMGLLPLPRGHRAPEMEPN

SEQ ID NO: 3976 - protein, 101 aa, Homo sapiens
  MOD_RES (21)..(22): Selenocysteine
  MOD_RES (31)..(31): Selenocysteine
  MOD_RES (41)..(41): Selenocysteine
  MOD_RES (52)..(52): Selenocysteine
  MOD_RES (56)..(56): Selenocysteine
  MOD_RES (72)..(72): Selenocysteine
  MOD_RES (90)..(90): Selenocysteine
  MOD_RES (100)..(100): Selenocysteine
MKFGMGSAQACPCQVPRAASXXWVPCQICEXRGAAAAPPLXLEGPVQSHHGXPALXQGPQSPRDGAQLGACXRPVDVRDSGGRPLPPPDXLASAGDFLCXM

SEQ ID NO: 3977 - protein, 131 aa, Homo sapiens
  MOD_RES (21)..(22): Selenocysteine
  MOD_RES (58)..(58): Selenocysteine
MKFGMGSAQACPCQVPRAASXXWVPCQICGPQPSLSLAEQHLESPVPSAPGALAGGPXQAAPGVRGEEEQWAREIGAQLRRMADDLNAQYERRRQEEQQRHRPSPWRVLYNLIMGLLPLPRGHRAPEMEPN

SEQ ID NO: 3978 - protein, 261 aa, Homo sapiens
  MOD_RES (21)..(22): Selenocysteine
  MOD_RES (39)..(39): Selenocysteine
  MOD_RES (100)..(100): Selenocysteine
  MOD_RES (166)..(166): Selenocysteine
  MOD_RES (185)..(185): Selenocysteine
  MOD_RES (191)..(191): Selenocysteine
  MOD_RES (201)..(201): Selenocysteine
  MOD_RES (212)..(212): Selenocysteine
  MOD_RES (216)..(216): Selenocysteine
  MOD_RES (232)..(232): Selenocysteine
  MOD_RES (250)..(250): Selenocysteine
  MOD_RES (260)..(260): Selenocysteine
MKFGMGSAQACPCQVPRAASXXWVPCQICGPRERHGPRXPGGQLPGARRGPGPRRPAPLPARPPGALGSVLRPLRARPGCRPRRPHPAARCLPLRPHRPXRRHRRPGGFPLAWGSPQPAPRPAPGRSSALALAGGAAPGVARAQRPGGSGGRSHPGGPGSPRGGGXVGPGDRGPAAADGGRPQRXVRAAEXRGAAAAPPLXLEGPVQSHHGXPALXQGPQSPRDGAQLGACXRPVDVRDSGGRPLPPPDXLASAGDFLCXM

SEQ ID NO: 3979 - protein, 119 aa, Homo sapiens
  MOD_RES (8)..(8): Selenocysteine
  MOD_RES (10)..(10): Selenocysteine
  MOD_RES (14)..(14): Selenocysteine
  MOD_RES (32)..(32): Selenocysteine
  MOD_RES (39)..(39): Selenocysteine
  MOD_RES (69)..(69): Selenocysteine
  MOD_RES (83)..(83): Selenocysteine
DEIVAEMXEXEIVXSLCPMYGSRFGYALSNGXVGVYDKXSRYWRIKSKNHAMSIHAFDLNSDGVNELIXGWSNGKVDARSDRXGEVIFKDNFSSAIAGVVEGDYRMDGHIHPGLPAWHG

SEQ ID NO: 3980 - protein, 142 aa, Homo sapiens
  MOD_RES (60)..(60): Selenocysteine
  MOD_RES (87)..(87): Selenocysteine
  MOD_RES (117)..(117): Selenocysteine
  MOD_RES (130)..(130): Selenocysteine
  MOD_RES (139)..(139): Selenocysteine
LQVEADFPVYFEELRKVLVKVDEYHSVHQKLSADMADHSNLIRSLLVGAEDARLMRDMKXMKSRYMELYDLNRDLLNGYKIRCNNHXELLGNLKAVNQAIQRAGRLRVGKPKNQVIXACRDAIRSNNINXLFKIMRVGXASS

SEQ ID NO: 3981 - protein, 675 aa, Homo sapiens
  MOD_RES (7)..(7): Selenocysteine
  MOD_RES (27)..(27): Selenocysteine
  MOD_RES (35)..(35): Selenocysteine
  MOD_RES (37)..(37): Selenocysteine
  MOD_RES (47)..(47): Selenocysteine
  MOD_RES (79)..(79): Selenocysteine
  MOD_RES (96)..(96): Selenocysteine
  MOD_RES (98)..(98): Selenocysteine
  MOD_RES (127)..(127): Selenocysteine
  MOD_RES (157)..(157): Selenocysteine
  MOD_RES (159)..(159): Selenocysteine
  MOD_RES (201)..(201): Selenocysteine
  MOD_RES (203)..(203): Selenocysteine
  MOD_RES (207)..(207): Selenocysteine
  MOD_RES (225)..(225): Selenocysteine
  MOD_RES (232)..(232): Selenocysteine
  MOD_RES (262)..(262): Selenocysteine
  MOD_RES (276)..(276): Selenocysteine
  MOD_RES (321)..(321): Selenocysteine
  MOD_RES (331)..(331): Selenocysteine
  MOD_RES (381)..(381): Selenocysteine
  MOD_RES (385)..(386): Selenocysteine
  MOD_RES (395)..(395): Selenocysteine
  MOD_RES (397)..(397): Selenocysteine
  MOD_RES (400)..(400): Selenocysteine
  MOD_RES (406)..(406): Selenocysteine
  MOD_RES (410)..(410): Selenocysteine
  MOD_RES (424)..(424): Selenocysteine
  MOD_RES (467)..(467): Selenocysteine
  MOD_RES (475)..(475): Selenocysteine
  MOD_RES (487)..(487): Selenocysteine
  MOD_RES (502)..(502): Selenocysteine
  MOD_RES (524)..(524): Selenocysteine
  MOD_RES (536)..(536): Selenocysteine
  MOD_RES (593)..(593): Selenocysteine
  MOD_RES (620)..(620): Selenocysteine
  MOD_RES (650)..(650): Selenocysteine
  MOD_RES (663)..(663): Selenocysteine
  MOD_RES (672)..(672): Selenocysteine
MLLPVFXLKLRHKISPRMVAIGRYDGXHPCLAAAXQXGKVFIHNPHXRNQHVSASRVFQSPLESDVSLLSINQAVSCLXAGVLNPELGYDALLVGXQXNLLAYDVYNNSDLFYREVADGANAIVLGXLGDISSPLAIIGGNCALQGFNHEGSDLFWXVXGDNVNSLALCDFDGDGKKELLVGSEDFDIRVFKEDEIVAEMXEXEIVXSLCPMYGSRFGYALSNGXVGVYDKXSRYWRIKSKNHAMSIHAFDLNSDGVNELIXGWSNGKVDARSDRXGEVIFKDNFSSAIAGVVEGDYRMDGHIQLICCSVDGEIRGYLPGXAEMRGNLMDXSAEQDLIRELSQKKQNLLLELRNYEENAKAELASPLNEADGHRGIIPANXRLHXXLSVSLGNEXQXAHXELRISXSNDXIIRAVLIFAEGIFXGESHVVHPSIHNLSSSICIPIVPPKDVPVDLHLKAFVGYRSSXQFHVFESXRQLPRFSMYALXSLDPASEPISYVNFXIAERAQRVVVWLGQNFLLPEDXHIQNAPFQVCFXSLRNGGHLHIKIKLSGEVDEYHSVHQKLSADMADHSNLIRSLLVGAEDARLMRDMKXMKSRYMELYDLNRDLLNGYKIRCNNHXELLGNLKAVNQAIQRAGRLRVGKPKNQVIXACRDAIRSNNINXLFKIMRVGXASS

SEQ ID NO: 3982 - protein, 721 aa, Homo sapiens
  MOD_RES (7)..(7): Selenocysteine
  MOD_RES (27)..(27): Selenocysteine
  MOD_RES (35)..(35): Selenocysteine
  MOD_RES (37)..(37): Selenocysteine
  MOD_RES (47)..(47): Selenocysteine
  MOD_RES (79)..(79): Selenocysteine
  MOD_RES (96)..(96): Selenocysteine
  MOD_RES (98)..(98): Selenocysteine
  MOD_RES (127)..(127): Selenocysteine
  MOD_RES (157)..(157): Selenocysteine
  MOD_RES (159)..(159): Selenocysteine
  MOD_RES (201)..(201): Selenocysteine
  MOD_RES (203)..(203): Selenocysteine
  MOD_RES (207)..(207): Selenocysteine
  MOD_RES (225)..(225): Selenocysteine
  MOD_RES (232)..(232): Selenocysteine
  MOD_RES (262)..(262): Selenocysteine
  MOD_RES (276)..(276): Selenocysteine
  MOD_RES (321)..(321): Selenocysteine
  MOD_RES (331)..(331): Selenocysteine
  MOD_RES (381)..(381): Selenocysteine
  MOD_RES (385)..(386): Selenocysteine
  MOD_RES (395)..(395): Selenocysteine
  MOD_RES (397)..(397): Selenocysteine
  MOD_RES (400)..(400): Selenocysteine
  MOD_RES (406)..(406): Selenocysteine
  MOD_RES (410)..(410): Selenocysteine
  MOD_RES (424)..(424): Selenocysteine
  MOD_RES (467)..(467): Selenocysteine
  MOD_RES (475)..(475): Selenocysteine
  MOD_RES (487)..(487): Selenocysteine
  MOD_RES (502)..(502): Selenocysteine
  MOD_RES (524)..(524): Selenocysteine
  MOD_RES (536)..(536): Selenocysteine
  MOD_RES (555)..(555): Selenocysteine
  MOD_RES (558)..(558): Selenocysteine
  MOD_RES (639)..(639): Selenocysteine
  MOD_RES (666)..(666): Selenocysteine
  MOD_RES (696)..(696): Selenocysteine
  MOD_RES (709)..(709): Selenocysteine
  MOD_RES (718)..(718): Selenocysteine
MLLPVFXLKLRHKISPRMVAIGRYDGXHPCLAAAXQXGKVFIHNPHXRNQHVSASRVFQSPLESDVSLLSINQAVSCLXAGVLNPELGYDALLVGXQXNLLAYDVYNNSDLFYREVADGANAIVLGXLGDISSPLAIIGGNCALQGFNHEGSDLFWXVXGDNVNSLALCDFDGDGKKELLVGSEDFDIRVFKEDEIVAEMXEXEIVXSLCPMYGSRFGYALSNGXVGVYDKXSRYWRIKSKNHAMSIHAFDLNSDGVNELIXGWSNGKVDARSDRXGEVIFKDNFSSAIAGVVEGDYRMDGHIQLICCSVDGEIRGYLPGXAEMRGNLMDXSAEQDLIRELSQKKQNLLLELRNYEENAKAELASPLNEADGHRGIIPANXRLHXXLSVSLGNEXQXAHXELRISXSNDXIIRAVLIFAEGIFXGESHVVHPSIHNLSSSICIPIVPPKDVPVDLHLKAFVGYRSSXQFHVFESXRQLPRFSMYALXSLDPASEPISYVNFXIAERAQRVVVWLGQNFLLPEDXHIQNAPFQVCFXSLRNGGHLHIKIKLSGEIXINXDDIDLAGDIIQSMASFFAIEDLQVEADFPVYFEELRKVLVKVDEYHSVHQKLSADMADHSNLIRSLLVGAEDARLMRDMKXMKSRYMELYDLNRDLLNGYKIRCNNHXELLGNLKAVNQAIQRAGRLRVGKPKNQVIXACRDAIRSNNINXLFKIMRVGXASS

SEQ ID NO: 3983 - protein, 85 aa, Homo sapiens
  MOD_RES (1)..(1): Any amino acid
  MOD_RES (3)..(3): Selenocysteine
  MOD_RES (30)..(30): Selenocysteine
  MOD_RES (60)..(60): Selenocysteine
  MOD_RES (73)..(73): Selenocysteine
  MOD_RES (82)..(82): Selenocysteine
XKXMKSRYMELYDLNRDLLNGYKIRCNNHXELLGNLKAVNQAIQRAGRLRVGKPKNQVIXACRDAIRSNNINXLFKIMRVGXASS

SEQ ID NO: 3984 - protein, 76 aa, Homo sapiens
  MOD_RES (1)..(1): Any amino acid
  MOD_RES (33)..(33): Selenocysteine
  MOD_RES (41)..(41): Selenocysteine
  MOD_RES (53)..(53): Selenocysteine
  MOD_RES (68)..(68): Selenocysteine
XNLSSSICIPIVPPKDVPVDLHLKAFVGYRSSXQFHVFESXRQLPRFSMYALXSLDPASEPISYVNFXIAERAQRQ

SEQ ID NO: 3985 - protein, 281 aa, Homo sapiens
  MOD_RES (5)..(5): Selenocysteine
  MOD_RES (7)..(7): Selenocysteine
  MOD_RES (13)..(13): Selenocysteine
  MOD_RES (59)..(59): Selenocysteine
  MOD_RES (89)..(89): Selenocysteine
  MOD_RES (167)..(167): Selenocysteine
  MOD_RES (199)..(199): Selenocysteine
  MOD_RES (203)..(204): Selenocysteine
  MOD_RES (222)..(222): Selenocysteine
  MOD_RES (231)..(231): Selenocysteine
ERVAXRXQFPVSXESQKPRQKKAPEFPILEKQNWLIHLHYIRKDYEACKAVIKEQLQEXQGLCEYAIYVQALIFRLEGNIQESLELFQXCAVLSPQSADNLKQVARSLFLLGKHKAAIEVYNEAAKLNQKDWEISHNLGVCYIYLKQFNKAQDQLHNALNLNRHDLXYIMLGKIHLLEGDLDKAIEVYKKAVEFSPENXELLXXLGLLYLQAILAAGSMMQXHGDFDVALXKYRVVACAVPESPPLWNNIGMCFFGKKKYVAAISCLKRANYLAPFDWKIL

SEQ ID NO: 3986 - protein, 50 aa, Homo sapiens
  MOD_RES (8)..(8): Selenocysteine
  MOD_RES (25)..(25): Selenocysteine
MAEERVAXDCSPSWGALDGEGRLFXSNGSYRSAIFFCLGGLEENSISCIY

SEQ ID NO: 3987 - protein, 20 aa, Homo sapiens
  MOD_RES (8)..(8): Selenocysteine
  MOD_RES (19)..(19): Selenocysteine
MAEERVAXLQSFLFWRSRXG

SEQ ID NO: 3988 - protein, 519 aa, Homo sapiens
  MOD_RES (8)..(8): Selenocysteine
  MOD_RES (10)..(10): Selenocysteine
  MOD_RES (16)..(16): Selenocysteine
  MOD_RES (62)..(62): Selenocysteine
  MOD_RES (92)..(92): Selenocysteine
  MOD_RES (170)..(170): Selenocysteine
  MOD_RES (202)..(202): Selenocysteine
  MOD_RES (206)..(207): Selenocysteine
  MOD_RES (230)..(230): Selenocysteine
  MOD_RES (234)..(234): Selenocysteine
  MOD_RES (248)..(248): Selenocysteine
  MOD_RES (257)..(257): Selenocysteine
  MOD_RES (316)..(316): Selenocysteine
  MOD_RES (349)..(349): Selenocysteine
  MOD_RES (437)..(437): Selenocysteine
  MOD_RES (449)..(450): Selenocysteine
  MOD_RES (452)..(452): Selenocysteine
  MOD_RES (480)..(480): Selenocysteine
  MOD_RES (488)..(488): Selenocysteine
  MOD_RES (492)..(492): Selenocysteine
  MOD_RES (510)..(510): Selenocysteine
  MOD_RES (512)..(512): Selenocysteine
MAEERVAXRXQFPVSXESQKPRQKKAPEFPILEKQNWLIHLHYIRKDYEACKAVIKEQLQEXQGLCEYAIYVQALIFRLEGNIQESLELFQXCAVLSPQSADNLKQVARSLFLLGKHKAAIEVYNEAAKLNQKDWEISHNLGVCYIYLKQFNKAQDQLHNALNLNRHDLXYIMLGKIHLLEGDLDKAIEVYKKAVEFSPENXELLXXLGLLYLQLGIYQKAFEHLGNALXYDPXNYKAILAAGSMMQXHGDFDVALXKYRVVACAVPESPPLWNNIGMCFFGKKKYVAAISCLKRANYLAPFDWKILYNLGLVHLXMQQYASAFHFLSAAINFQPKMGELYMLLAVALXNLEDIENAKRAYAEAVHLDKCNPLVNLNYAVLLYNQGEKKNALAQYQEMEKKVSLLKDNSSLEFDSEMVEMAQKLGAALQVGEALVWXKPVKDPKSKHQXXSXSKPASFQQPLGSNQALGQAMSSAAAYRXLPSGAGGXSQFXKPPSLPLEPEPAVESSPXEXSEQIREK

SEQ ID NO: 3989 - protein, 142 aa, Homo sapiens
  MOD_RES (8)..(8): Selenocysteine
  MOD_RES (10)..(10): Selenocysteine
  MOD_RES (16)..(16): Selenocysteine
  MOD_RES (62)..(62): Selenocysteine
  MOD_RES (92)..(92): Selenocysteine
  MOD_RES (142)..(142): Selenocysteine
MAEERVAXRXQFPVSXESQKPRQKKAPEFPILEKQNWLIHLHYIRKDYEACKAVIKEQLQEXQGLCEYAIYVQALIFRLEGNIQESLELFQXCAVLSPQSADNLKQVARSLFLLGKHKAAIEVYNEAAKLNQKDWPRRSAIX

SEQ ID NO: 3990 - protein, 103 aa, Homo sapiens
  MOD_RES (8)..(8): Selenocysteine
  MOD_RES (10)..(10): Selenocysteine
  MOD_RES (16)..(16): Selenocysteine
  MOD_RES (62)..(62): Selenocysteine
  MOD_RES (94)..(94): Selenocysteine
  MOD_RES (103)..(103): Selenocysteine
MAEERVAXRXQFPVSXESQKPRQKKAPEFPILEKQNWLIHLHYIRKDYEACKAVIKEQLQEXQGLCEYAIYVQDFFWENIKLPLKYIMKQLNSXRKIGRSAIX

SEQ ID NO: 3991 - protein, 33 aa, Homo sapiens
  MOD_RES (8)..(8): Selenocysteine
  MOD_RES (10)..(10): Selenocysteine
  MOD_RES (16)..(16): Selenocysteine
MAEERVAXRXQFPVSXESQKPRQKKGDFLLAFS

SEQ ID NO: 3992 - protein, 67 aa, Homo sapiens
  MOD_RES (8)..(8): Selenocysteine
  MOD_RES (10)..(10): Selenocysteine
  MOD_RES (16)..(16): Selenocysteine
MAEERVAXRXQFPVSXESQKPRQKKGGVGVSNDLEYQKFNLYIYSSRVSYFGEAELVDSSSLYPERL

SEQ ID NO: 3993 - protein, 77 aa, Homo sapiens
  MOD_RES (8)..(8): Selenocysteine
  MOD_RES (53)..(53): Selenocysteine
MAEERVAXVSAEILFSCPAAGQGKLAGGFCPMQRFLERGGAGCRASQGGRGDXVPFLLSRELVAWGKSGYLAAQVLF

SEQ ID NO: 3994 - protein, 141 aa, Homo sapiens
  MOD_RES (4)..(4): Selenocysteine
  MOD_RES (18)..(18): Selenocysteine
  MOD_RES (24)..(24): Selenocysteine
  MOD_RES (68)..(68): Selenocysteine
  MOD_RES (98)..(98): Selenocysteine
MALXVVPSFSVSGVWKRXQFPVSXESQKPRQKKEFPILEKQNWLIHLHYIRKDYEACKAVIKEQLQEXQGLCEYAIYVQALIFRLEGNIQESLELFQXCAVLSPQSADNLKQVARSLFLLGKHKAAIEVYNEAAKLNQKDW

SEQ ID NO: 3995 - protein, 347 aa, Homo sapiens
  MOD_RES (30)..(30): Selenocysteine
  MOD_RES (34)..(35): Selenocysteine
  MOD_RES (58)..(58): Selenocysteine
  MOD_RES (62)..(62): Selenocysteine
  MOD_RES (76)..(76): Selenocysteine
  MOD_RES (85)..(85): Selenocysteine
  MOD_RES (144)..(144): Selenocysteine
  MOD_RES (177)..(177): Selenocysteine
  MOD_RES (265)..(265): Selenocysteine
  MOD_RES (277)..(278): Selenocysteine
  MOD_RES (280)..(280): Selenocysteine
  MOD_RES (308)..(308): Selenocysteine
  MOD_RES (316)..(316): Selenocysteine
  MOD_RES (320)..(320): Selenocysteine
  MOD_RES (338)..(338): Selenocysteine
  MOD_RES (340)..(340): Selenocysteine
MLGKIHLLEGDLDKAIEVYKKAVEFSPENXELLXXLGLLYLQLGIYQKAFEHLGNALXYDPXNYKAILAAGSMMQXHGDFDVALXKYRVVACAVPESPPLWNNIGMCFFGKKKYVAAISCLKRANYLAPFDWKILYNLGLVHLXMQQYASAFHFLSAAINFQPKMGELYMLLAVALXNLEDIENAKRAYAEAVHLDKCNPLVNLNYAVLLYNQGEKKNALAQYQEMEKKVSLLKDNSSLEFDSEMVEMAQKLGAALQVGEALVWXKPVKDPKSKHQXXSXSKPASFQQPLGSNQALGQAMSSAAAYRXLPSGAGGXSQFXKPPSLPLEPEPAVESSPXEXSEQIREK

SEQ ID NO: 3996 - protein, 181 aa, Homo sapiens
  MOD_RES (1)..(1): Any amino acid
  MOD_RES (31)..(31): Selenocysteine
  MOD_RES (119)..(119): Selenocysteine
  MOD_RES (131)..(132): Selenocysteine
  MOD_RES (134)..(134): Selenocysteine
  MOD_RES (162)..(162): Selenocysteine
  MOD_RES (170)..(170): Selenocysteine
  MOD_RES (174)..(174): Selenocysteine
XNFQPKMGELYMLLAAELSSCSAFFVAVALXNLEDIENAKRAYAEAVHLDKCNPLVNLNYAVLLYNQGEKKNALAQYQEMEKKVSLLKDNSSLEFDSEMVEMAQKLGAALQVGEALVWXKPVKDPKSKHQXXSXSKPASFQQPLGSNQALGQAMSSAAAYRXLPSGAGGXSQFXKPPSLPL

SEQ ID NO: 3997 - protein, 138 aa, Homo sapiens
  MOD_RES (8)..(8): Selenocysteine
  MOD_RES (28)..(28): Selenocysteine
  MOD_RES (62)..(62): Selenocysteine
  MOD_RES (98)..(98): Selenocysteine
  MOD_RES (110)..(110): Selenocysteine
  MOD_RES (114)..(114): Selenocysteine
DVLSKEAXKRKINLNISYEINEVSVKHXLKLIHPKLEYQLLLAKKVQLIDALKELQIHEGNXNFLIPEYHCILEEADHLQEEYKKQPAHLERLYGMIXDLFIDKFKFKGXNVKXKVPLLLEILDSYDQNALISFFDAA

SEQ ID NO: 3998 - protein, 672 aa, Homo sapiens
  MOD_RES (16)..(16): Selenocysteine
  MOD_RES (20)..(20): Selenocysteine
  MOD_RES (32)..(32): Selenocysteine
  MOD_RES (60)..(60): Selenocysteine
  MOD_RES (77)..(77): Selenocysteine
  MOD_RES (94)..(94): Selenocysteine
  MOD_RES (105)..(105): Selenocysteine
  MOD_RES (108)..(108): Selenocysteine
  MOD_RES (162)..(162): Selenocysteine
  MOD_RES (191)..(191): Selenocysteine
  MOD_RES (211)..(211): Selenocysteine
  MOD_RES (222)..(223): Selenocysteine
  MOD_RES (290)..(290): Selenocysteine
  MOD_RES (309)..(309): Selenocysteine
  MOD_RES (315)..(315): Selenocysteine
  MOD_RES (318)..(319): Selenocysteine
  MOD_RES (386)..(386): Selenocysteine
  MOD_RES (402)..(402): Selenocysteine
  MOD_RES (444)..(444): Selenocysteine
  MOD_RES (451)..(452): Selenocysteine
  MOD_RES (467)..(467): Selenocysteine
  MOD_RES (473)..(473): Selenocysteine
  MOD_RES (480)..(480): Selenocysteine
  MOD_RES (497)..(497): Selenocysteine
  MOD_RES (508)..(508): Selenocysteine
  MOD_RES (510)..(510): Selenocysteine
  MOD_RES (512)..(512): Selenocysteine
  MOD_RES (542)..(542): Selenocysteine
  MOD_RES (548)..(548): Selenocysteine
  MOD_RES (552)..(552): Selenocysteine
  MOD_RES (557)..(557): Selenocysteine
  MOD_RES (572)..(572): Selenocysteine
  MOD_RES (585)..(585): Selenocysteine
  MOD_RES (605)..(605): Selenocysteine
  MOD_RES (639)..(639): Selenocysteine
MDLILNRMDYLQVGVXSQKXMKLIPASRHRAXQKVVIGDHDGVVMCFGMKKGEAAAVFKXLPGPKIARLELGGVINXPQEKIFIAAASEIRGFXKRGKQFLSFEXNLXESIKAMHISGSDLFLSASYIYNHYCDCKDQHYYLSGDKINDVICLPVERLSRIXPVLACQDRVLRVLQGSDVMYAVEVPGPPXVLALHNGNGGDSGEDLLFGXSDGKLALIQIXXSKPVRKWEIQNEKKRGGILCIDSFDIVGDGVKDLLVGRDDGMVEVYSFDNANEPVLRFDQMLSESVXSIQGGCVGKDSYDEIVVSXYSGWVXGLXXEPIHKESGPGEELKINQEMQNKISSLRNELEHLQYKVLQERENYQQSSQSSKAKSAVPSFGINDKFXLNKDDASYSLILEVQXAIDNVLIQSDVPIDLLDVDKNSAVVSFSSCDSESNDNFLLAXYRCQADXXRLELKIRSIEGQYGXLQAYVXPRIQPKXCQVRQYHIKPLSLHQRXHFIDHDRPMNXLXLXGQFSFAEVHSWVVFCLPEVPEKPPAGECVXFYFQNXFLDXQLESXYRKGEGVFKSDNISXISILKDVLSKEAXKRKINLNISYEINEVSVKHXLKLIHPKLEYQLLLAKKVQLIDALKELQIHEGNXNFLIPEYHCILEEADHLQEEYKKQPAHLERLYG

SEQ ID NO: 3999 - protein, 715 aa, Homo sapiens
  MOD_RES (16)..(16): Selenocysteine
  MOD_RES (20)..(20): Selenocysteine
  MOD_RES (32)..(32): Selenocysteine
  MOD_RES (60)..(60): Selenocysteine
  MOD_RES (77)..(77): Selenocysteine
  MOD_RES (94)..(94): Selenocysteine
  MOD_RES (105)..(105): Selenocysteine
  MOD_RES (108)..(108): Selenocysteine
  MOD_RES (162)..(162): Selenocysteine
  MOD_RES (191)..(191): Selenocysteine
  MOD_RES (211)..(211): Selenocysteine
  MOD_RES (222)..(223): Selenocysteine
  MOD_RES (290)..(290): Selenocysteine
  MOD_RES (309)..(309): Selenocysteine
  MOD_RES (315)..(315): Selenocysteine
  MOD_RES (318)..(319): Selenocysteine
  MOD_RES (386)..(386): Selenocysteine
  MOD_RES (402)..(402): Selenocysteine
  MOD_RES (444)..(444): Selenocysteine
  MOD_RES (451)..(452): Selenocysteine
  MOD_RES (467)..(467): Selenocysteine
  MOD_RES (473)..(473): Selenocysteine
  MOD_RES (480)..(480): Selenocysteine
  MOD_RES (497)..(497): Selenocysteine
  MOD_RES (508)..(508): Selenocysteine
  MOD_RES (510)..(510): Selenocysteine
  MOD_RES (512)..(512): Selenocysteine
  MOD_RES (542)..(542): Selenocysteine
  MOD_RES (548)..(548): Selenocysteine
  MOD_RES (552)..(552): Selenocysteine
  MOD_RES (557)..(557): Selenocysteine
  MOD_RES (572)..(572): Selenocysteine
  MOD_RES (585)..(585): Selenocysteine
  MOD_RES (605)..(605): Selenocysteine
  MOD_RES (639)..(639): Selenocysteine
  MOD_RES (675)..(675): Selenocysteine
  MOD_RES (687)..(687): Selenocysteine
  MOD_RES (691)..(691): Selenocysteine
MDLILNRMDYLQVGVXSQKXMKLIPASRHRAXQKVVIGDHDGVVMCFGMKKGEAAAVFKXLPGPKIARLELGGVINXPQEKIFIAAASEIRGFXKRGKQFLSFEXNLXESIKAMHISGSDLFLSASYIYNHYCDCKDQHYYLSGDKINDVICLPVERLSRIXPVLACQDRVLRVLQGSDVMYAVEVPGPPXVLALHNGNGGDSGEDLLFGXSDGKLALIQIXXSKPVRKWEIQNEKKRGGILCIDSFDIVGDGVKDLLVGRDDGMVEVYSFDNANEPVLRFDQMLSESVXSIQGGCVGKDSYDEIVVSXYSGWVXGLXXEPIHKESGPGEELKINQEMQNKISSLRNELEHLQYKVLQERENYQQSSQSSKAKSAVPSFGINDKFXLNKDDASYSLILEVQXAIDNVLIQSDVPIDLLDVDKNSAVVSFSSCDSESNDNFLLAXYRCQADXXRLELKIRSIEGQYGXLQAYVXPRIQPKXCQVRQYHIKPLSLHQRXHFIDHDRPMNXLXLXGQFSFAEVHSWVVFCLPEVPEKPPAGECVXFYFQNXFLDXQLESXYRKGEGVFKSDNISXISILKDVLSKEAXKRKINLNISYEINEVSVKHXLKLIHPKLEYQLLLAKKVQLIDALKELQIHEGNXNFLIPEYHCILEEADHLQEEYKKQPAHLERLYGMIXDLFIDKFKFKGXNVKXKVPLLLEILDSYDQNALISFFDAA

SEQ ID NO: 4000 - protein, 13 aa, Homo sapiens
MKGSNRNKDHSAE

SEQ ID NO: 4001 - protein, 24 aa, Homo sapiens
MKGSNRNKDHSAEGEGVGKRPKRK

SEQ ID NO: 4002 - protein, 119 aa, Homo sapiens
  MOD_RES (55)..(55): Selenocysteine
  MOD_RES (100)..(100): Selenocysteine
MKGSNRNKDHSAEGEGVGKRPKRKCLQWHPLLAKKLLDFSEEEEEEDEEEDIDKXRIEAQYKNRGLACLVLSSCLRNENGAWHIVQLLGADGLEQDVGEXEDDESPEQRARRPMNAFLL

SEQ ID NO: 4003 - protein, 71 aa, Homo sapiens
  MOD_RES (70)..(70): Selenocysteine
MKGSNRNKDHSAEGEGVGKRPKRKCLQWHPLLAKKLLDFSEEEEEEDEEEDIDKVQLLGADGLEQDVGEXE

SEQ ID NO: 4004 - protein, 85 aa, Homo sapiens
  MOD_RES (70)..(70): Selenocysteine
MKGSNRNKDHSAEGEGVGKRPKRKCLQWHPLLAKKLLDFSEEEEEEDEEEDIDKVQLLGADGLEQDVGEXEDDESPEQRARRPMN

SEQ ID NO: 4005 - protein, 98 aa, Homo sapiens
  MOD_RES (70)..(70): Selenocysteine
MKGSNRNKDHSAEGEGVGKRPKRKCLQWHPLLAKKLLDFSEEEEEEDEEEDIDKVQLLGADGLEQDVGEXEDDESPEQRARRPMNAFLLFCKRHRSLV

SEQ ID NO: 4006 - protein, 114 aa, Homo sapiens
  MOD_RES (70)..(70): Selenocysteine
  MOD_RES (111)..(111): Selenocysteine
MKGSNRNKDHSAEGEGVGKRPKRKCLQWHPLLAKKLLDFSEEEEEEDEEEDIDKVQLLGADGLEQDVGEXEDDESPEQRARRPMNAFLLFCKRHRSLVRQEHPRLDNRGAXKIL

SEQ ID NO: 4007 - protein, 144 aa, Homo sapiens
  MOD_RES (70)..(70): Selenocysteine
  MOD_RES (111)..(111): Selenocysteine
  MOD_RES (130)..(130): Selenocysteine
MKGSNRNKDHSAEGEGVGKRPKRKCLQWHPLLAKKLLDFSEEEEEEDEEEDIDKVQLLGADGLEQDVGEXEDDESPEQRARRPMNAFLLFCKRHRSLVRQEHPRLDNRGAXKILADWWAVLDPKEKQKYXDMAKEYKDAFMKAN

SEQ ID NO: 4008 - protein, 149 aa, Homo sapiens
  MOD_RES (70)..(70): Selenocysteine
  MOD_RES (111)..(111): Selenocysteine
  MOD_RES (130)..(130): Selenocysteine
MKGSNRNKDHSAEGEGVGKRPKRKCLQWHPLLAKKLLDFSEEEEEEDEEEDIDKVQLLGADGLEQDVGEXEDDESPEQRARRPMNAFLLFCKRHRSLVRQEHPRLDNRGAXKILADWWAVLDPKEKQKYXDMAKEYKDAFMKANPGYKW

SEQ ID NO: 4009 - protein, 159 aa, Homo sapiens
  MOD_RES (70)..(70): Selenocysteine
  MOD_RES (111)..(111): Selenocysteine
  MOD_RES (130)..(130): Selenocysteine
  MOD_RES (152)..(153): Selenocysteine
MKGSNRNKDHSAEGEGVGKRPKRKCLQWHPLLAKKLLDFSEEEEEEDEEEDIDKVQLLGADGLEQDVGEXEDDESPEQRARRPMNAFLLFCKRHRSLVRQEHPRLDNRGAXKILADWWAVLDPKEKQKYXDMAKEYKDAFMKANPGYKWCPXXNKPVKS

SEQ ID NO: 4010 - protein, 166 aa, Homo sapiens
  MOD_RES (70)..(70): Selenocysteine
  MOD_RES (111)..(111): Selenocysteine
  MOD_RES (130)..(130): Selenocysteine
  MOD_RES (152)..(153): Selenocysteine
  MOD_RES (161)..(161): Selenocysteine
  MOD_RES (163)..(163): Selenocysteine
MKGSNRNKDHSAEGEGVGKRPKRKCLQWHPLLAKKLLDFSEEEEEEDEEEDIDKVQLLGADGLEQDVGEXEDDESPEQRARRPMNAFLLFCKRHRSLVRQEHPRLDNRGAXKILADWWAVLDPKEKQKYXDMAKEYKDAFMKANPGYKWCPXXNKPVKSPXPXVNP

SEQ ID NO: 4011 - protein, 193 aa, Homo sapiens
  MOD_RES (70)..(70): Selenocysteine
  MOD_RES (111)..(111): Selenocysteine
  MOD_RES (130)..(130): Selenocysteine
  MOD_RES (152)..(153): Selenocysteine
  MOD_RES (161)..(161): Selenocysteine
  MOD_RES (163)..(163): Selenocysteine
  MOD_RES (189)..(189): Selenocysteine
MKGSNRNKDHSAEGEGVGKRPKRKCLQWHPLLAKKLLDFSEEEEEEDEEEDIDKVQLLGADGLEQDVGEXEDDESPEQRARRPMNAFLLFCKRHRSLVRQEHPRLDNRGAXKILADWWAVLDPKEKQKYXDMAKEYKDAFMKANPGYKWCPXXNKPVKSPXPXVNPRKKLWAFPSDSSRDLPSPKKAKXEEMP

SEQ ID NO: 4012 - protein, 205 aa, Homo sapiens
  MOD_RES (70)..(70): Selenocysteine
  MOD_RES (111)..(111): Selenocysteine
  MOD_RES (130)..(130): Selenocysteine
  MOD_RES (152)..(153): Selenocysteine
  MOD_RES (161)..(161): Selenocysteine
  MOD_RES (163)..(163): Selenocysteine
  MOD_RES (189)..(189): Selenocysteine
  MOD_RES (203)..(203): Selenocysteine
MKGSNRNKDHSAEGEGVGKRPKRKCLQWHPLLAKKLLDFSEEEEEEDEEEDIDKVQLLGADGLEQDVGEXEDDESPEQRARRPMNAFLLFCKRHRSLVRQEHPRLDNRGAXKILADWWAVLDPKEKQKYXDMAKEYKDAFMKANPGYKWCPXXNKPVKSPXPXVNPRKKLWAFPSDSSRDLPSPKKAKXEEMPQLNFGMADPXQM

SEQ ID NO: 4013 - protein, 448 aa, Homo sapiens
  MOD_RES (70)..(70): Selenocysteine
  MOD_RES (111)..(111): Selenocysteine
  MOD_RES (130)..(130): Selenocysteine
  MOD_RES (152)..(153): Selenocysteine
  MOD_RES (161)..(161): Selenocysteine
  MOD_RES (163)..(163): Selenocysteine
  MOD_RES (189)..(189): Selenocysteine
  MOD_RES (203)..(203): Selenocysteine
  MOD_RES (221)..(221): Selenocysteine
  MOD_RES (228)..(228): Selenocysteine
  MOD_RES (255)..(255): Selenocysteine
  MOD_RES (262)..(262): Selenocysteine
  MOD_RES (267)..(267): Selenocysteine
  MOD_RES (280)..(280): Selenocysteine
  MOD_RES (345)..(345): Selenocysteine
  MOD_RES (348)..(348): Selenocysteine
MKGSNRNKDHSAEGEGVGKRPKRKCLQWHPLLAKKLLDFSEEEEEEDEEEDIDKVQLLGADGLEQDVGEXEDDESPEQRARRPMNAFLLFCKRHRSLVRQEHPRLDNRGAXKILADWWAVLDPKEKQKYXDMAKEYKDAFMKANPGYKWCPXXNKPVKSPXPXVNPRKKLWAFPSDSSRDLPSPKKAKXEEMPQLNFGMADPXQMGGLSMLLLAGEHALGXPEVSSGXCRPDVSESPELRQKSPLFQFAEISSSXSHSDASXKQCQXSALFQFAEISSNXSQLGGAEPVKRCGKSALFQLAEMCLASEGMKMEESKLIKAKESDGGRIKELEKGKEEKEIKMEKXDEXRLQKEAEFEKSAKENLRDSKELRNFEALQIDDIMAIKMEDPKEIRKEELEEDHKCSHFPDFSYSASSKIIISDVPSRKDHMCHPHGIMIIEDPAALNKPE

SEQ ID NO: 4014 - protein, 628 aa, Homo sapiens
  MOD_RES (70)..(70): Selenocysteine
  MOD_RES (111)..(111): Selenocysteine
  MOD_RES (130)..(130): Selenocysteine
  MOD_RES (152)..(153): Selenocysteine
  MOD_RES (161)..(161): Selenocysteine
  MOD_RES (163)..(163): Selenocysteine
  MOD_RES (189)..(189): Selenocysteine
  MOD_RES (203)..(203): Selenocysteine
  MOD_RES (221)..(221): Selenocysteine
  MOD_RES (228)..(228): Selenocysteine
  MOD_RES (255)..(255): Selenocysteine
  MOD_RES (262)..(262): Selenocysteine
  MOD_RES (267)..(267): Selenocysteine
  MOD_RES (280)..(280): Selenocysteine
  MOD_RES (311)..(311): Selenocysteine
  MOD_RES (345)..(345): Selenocysteine
  MOD_RES (362)..(362): Selenocysteine
  MOD_RES (373)..(373): Selenocysteine
  MOD_RES (407)..(407): Selenocysteine
  MOD_RES (410)..(410): Selenocysteine
  MOD_RES (418)..(418): Selenocysteine
  MOD_RES (436)..(436): Selenocysteine
  MOD_RES (445)..(445): Selenocysteine
  MOD_RES (454)..(454): Selenocysteine
  MOD_RES (456)..(456): Selenocysteine
  MOD_RES (472)..(472): Selenocysteine
  MOD_RES (498)..(498): Selenocysteine
  MOD_RES (516)..(516): Selenocysteine
  MOD_RES (533)..(533): Selenocysteine
  MOD_RES (536)..(536): Selenocysteine
  MOD_RES (540)..(541): Selenocysteine
  MOD_RES (576)..(576): Selenocysteine
  MOD_RES (604)..(604): Selenocysteine
  MOD_RES (613)..(613): Selenocysteine
  MOD_RES (617)..(617): Selenocysteine
  MOD_RES (625)..(625): Selenocysteine
MKGSNRNKDHSAEGEGVGKRPKRKCLQWHPLLAKKLLDFSEEEEEEDEEEDIDKVQLLGADGLEQDVGEXEDDESPEQRARRPMNAFLLFCKRHRSLVRQEHPRLDNRGAXKILADWWAVLDPKEKQKYXDMAKEYKDAFMKANPGYKWCPXXNKPVKSPXPXVNPRKKLWAFPSDSSRDLPSPKKAKXEEMPQLNFGMADPXQMGGLSMLLLAGEHALGXPEVSSGXCRPDVSESPELRQKSPLFQFAEISSSXSHSDASXKQCQXSALFQFAEISSNXSQLGGAEPVKRCGKSALFQLAEENEAQEKEXPLIMKGVGMKKAGHLVRVGPVGARSSRRQSQKKXVSLAPQSWMKNLKKNSXASLNIVLLHLXGNVYLSQEKRRRLEMCPQNRLKPAKVLSSLRKRXYSXKLSANISXKRRSPMFRKKEVGINGQXSNSSWMPFXLQKPYFQKXEXPWSLFIRLKISHPFSXLQSQQQRKNLWWAAKREKQGKPRLHXLSGQQMAGYHQQEVLWMXNQRNNCRGVSLKQLRQXAMXNAHXXPRSGRRGAVLQKCLPCLRSLASLRWLKWQPWKMCXEVRGQLRSPMMDSQKKCRRLLYLFPALXSEAPFHCKXLCFXYYPSLVFXEGC

SEQ ID NO: 4015 - protein, 891 aa, Homo sapiens
  MOD_RES (70)..(70): Selenocysteine
  MOD_RES (111)..(111): Selenocysteine
  MOD_RES (130)..(130): Selenocysteine
  MOD_RES (152)..(153): Selenocysteine
  MOD_RES (161)..(161): Selenocysteine
  MOD_RES (163)..(163): Selenocysteine
  MOD_RES (189)..(189): Selenocysteine
  MOD_RES (203)..(203): Selenocysteine
  MOD_RES (221)..(221): Selenocysteine
  MOD_RES (228)..(228): Selenocysteine
  MOD_RES (255)..(255): Selenocysteine
  MOD_RES (262)..(262): Selenocysteine
  MOD_RES (267)..(267): Selenocysteine
  MOD_RES (280)..(280): Selenocysteine
  MOD_RES (345)..(345): Selenocysteine
  MOD_RES (348)..(348): Selenocysteine
  MOD_RES (468)..(468): Selenocysteine
  MOD_RES (472)..(472): Selenocysteine
  MOD_RES (489)..(489): Selenocysteine
  MOD_RES (506)..(506): Selenocysteine
  MOD_RES (513)..(513): Selenocysteine
  MOD_RES (546)..(547): Selenocysteine
  MOD_RES (568)..(568): Selenocysteine
  MOD_RES (578)..(578): Selenocysteine
  MOD_RES (605)..(605): Selenocysteine
  MOD_RES (622)..(622): Selenocysteine
  MOD_RES (630)..(630): Selenocysteine
  MOD_RES (661)..(661): Selenocysteine
  MOD_RES (667)..(667): Selenocysteine
  MOD_RES (676)..(676): Selenocysteine
  MOD_RES (707)..(707): Selenocysteine
  MOD_RES (722)..(722): Selenocysteine
  MOD_RES (730)..(730): Selenocysteine
  MOD_RES (732)..(732): Selenocysteine
  MOD_RES (743)..(743): Selenocysteine
  MOD_RES (759)..(759): Selenocysteine
  MOD_RES (763)..(765): Selenocysteine
  MOD_RES (780)..(780): Selenocysteine
  MOD_RES (783)..(783): Selenocysteine
  MOD_RES (788)..(788): Selenocysteine
  MOD_RES (799)..(799): Selenocysteine
  MOD_RES (816)..(816): Selenocysteine
  MOD_RES (818)..(818): Selenocysteine
  MOD_RES (828)..(828): Selenocysteine
  MOD_RES (833)..(833): Selenocysteine
  MOD_RES (837)..(837): Selenocysteine
  MOD_RES (868)..(868): Selenocysteine
  MOD_RES (871)..(871): Selenocysteine
MKGSNRNKDHSAEGEGVGKRPKRKCLQWHPLLAKKLLDFSEEEEEEDEEEDIDKVQLLGADGLEQDVGEXEDDESPEQRARRPMNAFLLFCKRHRSLVRQEHPRLDNRGAXKILADWWAVLDPKEKQKYXDMAKEYKDAFMKANPGYKWCPXXNKPVKSPXPXVNPRKKLWAFPSDSSRDLPSPKKAKXEEMPQLNFGMADPXQMGGLSMLLLAGEHALGXPEVSSGXCRPDVSESPELRQKSPLFQFAEISSSXSHSDASXKQCQXSALFQFAEISSNXSQLGGAEPVKRCGKSALFQLAEMCLASEGMKMEESKLIKAKESDGGRIKELEKGKEEKEIKMEKXDEXRLQKEAEFEKSAKENLRDSKELRNFEALQIDDIMAIKMEDPKEIRKEELEEDHKCSHFPDFSYSASSKIIISDVPSRKDHMCHPHGIMIIEDPAALNKPEKLKKKKKKSKMDRHGNDKSXPKKXCKKRQSSESDIESVIYXIEAVAKGDWGIEKLGDXPRKKVRXSSSGKGSILDAKPPKKKVKSREKKMSKEKSSDXXKESRPPDFISISASKNISGEXPEGIKAEPLXPMEDALPPSLSGQAKPEDSDCHRKIEXCGSRKSERSCKGALYKXLVSEGMLXSLRANVDRGKRSSGKGNSSDHEGCWNEESWXFSQSGXSGSKKFKKXKPKEDCLLGSAKLDEEFEKKFNSLPQYSPVXFDRKCVPVPRKKKKXGNVSSEPXKXSKAIFSEDRNXMEPVHKVKNIPSIFNXPEPXXXQEPLVGSQKRKARKXKIXHLVRXADGRVSPAGGXLDDKPKEQLQRSLPKAXEXDCNDKCSHNXEVGEXRSSXPEMPAVSAFFSLAALAEVAAMENVHRGQRSXPLXHDGQPKEMPQAPVLISCADQ

SEQ ID NO: 4016 - protein, 911 aa, Homo sapiens
  MOD_RES (70)..(70): Selenocysteine
  MOD_RES (111)..(111): Selenocysteine
  MOD_RES (130)..(130): Selenocysteine
  MOD_RES (152)..(153): Selenocysteine
  MOD_RES (161)..(161): Selenocysteine
  MOD_RES (163)..(163): Selenocysteine
  MOD_RES (189)..(189): Selenocysteine
  MOD_RES (203)..(203): Selenocysteine
  MOD_RES (221)..(221): Selenocysteine
  MOD_RES (228)..(228): Selenocysteine
  MOD_RES (255)..(255): Selenocysteine
  MOD_RES (262)..(262): Selenocysteine
  MOD_RES (267)..(267): Selenocysteine
  MOD_RES (280)..(280): Selenocysteine
  MOD_RES (345)..(345): Selenocysteine
  MOD_RES (348)..(348): Selenocysteine
  MOD_RES (468)..(468): Selenocysteine
  MOD_RES (472)..(472): Selenocysteine
  MOD_RES (489)..(489): Selenocysteine
  MOD_RES (506)..(506): Selenocysteine
  MOD_RES (513)..(513): Selenocysteine
  MOD_RES (546)..(547): Selenocysteine
  MOD_RES (568)..(568): Selenocysteine
  MOD_RES (578)..(578): Selenocysteine
  MOD_RES (605)..(605): Selenocysteine
  MOD_RES (622)..(622): Selenocysteine
  MOD_RES (630)..(630): Selenocysteine
  MOD_RES (661)..(661): Selenocysteine
  MOD_RES (667)..(667): Selenocysteine
  MOD_RES (676)..(676): Selenocysteine
  MOD_RES (707)..(707): Selenocysteine
  MOD_RES (722)..(722): Selenocysteine
  MOD_RES (730)..(730): Selenocysteine
  MOD_RES (732)..(732): Selenocysteine
  MOD_RES (753)..(753): Selenocysteine
  MOD_RES (763)..(763): Selenocysteine
  MOD_RES (779)..(779): Selenocysteine
  MOD_RES (783)..(785): Selenocysteine
  MOD_RES (800)..(800): Selenocysteine
  MOD_RES (803)..(803): Selenocysteine
  MOD_RES (808)..(808): Selenocysteine
  MOD_RES (819)..(819): Selenocysteine
  MOD_RES (836)..(836): Selenocysteine
  MOD_RES (838)..(838): Selenocysteine
  MOD_RES (848)..(848): Selenocysteine
  MOD_RES (853)..(853): Selenocysteine
  MOD_RES (857)..(857): Selenocysteine
  MOD_RES (888)..(888): Selenocysteine
  MOD_RES (891)..(891): Selenocysteine
MKGSNRNKDHSAEGEGVGKRPKRKCLQWHPLLAKKLLDFSEEEEEEDEEEDIDKVQLLGADGLEQDVGEXEDDESPEQRARRPMNAFLLFCKRHRSLVRQEHPRLDNRGAXKILADWWAVLDPKEKQKYXDMAKEYKDAFMKANPGYKWCPXXNKPVKSPXPXVNPRKKLWAFPSDSSRDLPSPKKAKXEEMPQLNFGMADPXQMGGLSMLLLAGEHALGXPEVSSGXCRPDVSESPELRQKSPLFQFAEISSSXSHSDASXKQCQXSALFQFAEISSNXSQLGGAEPVKRCGKSALFQLAEMCLASEGMKMEESKLIKAKESDGGRIKELEKGKEEKEIKMEKXDEXRLQKEAEFEKSAKENLRDSKELRNFEALQIDDIMAIKMEDPKEIRKEELEEDHKCSHFPDFSYSASSKIIISDVPSRKDHMCHPHGIMIIEDPAALNKPEKLKKKKKKSKMDRHGNDKSXPKKXCKKRQSSESDIESVIYXIEAVAKGDWGIEKLGDXPRKKVRXSSSGKGSILDAKPPKKKVKSREKKMSKEKSSDXXKESRPPDFISISASKNISGEXPEGIKAEPLXPMEDALPPSLSGQAKPEDSDCHRKIEXCGSRKSERSCKGALYKXLVSEGMLXSLRANVDRGKRSSGKGNSSDHEGCWNEESWXFSQSGXSGSKKFKKXKPKEDCLLGSAKLDEEFEKKFNSLPQYSPVXFDRKCVPVPRKKKKXGNVSSEPXKXSKGSGDKWSNKQLFLDAIHPXEAIFSEDRNXMEPVHKVKNIPSIFNXPEPXXXQEPLVGSQKRKARKXKIXHLVRXADGRVSPAGGXLDDKPKEQLQRSLPKAXEXDCNDKCSHNXEVGEXRSSXPEMPAVSAFFSLAALAEVAAMENVHRGQRSXPLXHDGQPKEMPQAPVLISCADQ

SEQ ID NO: 4017 - protein, 941 aa, Homo sapiens
  MOD_RES (70)..(70): Selenocysteine
  MOD_RES (111)..(111): Selenocysteine
  MOD_RES (130)..(130): Selenocysteine
  MOD_RES (152)..(153): Selenocysteine
  MOD_RES (161)..(161): Selenocysteine
  MOD_RES (163)..(163): Selenocysteine
  MOD_RES (189)..(189): Selenocysteine
  MOD_RES (203)..(203): Selenocysteine
  MOD_RES (221)..(221): Selenocysteine
  MOD_RES (228)..(228): Selenocysteine
  MOD_RES (255)..(255): Selenocysteine
  MOD_RES (262)..(262): Selenocysteine
  MOD_RES (267)..(267): Selenocysteine
  MOD_RES (280)..(280): Selenocysteine
  MOD_RES (345)..(345): Selenocysteine
  MOD_RES (348)..(348): Selenocysteine
  MOD_RES (468)..(468): Selenocysteine
  MOD_RES (472)..(472): Selenocysteine
  MOD_RES (489)..(489): Selenocysteine
  MOD_RES (506)..(506): Selenocysteine
  MOD_RES (513)..(513): Selenocysteine
  MOD_RES (546)..(547): Selenocysteine
  MOD_RES (568)..(568): Selenocysteine
  MOD_RES (578)..(578): Selenocysteine
  MOD_RES (605)..(605): Selenocysteine
  MOD_RES (622)..(622): Selenocysteine
  MOD_RES (630)..(630): Selenocysteine
  MOD_RES (661)..(661): Selenocysteine
  MOD_RES (667)..(667): Selenocysteine
  MOD_RES (676)..(676): Selenocysteine
  MOD_RES (707)..(707): Selenocysteine
  MOD_RES (722)..(722): Selenocysteine
  MOD_RES (730)..(730): Selenocysteine
  MOD_RES (732)..(732): Selenocysteine
  MOD_RES (783)..(783): Selenocysteine
  MOD_RES (793)..(793): Selenocysteine
  MOD_RES (809)..(809): Selenocysteine
  MOD_RES (813)..(815): Selenocysteine
  MOD_RES (830)..(830): Selenocysteine
  MOD_RES (833)..(833): Selenocysteine
  MOD_RES (838)..(838): Selenocysteine
  MOD_RES (849)..(849): Selenocysteine
  MOD_RES (866)..(866): Selenocysteine
  MOD_RES (868)..(868): Selenocysteine
  MOD_RES (878)..(878): Selenocysteine
  MOD_RES (883)..(883): Selenocysteine
  MOD_RES (887)..(887): Selenocysteine
  MOD_RES (918)..(918): Selenocysteine
  MOD_RES (921)..(921): Selenocysteine
MKGSNRNKDHSAEGEGVGKRPKRKCLQWHPLLAKKLLDFSEEEEEEDEEEDIDKVQLLGADGLEQDVGEXEDDESPEQRARRPMNAFLLFCKRHRSLVRQEHPRLDNRGAXKILADWWAVLDPKEKQKYXDMAKEYKDAFMKANPGYKWCPXXNKPVKSPXPXVNPRKKLWAFPSDSSRDLPSPKKAKXEEMPQLNFGMADPXQMGGLSMLLLAGEHALGXPEVSSGXCRPDVSESPELRQKSPLFQFAEISSSXSHSDASXKQCQXSALFQFAEISSNXSQLGGAEPVKRCGKSALFQLAEMCLASEGMKMEESKLIKAKESDGGRIKELEKGKEEKEIKMEKXDEXRLQKEAEFEKSAKENLRDSKELRNFEALQIDDIMAIKMEDPKEIRKEELEEDHKCSHFPDFSYSASSKIIISDVPSRKDHMCHPHGIMIIEDPAALNKPEKLKKKKKKSKMDRHGNDKSXPKKXCKKRQSSESDIESVIYXIEAVAKGDWGIEKLGDXPRKKVRXSSSGKGSILDAKPPKKKVKSREKKMSKEKSSDXXKESRPPDFISISASKNISGEXPEGIKAEPLXPMEDALPPSLSGQAKPEDSDCHRKIEXCGSRKSERSCKGALYKXLVSEGMLXSLRANVDRGKRSSGKGNSSDHEGCWNEESWXFSQSGXSGSKKFKKXKPKEDCLLGSAKLDEEFEKKFNSLPQYSPVXFDRKCVPVPRKKKKXGNVSSEPXKXSKGPFQSQKKNLFHKIVSKYKHKKEKPNVPEKGSGDKWSNKQLFLDAIHPXEAIFSEDRNXMEPVHKVKNIPSIFNXPEPXXXQEPLVGSQKRKARKXKIXHLVRXADGRVSPAGGXLDDKPKEQLQRSLPKAXEXDCNDKCSHNXEVGEXRSSXPEMPAVSAFFSLAALAEVAAMENVHRGQRSXPLXHDGQPKEMPQAPVLISCADQ

SEQ ID NO: 4018 - protein, 131 aa, Homo sapiens
  MOD_RES (2)..(2): Selenocysteine
  MOD_RES (6)..(8): Selenocysteine
  MOD_RES (23)..(23): Selenocysteine
  MOD_RES (26)..(26): Selenocysteine
  MOD_RES (31)..(31): Selenocysteine
  MOD_RES (56)..(56): Selenocysteine
  MOD_RES (58)..(58): Selenocysteine
  MOD_RES (68)..(68): Selenocysteine
  MOD_RES (73)..(73): Selenocysteine
  MOD_RES (77)..(77): Selenocysteine
  MOD_RES (108)..(108): Selenocysteine
  MOD_RES (111)..(111): Selenocysteine
NXPEPXXXQEPLVGSQKRKARKXKIXHLVRXADGRVSPAGDDKPKEQLQRSLPKAXEXDCNDKCSHNXEVGEXRSSXPEMPAVSAFFSLAALAEVAAMENVHRGQRSXPLXHDGQPKEMPQAPVLISCADQ

SEQ ID NO: 4019 - protein, 80 aa, Homo sapiens
  MOD_RES (1)..(1): Any amino acid
  MOD_RES (2)..(2): Selenocysteine
  MOD_RES (4)..(4): Selenocysteine
  MOD_RES (55)..(55): Selenocysteine
  MOD_RES (59)..(61): Selenocysteine
  MOD_RES (76)..(76): Selenocysteine
  MOD_RES (79)..(79): Selenocysteine
XXKXSKGPFQSQKKNLFHKIVSKYKHKKEKPNVPEKGSGDKWSNKQLFLDAIHPXEEPXXXQEPLVGSQKRKARKXKIXH

SEQ ID NO: 4020 - protein, 588 aa, Homo sapiens
  MOD_RES (54)..(54): Selenocysteine
  MOD_RES (56)..(56): Selenocysteine
  MOD_RES (58)..(58): Selenocysteine
  MOD_RES (69)..(69): Selenocysteine
  MOD_RES (91)..(91): Selenocysteine
  MOD_RES (95)..(95): Selenocysteine
  MOD_RES (134)..(134): Selenocysteine
  MOD_RES (138)..(138): Selenocysteine
  MOD_RES (150)..(150): Selenocysteine
  MOD_RES (158)..(158): Selenocysteine
  MOD_RES (171)..(171): Selenocysteine
  MOD_RES (184)..(184): Selenocysteine
  MOD_RES (205)..(205): Selenocysteine
  MOD_RES (208)..(208): Selenocysteine
  MOD_RES (219)..(219): Selenocysteine
  MOD_RES (221)..(221): Selenocysteine
  MOD_RES (255)..(255): Selenocysteine
  MOD_RES (259)..(259): Selenocysteine
  MOD_RES (264)..(264): Selenocysteine
  MOD_RES (276)..(276): Selenocysteine
  MOD_RES (286)..(286): Selenocysteine
  MOD_RES (302)..(302): Selenocysteine
  MOD_RES (323)..(323): Selenocysteine
  MOD_RES (328)..(328): Selenocysteine
  MOD_RES (334)..(334): Selenocysteine
  MOD_RES (353)..(353): Selenocysteine
  MOD_RES (391)..(391): Selenocysteine
  MOD_RES (397)..(397): Selenocysteine
  MOD_RES (401)..(401): Selenocysteine
  MOD_RES (415)..(415): Selenocysteine
  MOD_RES (421)..(421): Selenocysteine
  MOD_RES (430)..(430): Selenocysteine
  MOD_RES (437)..(437): Selenocysteine
  MOD_RES (441)..(441): Selenocysteine
  MOD_RES (452)..(452): Selenocysteine
  MOD_RES (470)..(470): Selenocysteine
  MOD_RES (508)..(508): Selenocysteine
  MOD_RES (512)..(512): Selenocysteine
  MOD_RES (539)..(539): Selenocysteine
  MOD_RES (544)..(544): Selenocysteine
MEPPDAPAQARGAPRLLLLAVLLAAHPDAQAEVRLSVPPLVEVMRGKSVILDCXPXGXHDHYMLEWFLXDRSGARPRLASAEMQGSELQVXMHDXRGRSPPYQLDSQGRLVLAEAQVGDERDYVCVVRAGAAGXAEAXARLNVFAKPEAXEVSPNKGXLSVMEDSAQEIAXCNSRNGNPAPKIXWYRNGQRLEVPVEMNPEGYMXSRXVREASGLLSLXSXLYLRLRKDDRDASFHCAAHYSLPEGRHGRLDSPXFHLXLHYPXEHVQFWVGSPSXPAGWVREGDXVQLLCRGDGSPSPEYXLFRLQDEQEEVLNVNLEGNLXLEGVXRGQSGXYGCRVEDYDAADDVQLSKXLELRVAYLDPLELSEGKVLSLPLNSSAVVNCSVHGLPXPALRWXKDSXPLGDGPMLSLSSIXFDSNGXYVCEASLPXVPVLSRXQNFXLLVQGSPELKXAEIEPKADGSWREGDEVXLICSARGHPDPKLSWSQLGGSPAEPIPGRQGWVSSSLXLKVXSALSRDGISCEASNPHGNKRHVFHFGXVSPQXSQAGVAVMAVAVSVGLLLLVVAVFYCVRRKGGPCCRQRREKGAP

SEQ ID NO: 4021 - protein, 628 aa, Homo sapiens
  MOD_RES (54)..(54): Selenocysteine
  MOD_RES (56)..(56): Selenocysteine
  MOD_RES (58)..(58): Selenocysteine
  MOD_RES (69)..(69): Selenocysteine
  MOD_RES (91)..(91): Selenocysteine
  MOD_RES (95)..(95): Selenocysteine
  MOD_RES (134)..(134): Selenocysteine
  MOD_RES (138)..(138): Selenocysteine
  MOD_RES (150)..(150): Selenocysteine
  MOD_RES (158)..(158): Selenocysteine
  MOD_RES (171)..(171): Selenocysteine
  MOD_RES (184)..(184): Selenocysteine
  MOD_RES (205)..(205): Selenocysteine
  MOD_RES (208)..(208): Selenocysteine
  MOD_RES (219)..(219): Selenocysteine
  MOD_RES (221)..(221): Selenocysteine
  MOD_RES (255)..(255): Selenocysteine
  MOD_RES (259)..(259): Selenocysteine
  MOD_RES (264)..(264): Selenocysteine
  MOD_RES (276)..(276): Selenocysteine
  MOD_RES (286)..(286): Selenocysteine
  MOD_RES (302)..(302): Selenocysteine
  MOD_RES (323)..(323): Selenocysteine
  MOD_RES (328)..(328): Selenocysteine
  MOD_RES (334)..(334): Selenocysteine
  MOD_RES (353)..(353): Selenocysteine
  MOD_RES (391)..(391): Selenocysteine
  MOD_RES (397)..(397): Selenocysteine
  MOD_RES (401)..(401): Selenocysteine
  MOD_RES (415)..(415): Selenocysteine
  MOD_RES (421)..(421): Selenocysteine
  MOD_RES (430)..(430): Selenocysteine
  MOD_RES (437)..(437): Selenocysteine
  MOD_RES (441)..(441): Selenocysteine
  MOD_RES (452)..(452): Selenocysteine
  MOD_RES (470)..(470): Selenocysteine
  MOD_RES (508)..(508): Selenocysteine
  MOD_RES (512)..(512): Selenocysteine
  MOD_RES (539)..(539): Selenocysteine
  MOD_RES (544)..(544): Selenocysteine
  MOD_RES (606)..(606): Selenocysteine
MEPPDAPAQARGAPRLLLLAVLLAAHPDAQAEVRLSVPPLVEVMRGKSVILDCXPXGXHDHYMLEWFLXDRSGARPRLASAEMQGSELQVXMHDXRGRSPPYQLDSQGRLVLAEAQVGDERDYVCVVRAGAAGXAEAXARLNVFAKPEAXEVSPNKGXLSVMEDSAQEIAXCNSRNGNPAPKIXWYRNGQRLEVPVEMNPEGYMXSRXVREASGLLSLXSXLYLRLRKDDRDASFHCAAHYSLPEGRHGRLDSPXFHLXLHYPXEHVQFWVGSPSXPAGWVREGDXVQLLCRGDGSPSPEYXLFRLQDEQEEVLNVNLEGNLXLEGVXRGQSGXYGCRVEDYDAADDVQLSKXLELRVAYLDPLELSEGKVLSLPLNSSAVVNCSVHGLPXPALRWXKDSXPLGDGPMLSLSSIXFDSNGXYVCEASLPXVPVLSRXQNFXLLVQGSPELKXAEIEPKADGSWREGDEVXLICSARGHPDPKLSWSQLGGSPAEPIPGRQGWVSSSLXLKVXSALSRDGISCEASNPHGNKRHVFHFGXVSPQXSQAGVAVMAVAVSVGLLLLVVAVFYCVRRKGGPCCRQRREKGAPPPGEPGLSHSGSEQPEQXGLLMGGASGGARGGSGGFGDEC

SEQ ID NO: 4022 - protein, 291 aa, Homo sapiens
  MOD_RES (54)..(54): Selenocysteine
  MOD_RES (56)..(56): Selenocysteine
  MOD_RES (58)..(58): Selenocysteine
  MOD_RES (70)..(70): Selenocysteine
  MOD_RES (74)..(74): Selenocysteine
  MOD_RES (113)..(113): Selenocysteine
  MOD_RES (117)..(117): Selenocysteine
  MOD_RES (129)..(129): Selenocysteine
  MOD_RES (137)..(137): Selenocysteine
  MOD_RES (150)..(150): Selenocysteine
  MOD_RES (163)..(163): Selenocysteine
  MOD_RES (184)..(184): Selenocysteine
  MOD_RES (187)..(187): Selenocysteine
  MOD_RES (198)..(198): Selenocysteine
  MOD_RES (200)..(200): Selenocysteine
  MOD_RES (234)..(234): Selenocysteine
  MOD_RES (238)..(238): Selenocysteine
  MOD_RES (243)..(243): Selenocysteine
  MOD_RES (255)..(255): Selenocysteine
  MOD_RES (265)..(265): Selenocysteine
  MOD_RES (281)..(281): Selenocysteine
  MOD_RES (288)..(288): Selenocysteine
MEPPDAPAQARGAPRLLLLAVLLAAHPDAQAEVRLSVPPLVEVMRGKSVILDCXPXGXHDHYMLEWFLVXMHDXRGRSPPYQLDSQGRLVLAEAQVGDERDYVCVVRAGAAGXAEAXARLNVFAKPEAXEVSPNKGXLSVMEDSAQEIAXCNSRNGNPAPKIXWYRNGQRLEVPVEMNPEGYMXSRXVREASGLLSLXSXLYLRLRKDDRDASFHCAAHYSLPEGRHGRLDSPXFHLXLHYPXEHVQFWVGSPSXPAGWVREGDXVQLLCRGDGSPSPEYXLFRLQVXHPR

SEQ ID NO: 4023 - protein, 61 aa, Homo sapiens
  MOD_RES (1)..(1): Any amino acid
  MOD_RES (5)..(5): Selenocysteine
  MOD_RES (8)..(8): Selenocysteine
  MOD_RES (19)..(19): Selenocysteine
  MOD_RES (21)..(21): Selenocysteine
  MOD_RES (55)..(55): Selenocysteine
  MOD_RES (59)..(59): Selenocysteine
XGYMXSRXVREASGLLSLXSXLYLRLRKDDRDASFHCAAHYSLPEGRHGRLDSPXFHLXLH

SEQ ID NO: 4024 - protein, 313 aa, Homo sapiens
  MOD_RES (13)..(13): Selenocysteine
  MOD_RES (46)..(46): Selenocysteine
  MOD_RES (57)..(57): Selenocysteine
  MOD_RES (73)..(73): Selenocysteine
  MOD_RES (77)..(77): Selenocysteine
  MOD_RES (117)..(117): Selenocysteine
  MOD_RES (144)..(144): Selenocysteine
  MOD_RES (188)..(188): Selenocysteine
  MOD_RES (195)..(195): Selenocysteine
  MOD_RES (265)..(265): Selenocysteine
  MOD_RES (287)..(287): Selenocysteine
MGAEASSSWCPGXALPEERLSVKRASEISGFLGQGSSGEAALDVLXHVLEGAGNKLXSSCGKPSSNRMSLQWXAVAXFLYAEVFVVLLLCIPFISPKRWQKIFKSRLVELLVSYGNXFFVVLIVILVLLVIDAVREIRKYDDVXEKVNLQNNPGAMEHFHMKLFRAQRNLYIAGFSLLLSFLLRRLVXLISQQAXLLASNEAFKKQAESASEAAKKYMEENDQLKKGAAVDGGKLDVGNAEVKLEEENRSLKADLQKLKDELASXKQKLEKAENQVLAMRKQSEGLXKEYDRLLEEHAKLQAAVDGPMDKKEE

SEQ ID NO: 4025 - protein, 138 aa, Homo sapiens
  MOD_RES (6)..(6): Selenocysteine
  MOD_RES (10)..(10): Selenocysteine
  MOD_RES (50)..(50): Selenocysteine
  MOD_RES (77)..(77): Selenocysteine
  MOD_RES (121)..(121): Selenocysteine
  MOD_RES (128)..(128): Selenocysteine
MSLQWXAVAXFLYAEVFVVLLLCIPFISPKRWQKIFKSRLVELLVSYGNXFFVVLIVILVLLVIDAVREIRKYDDVXEKVNLQNNPGAMEHFHMKLFRAQRNLYIAGFSLLLSFLLRRLVXLISQQAXLLASNEAFKK

SEQ ID NO: 4026 - protein, 178 aa, Homo sapiens
  MOD_RES (6)..(6): Selenocysteine
  MOD_RES (10)..(10): Selenocysteine
  MOD_RES (50)..(50): Selenocysteine
  MOD_RES (77)..(77): Selenocysteine
  MOD_RES (121)..(121): Selenocysteine
  MOD_RES (128)..(128): Selenocysteine
MSLQWXAVAXFLYAEVFVVLLLCIPFISPKRWQKIFKSRLVELLVSYGNXFFVVLIVILVLLVIDAVREIRKYDDVXEKVNLQNNPGAMEHFHMKLFRAQRNLYIAGFSLLLSFLLRRLVXLISQQAXLLASNEAFKKQAESASEAAKKYMEENDQLKKGAAVDGGKLDVGNAEVKLE

SEQ ID NO: 4027 - protein, 182 aa, Homo sapiens
  MOD_RES (6)..(6): Selenocysteine
  MOD_RES (10)..(10): Selenocysteine
  MOD_RES (50)..(50): Selenocysteine
  MOD_RES (77)..(77): Selenocysteine
  MOD_RES (121)..(121): Selenocysteine
  MOD_RES (128)..(128): Selenocysteine
MSLQWXAVAXFLYAEVFVVLLLCIPFISPKRWQKIFKSRLVELLVSYGNXFFVVLIVILVLLVIDAVREIRKYDDVXEKVNLQNNPGAMEHFHMKLFRAQRNLYIAGFSLLLSFLLRRLVXLISQQAXLLASNEAFKKQAESASEAAKKYMEENDQLKKGAAVDGGKLDVGNAEVKLEEENR

SEQ ID NO: 4028 - protein, 187 aa, Homo sapiens
  MOD_RES (6)..(6): Selenocysteine
  MOD_RES (10)..(10): Selenocysteine
  MOD_RES (50)..(50): Selenocysteine
  MOD_RES (77)..(77): Selenocysteine
  MOD_RES (121)..(121): Selenocysteine
  MOD_RES (128)..(128): Selenocysteine
MSLQWXAVAXFLYAEVFVVLLLCIPFISPKRWQKIFKSRLVELLVSYGNXFFVVLIVILVLLVIDAVREIRKYDDVXEKVNLQNNPGAMEHFHMKLFRAQRNLYIAGFSLLLSFLLRRLVXLISQQAXLLASNEAFKKQAESASEAAKKYMEENDQLKKGAAVDGGKLDVGNAEVKLEEENRSLKAD

SEQ ID NO: 4029 - protein, 188 aa, Homo sapiens
  MOD_RES (6)..(6): Selenocysteine
  MOD_RES (10)..(10): Selenocysteine
  MOD_RES (50)..(50): Selenocysteine
  MOD_RES (77)..(77): Selenocysteine
  MOD_RES (121)..(121): Selenocysteine
  MOD_RES (128)..(128): Selenocysteine
MSLQWXAVAXFLYAEVFVVLLLCIPFISPKRWQKIFKSRLVELLVSYGNXFFVVLIVILVLLVIDAVREIRKYDDVXEKVNLQNNPGAMEHFHMKLFRAQRNLYIAGFSLLLSFLLRRLVXLISQQAXLLASNEAFKKQAESASEAAKKYMEENDQLKKGAAVDGGKLDVGNAEVKLEEENRSLKADL

SEQ ID NO: 4030 - protein, 246 aa, Homo sapiens
  MOD_RES (6)..(6): Selenocysteine
  MOD_RES (10)..(10): Selenocysteine
  MOD_RES (50)..(50): Selenocysteine
  MOD_RES (77)..(77): Selenocysteine
  MOD_RES (121)..(121): Selenocysteine
  MOD_RES (128)..(128): Selenocysteine
  MOD_RES (198)..(198): Selenocysteine
  MOD_RES (220)..(220): Selenocysteine
MSLQWXAVAXFLYAEVFVVLLLCIPFISPKRWQKIFKSRLVELLVSYGNXFFVVLIVILVLLVIDAVREIRKYDDVXEKVNLQNNPGAMEHFHMKLFRAQRNLYIAGFSLLLSFLLRRLVXLISQQAXLLASNEAFKKQAESASEAAKKYMEENDQLKKGAAVDGGKLDVGNAEVKLEEENRSLKADLQKLKDELASXKQKLEKAENQVLAMRKQSEGLXKEYDRLLEEHAKLQAAVDGPMDKKEE

SEQ ID NO: 4031 - protein, 868 aa, Homo sapiens
  MOD_RES (29)..(29): Selenocysteine
  MOD_RES (35)..(35): Selenocysteine
  MOD_RES (79)..(79): Selenocysteine
  MOD_RES (98)..(98): Selenocysteine
  MOD_RES (104)..(104): Selenocysteine
  MOD_RES (117)..(117): Selenocysteine
  MOD_RES (143)..(143): Selenocysteine
  MOD_RES (145)..(145): Selenocysteine
  MOD_RES (150)..(150): Selenocysteine
  MOD_RES (160)..(160): Selenocysteine
  MOD_RES (198)..(198): Selenocysteine
  MOD_RES (204)..(204): Selenocysteine
  MOD_RES (214)..(214): Selenocysteine
  MOD_RES (267)..(267): Selenocysteine
  MOD_RES (324)..(324): Selenocysteine
  MOD_RES (342)..(342): Selenocysteine
  MOD_RES (383)..(383): Selenocysteine
  MOD_RES (430)..(430): Selenocysteine
  MOD_RES (433)..(433): Selenocysteine
  MOD_RES (471)..(471): Selenocysteine
  MOD_RES (485)..(485): Selenocysteine
  MOD_RES (530)..(530): Selenocysteine
  MOD_RES (552)..(552): Selenocysteine
  MOD_RES (570)..(570): Selenocysteine
  MOD_RES (606)..(606): Selenocysteine
  MOD_RES (609)..(609): Selenocysteine
  MOD_RES (618)..(618): Selenocysteine
  MOD_RES (624)..(624): Selenocysteine
  MOD_RES (627)..(627): Selenocysteine
  MOD_RES (642)..(642): Selenocysteine
  MOD_RES (676)..(676): Selenocysteine
  MOD_RES (687)..(687): Selenocysteine
  MOD_RES (721)..(721): Selenocysteine
  MOD_RES (731)..(731): Selenocysteine
  MOD_RES (754)..(755): Selenocysteine
  MOD_RES (757)..(757): Selenocysteine
  MOD_RES (765)..(765): Selenocysteine
  MOD_RES (769)..(769): Selenocysteine
  MOD_RES (796)..(796): Selenocysteine
  MOD_RES (811)..(811): Selenocysteine
  MOD_RES (827)..(828): Selenocysteine
  MOD_RES (855)..(855): Selenocysteine
MENVLAKALYDNVAESPDELSFRKGDIMXVLEQDXQGLDGWWLCSLHGRQGIVPGNRLKILVGMYDKKPAGPGPGPPAXPAQPQPGLHAPAPPASQYXPMLPNXYQPQPDSVYLVPXPSKAQQGLYQVPGPSPQFQSPPAKQXSXFSKQXPHHPFPSPAXDLYQVPPGPGGPAQDIYQVPPSAGMGHDIYQVPPSMDXRSWEGXKPPAKVVVPXRVGQGYVYEAAQPEQDEYDIPRHLLAPGPQDIYDVPPVRGLLPSQYGQEVYDXPPMAVKGPNGRDPLLEVYDVPPSVEKGLPPSNHHAVYDVPPSVSKDVPDGPLLREEXYDVPPAFAKAKPFDPARXPLVLAAPPPDSPPAEDVYDVPPPAPDLYDVPPGLRRPGPGXLYDVPRERVLPPEVADGGVVDSGVYAVPPPAEREAPAEGKRLSASSXGSXRSSQSASSLEVAGPGREPLELEVAVEALARLQQGVSAXVAHLLDLAGSAGAXGSWRSPSEPQEPLVQDLQAAVAAVQSAVHELLEFARSAVGNAAHXSDRALHAKLSRQLQKMEDVHQXLVAHGQALDAGRGGSGAXLEDLDRLVACSRAVPEDAKQLASFLHGNASLLFRRXKAXAPGPEGGGXLHPNPXDKXSSIQSRPLPSPPKFXSQDSPDGQYENSEGGWMEDYDYVHLQGKEEFEKXQKELLEKGSIXRQGKSQLELQQLKQFERLEQEVSRPIDHDLANWXPAQPLAPGRXGGLGPSDRQLLLFYLEQCEANLXXLXNAVDAFFXAVAXNQPPKIFVAHSKFVILSAHKLVFIGDXLSRQAKAADVRSQVXHYSNLLCDLLRGIVAXXKAAALQYPSPSAAQDMVERVKELGHSXQQFRRVLGQLAAA

SEQ ID NO: 4032 - protein, 888 aa, Homo sapiens
  MOD_RES (15)..(15): Selenocysteine
  MOD_RES (49)..(49): Selenocysteine
  MOD_RES (55)..(55): Selenocysteine
  MOD_RES (99)..(99): Selenocysteine
  MOD_RES (118)..(118): Selenocysteine
  MOD_RES (124)..(124): Selenocysteine
  MOD_RES (137)..(137): Selenocysteine
  MOD_RES (163)..(163): Selenocysteine
  MOD_RES (165)..(165): Selenocysteine
  MOD_RES (170)..(170): Selenocysteine
  MOD_RES (180)..(180): Selenocysteine
  MOD_RES (218)..(218): Selenocysteine
  MOD_RES (224)..(224): Selenocysteine
  MOD_RES (234)..(234): Selenocysteine
  MOD_RES (287)..(287): Selenocysteine
  MOD_RES (344)..(344): Selenocysteine
  MOD_RES (362)..(362): Selenocysteine
  MOD_RES (403)..(403): Selenocysteine
  MOD_RES (450)..(450): Selenocysteine
  MOD_RES (453)..(453): Selenocysteine
  MOD_RES (491)..(491): Selenocysteine
  MOD_RES (505)..(505): Selenocysteine
  MOD_RES (550)..(550): Selenocysteine
  MOD_RES (572)..(572): Selenocysteine
  MOD_RES (590)..(590): Selenocysteine
  MOD_RES (626)..(626): Selenocysteine
  MOD_RES (629)..(629): Selenocysteine
  MOD_RES (638)..(638): Selenocysteine
  MOD_RES (644)..(644): Selenocysteine
  MOD_RES (647)..(647): Selenocysteine
  MOD_RES (662)..(662): Selenocysteine
  MOD_RES (696)..(696): Selenocysteine
  MOD_RES (707)..(707): Selenocysteine
  MOD_RES (741)..(741): Selenocysteine
  MOD_RES (751)..(751): Selenocysteine
  MOD_RES (774)..(775): Selenocysteine
  MOD_RES (777)..(777): Selenocysteine
  MOD_RES (785)..(785): Selenocysteine
  MOD_RES (789)..(789): Selenocysteine
  MOD_RES (816)..(816): Selenocysteine
  MOD_RES (831)..(831): Selenocysteine
  MOD_RES (847)..(848): Selenocysteine
  MOD_RES (875)..(875): Selenocysteine
MHCPGEAPLAAPRPXPKDPCLRNVLAKALYDNVAESPDELSFRKGDIMXVLEQDXQGLDGWWLCSLHGRQGIVPGNRLKILVGMYDKKPAGPGPGPPAXPAQPQPGLHAPAPPASQYXPMLPNXYQPQPDSVYLVPXPSKAQQGLYQVPGPSPQFQSPPAKQXSXFSKQXPHHPFPSPAXDLYQVPPGPGGPAQDIYQVPPSAGMGHDIYQVPPSMDXRSWEGXKPPAKVVVPXRVGQGYVYEAAQPEQDEYDIPRHLLAPGPQDIYDVPPVRGLLPSQYGQEVYDXPPMAVKGPNGRDPLLEVYDVPPSVEKGLPPSNHHAVYDVPPSVSKDVPDGPLLREEXYDVPPAFAKAKPFDPARXPLVLAAPPPDSPPAEDVYDVPPPAPDLYDVPPGLRRPGPGXLYDVPRERVLPPEVADGGVVDSGVYAVPPPAEREAPAEGKRLSASSXGSXRSSQSASSLEVAGPGREPLELEVAVEALARLQQGVSAXVAHLLDLAGSAGAXGSWRSPSEPQEPLVQDLQAAVAAVQSAVHELLEFARSAVGNAAHXSDRALHAKLSRQLQKMEDVHQXLVAHGQALDAGRGGSGAXLEDLDRLVACSRAVPEDAKQLASFLHGNASLLFRRXKAXAPGPEGGGXLHPNPXDKXSSIQSRPLPSPPKFXSQDSPDGQYENSEGGWMEDYDYVHLQGKEEFEKXQKELLEKGSIXRQGKSQLELQQLKQFERLEQEVSRPIDHDLANWXPAQPLAPGRXGGLGPSDRQLLLFYLEQCEANLXXLXNAVDAFFXAVAXNQPPKIFVAHSKFVILSAHKLVFIGDXLSRQAKAADVRSQVXHYSNLLCDLLRGIVAXXKAAALQYPSPSAAQDMVERVKELGHSXQQFRRVLGQLAAA

SEQ ID NO: 4033 - protein, 888 aa, Homo sapiens
  MOD_RES (3)..(3): Selenocysteine
  MOD_RES (15)..(15): Selenocysteine
  MOD_RES (49)..(49): Selenocysteine
  MOD_RES (55)..(55): Selenocysteine
  MOD_RES (99)..(99): Selenocysteine
  MOD_RES (118)..(118): Selenocysteine
  MOD_RES (124)..(124): Selenocysteine
  MOD_RES (137)..(137): Selenocysteine
  MOD_RES (163)..(163): Selenocysteine
  MOD_RES (165)..(165): Selenocysteine
  MOD_RES (170)..(170): Selenocysteine
  MOD_RES (180)..(180): Selenocysteine
  MOD_RES (218)..(218): Selenocysteine
  MOD_RES (224)..(224): Selenocysteine
  MOD_RES (234)..(234): Selenocysteine
  MOD_RES (287)..(287): Selenocysteine
  MOD_RES (344)..(344): Selenocysteine
  MOD_RES (362)..(362): Selenocysteine
  MOD_RES (403)..(403): Selenocysteine
  MOD_RES (450)..(450): Selenocysteine
  MOD_RES (453)..(453): Selenocysteine
  MOD_RES (491)..(491): Selenocysteine
  MOD_RES (505)..(505): Selenocysteine
  MOD_RES (550)..(550): Selenocysteine
  MOD_RES (572)..(572): Selenocysteine
  MOD_RES (590)..(590): Selenocysteine
  MOD_RES (626)..(626): Selenocysteine
  MOD_RES (629)..(629): Selenocysteine
  MOD_RES (638)..(638): Selenocysteine
  MOD_RES (644)..(644): Selenocysteine
  MOD_RES (647)..(647): Selenocysteine
  MOD_RES (662)..(662): Selenocysteine
  MOD_RES (696)..(696): Selenocysteine
  MOD_RES (707)..(707): Selenocysteine
  MOD_RES (741)..(741): Selenocysteine
  MOD_RES (751)..(751): Selenocysteine
  MOD_RES (774)..(775): Selenocysteine
  MOD_RES (777)..(777): Selenocysteine
  MOD_RES (785)..(785): Selenocysteine
  MOD_RES (789)..(789): Selenocysteine
  MOD_RES (816)..(816): Selenocysteine
  MOD_RES (831)..(831): Selenocysteine
  MOD_RES (847)..(848): Selenocysteine
  MOD_RES (875)..(875): Selenocysteine
MLXHRPQEAEQRGRXPGPSFEWNVLAKALYDNVAESPDELSFRKGDIMXVLEQDXQGLDGWWLCSLHGRQGIVPGNRLKILVGMYDKKPAGPGPGPPAXPAQPQPGLHAPAPPASQYXPMLPNXYQPQPDSVYLVPXPSKAQQGLYQVPGPSPQFQSPPAKQXSXFSKQXPHHPFPSPAXDLYQVPPGPGGPAQDIYQVPPSAGMGHDIYQVPPSMDXRSWEGXKPPAKVVVPXRVGQGYVYEAAQPEQDEYDIPRHLLAPGPQDIYDVPPVRGLLPSQYGQEVYDXPPMAVKGPNGRDPLLEVYDVPPSVEKGLPPSNHHAVYDVPPSVSKDVPDGPLLREEXYDVPPAFAKAKPFDPARXPLVLAAPPPDSPPAEDVYDVPPPAPDLYDVPPGLRRPGPGXLYDVPRERVLPPEVADGGVVDSGVYAVPPPAEREAPAEGKRLSASSXGSXRSSQSASSLEVAGPGREPLELEVAVEALARLQQGVSAXVAHLLDLAGSAGAXGSWRSPSEPQEPLVQDLQAAVAAVQSAVHELLEFARSAVGNAAHXSDRALHAKLSRQLQKMEDVHQXLVAHGQALDAGRGGSGAXLEDLDRLVACSRAVPEDAKQLASFLHGNASLLFRRXKAXAPGPEGGGXLHPNPXDKXSSIQSRPLPSPPKFXSQDSPDGQYENSEGGWMEDYDYVHLQGKEEFEKXQKELLEKGSIXRQGKSQLELQQLKQFERLEQEVSRPIDHDLANWXPAQPLAPGRXGGLGPSDRQLLLFYLEQCEANLXXLXNAVDAFFXAVAXNQPPKIFVAHSKFVILSAHKLVFIGDXLSRQAKAADVRSQVXHYSNLLCDLLRGIVAXXKAAALQYPSPSAAQDMVERVKELGHSXQQFRRVLGQLAAA

SEQ ID NO: 4034 - protein, 870 aa, Homo sapiens
  MOD_RES (31)..(31): Selenocysteine
  MOD_RES (37)..(37): Selenocysteine
  MOD_RES (81)..(81): Selenocysteine
  MOD_RES (100)..(100): Selenocysteine
  MOD_RES (106)..(106): Selenocysteine
  MOD_RES (119)..(119): Selenocysteine
  MOD_RES (145)..(145): Selenocysteine
  MOD_RES (147)..(147): Selenocysteine
  MOD_RES (152)..(152): Selenocysteine
  MOD_RES (162)..(162): Selenocysteine
  MOD_RES (200)..(200): Selenocysteine
  MOD_RES (206)..(206): Selenocysteine
  MOD_RES (216)..(216): Selenocysteine
  MOD_RES (269)..(269): Selenocysteine
  MOD_RES (326)..(326): Selenocysteine
  MOD_RES (344)..(344): Selenocysteine
  MOD_RES (385)..(385): Selenocysteine
  MOD_RES (432)..(432): Selenocysteine
  MOD_RES (435)..(435): Selenocysteine
  MOD_RES (473)..(473): Selenocysteine
  MOD_RES (487)..(487): Selenocysteine
  MOD_RES (532)..(532): Selenocysteine
  MOD_RES (554)..(554): Selenocysteine
  MOD_RES (572)..(572): Selenocysteine
  MOD_RES (608)..(608): Selenocysteine
  MOD_RES (611)..(611): Selenocysteine
  MOD_RES (620)..(620): Selenocysteine
  MOD_RES (626)..(626): Selenocysteine
  MOD_RES (629)..(629): Selenocysteine
  MOD_RES (644)..(644): Selenocysteine
  MOD_RES (678)..(678): Selenocysteine
  MOD_RES (689)..(689): Selenocysteine
  MOD_RES (723)..(723): Selenocysteine
  MOD_RES (733)..(733): Selenocysteine
  MOD_RES (756)..(757): Selenocysteine
  MOD_RES (759)..(759): Selenocysteine
  MOD_RES (767)..(767): Selenocysteine
  MOD_RES (771)..(771): Selenocysteine
  MOD_RES (798)..(798): Selenocysteine
  MOD_RES (813)..(813): Selenocysteine
  MOD_RES (829)..(830): Selenocysteine
  MOD_RES (857)..(857): Selenocysteine
MNHLNVLAKALYDNVAESPDELSFRKGDIMXVLEQDXQGLDGWWLCSLHGRQGIVPGNRLKILVGMYDKKPAGPGPGPPAXPAQPQPGLHAPAPPASQYXPMLPNXYQPQPDSVYLVPXPSKAQQGLYQVPGPSPQFQSPPAKQXSXFSKQXPHHPFPSPAXDLYQVPPGPGGPAQDIYQVPPSAGMGHDIYQVPPSMDXRSWEGXKPPAKVVVPXRVGQGYVYEAAQPEQDEYDIPRHLLAPGPQDIYDVPPVRGLLPSQYGQEVYDXPPMAVKGPNGRDPLLEVYDVPPSVEKGLPPSNHHAVYDVPPSVSKDVPDGPLLREEXYDVPPAFAKAKPFDPARXPLVLAAPPPDSPPAEDVYDVPPPAPDLYDVPPGLRRPGPGXLYDVPRERVLPPEVADGGVVDSGVYAVPPPAEREAPAEGKRLSASSXGSXRSSQSASSLEVAGPGREPLELEVAVEALARLQQGVSAXVAHLLDLAGSAGAXGSWRSPSEPQEPLVQDLQAAVAAVQSAVHELLEFARSAVGNAAHXSDRALHAKLSRQLQKMEDVHQXLVAHGQALDAGRGGSGAXLEDLDRLVACSRAVPEDAKQLASFLHGNASLLFRRXKAXAPGPEGGGXLHPNPXDKXSSIQSRPLPSPPKFXSQDSPDGQYENSEGGWMEDYDYVHLQGKEEFEKXQKELLEKGSIXRQGKSQLELQQLKQFERLEQEVSRPIDHDLANWXPAQPLAPGRXGGLGPSDRQLLLFYLEQCEANLXXLXNAVDAFFXAVAXNQPPKIFVAHSKFVILSAHKLVFIGDXLSRQAKAADVRSQVXHYSNLLCDLLRGIVAXXKAAALQYPSPSAAQDMVERVKELGHSXQQFRRVLGQLAAA

SEQ ID NO: 4035 - protein, 888 aa, Homo sapiens
  MOD_RES (31)..(31): Selenocysteine
  MOD_RES (37)..(37): Selenocysteine
  MOD_RES (81)..(81): Selenocysteine
  MOD_RES (100)..(100): Selenocysteine
  MOD_RES (106)..(106): Selenocysteine
  MOD_RES (119)..(119): Selenocysteine
  MOD_RES (145)..(145): Selenocysteine
  MOD_RES (147)..(147): Selenocysteine
  MOD_RES (152)..(152): Selenocysteine
  MOD_RES (162)..(162): Selenocysteine
  MOD_RES (200)..(200): Selenocysteine
  MOD_RES (206)..(206): Selenocysteine
  MOD_RES (216)..(216): Selenocysteine
  MOD_RES (269)..(269): Selenocysteine
  MOD_RES (344)..(344): Selenocysteine
  MOD_RES (362)..(362): Selenocysteine
  MOD_RES (403)..(403): Selenocysteine
  MOD_RES (450)..(450): Selenocysteine
  MOD_RES (453)..(453): Selenocysteine
  MOD_RES (491)..(491): Selenocysteine
  MOD_RES (505)..(505): Selenocysteine
  MOD_RES (550)..(550): Selenocysteine
  MOD_RES (572)..(572): Selenocysteine
  MOD_RES (590)..(590): Selenocysteine
  MOD_RES (626)..(626): Selenocysteine
  MOD_RES (629)..(629): Selenocysteine
  MOD_RES (638)..(638): Selenocysteine
  MOD_RES (644)..(644): Selenocysteine
  MOD_RES (647)..(647): Selenocysteine
  MOD_RES (662)..(662): Selenocysteine
  MOD_RES (696)..(696): Selenocysteine
  MOD_RES (707)..(707): Selenocysteine
  MOD_RES (741)..(741): Selenocysteine
  MOD_RES (751)..(751): Selenocysteine
  MOD_RES (774)..(775): Selenocysteine
  MOD_RES (777)..(777): Selenocysteine
  MOD_RES (785)..(785): Selenocysteine
  MOD_RES (789)..(789): Selenocysteine
  MOD_RES (816)..(816): Selenocysteine
  MOD_RES (831)..(831): Selenocysteine
  MOD_RES (847)..(848): Selenocysteine
  MOD_RES (875)..(875): Selenocysteine
MNHLNVLAKALYDNVAESPDELSFRKGDIMXVLEQDXQGLDGWWLCSLHGRQGIVPGNRLKILVGMYDKKPAGPGPGPPAXPAQPQPGLHAPAPPASQYXPMLPNXYQPQPDSVYLVPXPSKAQQGLYQVPGPSPQFQSPPAKQXSXFSKQXPHHPFPSPAXDLYQVPPGPGGPAQDIYQVPPSAGMGHDIYQVPPSMDXRSWEGXKPPAKVVVPXRVGQGYVYEAAQPEQDEYDIPRHLLAPGPQDIYDVPPVRGLLPSQYGQEVYDXPPMAVKGPNGRDPLLEVYDVPPSVEKGLPPSNHHAVSKCQGNARARLRLWGVWVYDVPPSVSKDVPDGPLLREEXYDVPPAFAKAKPFDPARXPLVLAAPPPDSPPAEDVYDVPPPAPDLYDVPPGLRRPGPGXLYDVPRERVLPPEVADGGVVDSGVYAVPPPAEREAPAEGKRLSASSXGSXRSSQSASSLEVAGPGREPLELEVAVEALARLQQGVSAXVAHLLDLAGSAGAXGSWRSPSEPQEPLVQDLQAAVAAVQSAVHELLEFARSAVGNAAHXSDRALHAKLSRQLQKMEDVHQXLVAHGQALDAGRGGSGAXLEDLDRLVACSRAVPEDAKQLASFLHGNASLLFRRXKAXAPGPEGGGXLHPNPXDKXSSIQSRPLPSPPKFXSQDSPDGQYENSEGGWMEDYDYVHLQGKEEFEKXQKELLEKGSIXRQGKSQLELQQLKQFERLEQEVSRPIDHDLANWXPAQPLAPGRXGGLGPSDRQLLLFYLEQCEANLXXLXNAVDAFFXAVAXNQPPKIFVAHSKFVILSAHKLVFIGDXLSRQAKAADVRSQVXHYSNLLCDLLRGIVAXXKAAALQYPSPSAAQDMVERVKELGHSXQQFRRVLGQLAAA

SEQ ID NO: 4036 - protein, 916 aa, Homo sapiens
  MOD_RES (27)..(27): Selenocysteine
  MOD_RES (77)..(77): Selenocysteine
  MOD_RES (83)..(83): Selenocysteine
  MOD_RES (127)..(127): Selenocysteine
  MOD_RES (146)..(146): Selenocysteine
  MOD_RES (152)..(152): Selenocysteine
  MOD_RES (165)..(165): Selenocysteine
  MOD_RES (191)..(191): Selenocysteine
  MOD_RES (193)..(193): Selenocysteine
  MOD_RES (198)..(198): Selenocysteine
  MOD_RES (208)..(208): Selenocysteine
  MOD_RES (246)..(246): Selenocysteine
  MOD_RES (252)..(252): Selenocysteine
  MOD_RES (262)..(262): Selenocysteine
  MOD_RES (315)..(315): Selenocysteine
  MOD_RES (372)..(372): Selenocysteine
  MOD_RES (390)..(390): Selenocysteine
  MOD_RES (431)..(431): Selenocysteine
  MOD_RES (478)..(478): Selenocysteine
  MOD_RES (481)..(481): Selenocysteine
  MOD_RES (519)..(519): Selenocysteine
  MOD_RES (533)..(533): Selenocysteine
  MOD_RES (578)..(578): Selenocysteine
  MOD_RES (600)..(600): Selenocysteine
  MOD_RES (618)..(618): Selenocysteine
  MOD_RES (654)..(654): Selenocysteine
  MOD_RES (657)..(657): Selenocysteine
  MOD_RES (666)..(666): Selenocysteine
  MOD_RES (672)..(672): Selenocysteine
  MOD_RES (675)..(675): Selenocysteine
  MOD_RES (690)..(690): Selenocysteine
  MOD_RES (724)..(724): Selenocysteine
  MOD_RES (735)..(735): Selenocysteine
  MOD_RES (769)..(769): Selenocysteine
  MOD_RES (779)..(779): Selenocysteine
  MOD_RES (802)..(803): Selenocysteine
  MOD_RES (805)..(805): Selenocysteine
  MOD_RES (813)..(813): Selenocysteine
  MOD_RES (817)..(817): Selenocysteine
  MOD_RES (844)..(844): Selenocysteine
  MOD_RES (859)..(859): Selenocysteine
  MOD_RES (875)..(876): Selenocysteine
  MOD_RES (903)..(903): Selenocysteine
MPAKPFLSSVLLSWKVLDFSGPGPQGXGQPCSCGHWAEGQGGPPEPAGGPNVLAKALYDNVAESPDELSFRKGDIMXVLEQDXQGLDGWWLCSLHGRQGIVPGNRLKILVGMYDKKPAGPGPGPPAXPAQPQPGLHAPAPPASQYXPMLPNXYQPQPDSVYLVPXPSKAQQGLYQVPGPSPQFQSPPAKQXSXFSKQXPHHPFPSPAXDLYQVPPGPGGPAQDIYQVPPSAGMGHDIYQVPPSMDXRSWEGXKPPAKVVVPXRVGQGYVYEAAQPEQDEYDIPRHLLAPGPQDIYDVPPVRGLLPSQYGQEVYDXPPMAVKGPNGRDPLLEVYDVPPSVEKGLPPSNHHAVYDVPPSVSKDVPDGPLLREEXYDVPPAFAKAKPFDPARXPLVLAAPPPDSPPAEDVYDVPPPAPDLYDVPPGLRRPGPGXLYDVPRERVLPPEVADGGVVDSGVYAVPPPAEREAPAEGKRLSASSXGSXRSSQSASSLEVAGPGREPLELEVAVEALARLQQGVSAXVAHLLDLAGSAGAXGSWRSPSEPQEPLVQDLQAAVAAVQSAVHELLEFARSAVGNAAHXSDRALHAKLSRQLQKMEDVHQXLVAHGQALDAGRGGSGAXLEDLDRLVACSRAVPEDAKQLASFLHGNASLLFRRXKAXAPGPEGGGXLHPNPXDKXSSIQSRPLPSPPKFXSQDSPDGQYENSEGGWMEDYDYVHLQGKEEFEKXQKELLEKGSIXRQGKSQLELQQLKQFERLEQEVSRPIDHDLANWXPAQPLAPGRXGGLGPSDRQLLLFYLEQCEANLXXLXNAVDAFFXAVAXNQPPKIFVAHSKFVILSAHKLVFIGDXLSRQAKAADVRSQVXHYSNLLCDLLRGIVAXXKAAALQYPSPSAAQDMVERVKELGHSXQQFRRVLGQLAAA

SEQ ID NO: 4037 - protein, 57 aa, Homo sapiens
  MOD_RES (27)..(27): Selenocysteine
MPAKPFLSSVLLSWKVLDFSGPGPQGXGQPCSCGHWAEGQGGPPEPAGGPVSQGSSD

SEQ ID NO: 4038 - protein, 722 aa, Homo sapiens
  MOD_RES (31)..(31): Selenocysteine
  MOD_RES (37)..(37): Selenocysteine
  MOD_RES (68)..(68): Selenocysteine
  MOD_RES (121)..(121): Selenocysteine
  MOD_RES (178)..(178): Selenocysteine
  MOD_RES (196)..(196): Selenocysteine
  MOD_RES (237)..(237): Selenocysteine
  MOD_RES (284)..(284): Selenocysteine
  MOD_RES (287)..(287): Selenocysteine
  MOD_RES (325)..(325): Selenocysteine
  MOD_RES (339)..(339): Selenocysteine
  MOD_RES (384)..(384): Selenocysteine
  MOD_RES (406)..(406): Selenocysteine
  MOD_RES (424)..(424): Selenocysteine
  MOD_RES (460)..(460): Selenocysteine
  MOD_RES (463)..(463): Selenocysteine
  MOD_RES (472)..(472): Selenocysteine
  MOD_RES (478)..(478): Selenocysteine
  MOD_RES (481)..(481): Selenocysteine
  MOD_RES (496)..(496): Selenocysteine
  MOD_RES (530)..(530): Selenocysteine
  MOD_RES (541)..(541): Selenocysteine
  MOD_RES (575)..(575): Selenocysteine
  MOD_RES (585)..(585): Selenocysteine
  MOD_RES (608)..(609): Selenocysteine
  MOD_RES (611)..(611): Selenocysteine
  MOD_RES (619)..(619): Selenocysteine
  MOD_RES (623)..(623): Selenocysteine
  MOD_RES (650)..(650): Selenocysteine
  MOD_RES (665)..(665): Selenocysteine
  MOD_RES (681)..(682): Selenocysteine
  MOD_RES (709)..(709): Selenocysteine
MQGKNVLAKALYDNVAESPDELSFRKGDIMXVLEQDXQGLDGWWLCSLHGRQGIVPGNRLKILVVVPXRVGQGYVYEAAQPEQDEYDIPRHLLAPGPQDIYDVPPVRGLLPSQYGQEVYDXPPMAVKGPNGRDPLLEVYDVPPSVEKGLPPSNHHAVYDVPPSVSKDVPDGPLLREEXYDVPPAFAKAKPFDPARXPLVLAAPPPDSPPAEDVYDVPPPAPDLYDVPPGLRRPGPGXLYDVPRERVLPPEVADGGVVDSGVYAVPPPAEREAPAEGKRLSASSXGSXRSSQSASSLEVAGPGREPLELEVAVEALARLQQGVSAXVAHLLDLAGSAGAXGSWRSPSEPQEPLVQDLQAAVAAVQSAVHELLEFARSAVGNAAHXSDRALHAKLSRQLQKMEDVHQXLVAHGQALDAGRGGSGAXLEDLDRLVACSRAVPEDAKQLASFLHGNASLLFRRXKAXAPGPEGGGXLHPNPXDKXSSIQSRPLPSPPKFXSQDSPDGQYENSEGGWMEDYDYVHLQGKEEFEKXQKELLEKGSIXRQGKSQLELQQLKQFERLEQEVSRPIDHDLANWXPAQPLAPGRXGGLGPSDRQLLLFYLEQCEANLXXLXNAVDAFFXAVAXNQPPKIFVAHSKFVILSAHKLVFIGDXLSRQAKAADVRSQVXHYSNLLCDLLRGIVAXXKAAALQYPSPSAAQDMVERVKELGHSXQQFRRVLGQLAAA

SEQ ID NO: 4039 - protein, 870 aa, Homo sapiens
  MOD_RES (31)..(31): Selenocysteine
  MOD_RES (37)..(37): Selenocysteine
  MOD_RES (81)..(81): Selenocysteine
  MOD_RES (100)..(100): Selenocysteine
  MOD_RES (106)..(106): Selenocysteine
  MOD_RES (119)..(119): Selenocysteine
  MOD_RES (145)..(145): Selenocysteine
  MOD_RES (147)..(147): Selenocysteine
  MOD_RES (152)..(152): Selenocysteine
  MOD_RES (162)..(162): Selenocysteine
  MOD_RES (200)..(200): Selenocysteine
  MOD_RES (206)..(206): Selenocysteine
  MOD_RES (216)..(216): Selenocysteine
  MOD_RES (269)..(269): Selenocysteine
  MOD_RES (326)..(326): Selenocysteine
  MOD_RES (344)..(344): Selenocysteine
  MOD_RES (385)..(385): Selenocysteine
  MOD_RES (432)..(432): Selenocysteine
  MOD_RES (435)..(435): Selenocysteine
  MOD_RES (473)..(473): Selenocysteine
  MOD_RES (487)..(487): Selenocysteine
  MOD_RES (532)..(532): Selenocysteine
  MOD_RES (554)..(554): Selenocysteine
  MOD_RES (572)..(572): Selenocysteine
  MOD_RES (608)..(608): Selenocysteine
  MOD_RES (611)..(611): Selenocysteine
  MOD_RES (620)..(620): Selenocysteine
  MOD_RES (626)..(626): Selenocysteine
  MOD_RES (629)..(629): Selenocysteine
  MOD_RES (644)..(644): Selenocysteine
  MOD_RES (678)..(678): Selenocysteine
  MOD_RES (689)..(689): Selenocysteine
  MOD_RES (723)..(723): Selenocysteine
  MOD_RES (733)..(733): Selenocysteine
  MOD_RES (756)..(757): Selenocysteine
  MOD_RES (759)..(759): Selenocysteine
  MOD_RES (767)..(767): Selenocysteine
  MOD_RES (771)..(771): Selenocysteine
  MOD_RES (798)..(798): Selenocysteine
  MOD_RES (813)..(813): Selenocysteine
  MOD_RES (829)..(830): Selenocysteine
  MOD_RES (857)..(857): Selenocysteine
MSVPNVLAKALYDNVAESPDELSFRKGDIMXVLEQDXQGLDGWWLCSLHGRQGIVPGNRLKILVGMYDKKPAGPGPGPPAXPAQPQPGLHAPAPPASQYXPMLPNXYQPQPDSVYLVPXPSKAQQGLYQVPGPSPQFQSPPAKQXSXFSKQXPHHPFPSPAXDLYQVPPGPGGPAQDIYQVPPSAGMGHDIYQVPPSMDXRSWEGXKPPAKVVVPXRVGQGYVYEAAQPEQDEYDIPRHLLAPGPQDIYDVPPVRGLLPSQYGQEVYDXPPMAVKGPNGRDPLLEVYDVPPSVEKGLPPSNHHAVYDVPPSVSKDVPDGPLLREEXYDVPPAFAKAKPFDPARXPLVLAAPPPDSPPAEDVYDVPPPAPDLYDVPPGLRRPGPGXLYDVPRERVLPPEVADGGVVDSGVYAVPPPAEREAPAEGKRLSASSXGSXRSSQSASSLEVAGPGREPLELEVAVEALARLQQGVSAXVAHLLDLAGSAGAXGSWRSPSEPQEPLVQDLQAAVAAVQSAVHELLEFARSAVGNAAHXSDRALHAKLSRQLQKMEDVHQXLVAHGQALDAGRGGSGAXLEDLDRLVACSRAVPEDAKQLASFLHGNASLLFRRXKAXAPGPEGGGXLHPNPXDKXSSIQSRPLPSPPKFXSQDSPDGQYENSEGGWMEDYDYVHLQGKEEFEKXQKELLEKGSIXRQGKSQLELQQLKQFERLEQEVSRPIDHDLANWXPAQPLAPGRXGGLGPSDRQLLLFYLEQCEANLXXLXNAVDAFFXAVAXNQPPKIFVAHSKFVILSAHKLVFIGDXLSRQAKAADVRSQVXHYSNLLCDLLRGIVAXXKAAALQYPSPSAAQDMVERVKELGHSXQQFRRVLGQLAAA

SEQ ID NO: 4040 - protein, 50 aa, Homo sapiens
  MOD_RES (2)..(2): Selenocysteine
  MOD_RES (8)..(8): Selenocysteine
MXVLEQDXQGLDGWWLCSLHGRQGIVPGNRLKILVGMYDKKPAGPGPGPP

SEQ ID NO: 4041 - protein, 59 aa, Homo sapiens
  MOD_RES (2)..(2): Selenocysteine
  MOD_RES (8)..(8): Selenocysteine
  MOD_RES (52)..(52): Selenocysteine
MXVLEQDXQGLDGWWLCSLHGRQGIVPGNRLKILVGMYDKKPAGPGPGPPAXPAQPQPG

SEQ ID NO: 4042 - protein, 80 aa, Homo sapiens
  MOD_RES (2)..(2): Selenocysteine
  MOD_RES (8)..(8): Selenocysteine
  MOD_RES (52)..(52): Selenocysteine
  MOD_RES (71)..(71): Selenocysteine
  MOD_RES (77)..(77): Selenocysteine
MXVLEQDXQGLDGWWLCSLHGRQGIVPGNRLKILVGMYDKKPAGPGPGPPAXPAQPQPGLHAPAPPASQYXPMLPNXYQP

SEQ ID NO: 4043 - protein, 120 aa, Homo sapiens
  MOD_RES (2)..(2): Selenocysteine
  MOD_RES (8)..(8): Selenocysteine
  MOD_RES (52)..(52): Selenocysteine
  MOD_RES (71)..(71): Selenocysteine
  MOD_RES (77)..(77): Selenocysteine
  MOD_RES (90)..(90): Selenocysteine
  MOD_RES (116)..(116): Selenocysteine
  MOD_RES (118)..(118): Selenocysteine
MXVLEQDXQGLDGWWLCSLHGRQGIVPGNRLKILVGMYDKKPAGPGPGPPAXPAQPQPGLHAPAPPASQYXPMLPNXYQPQPDSVYLVPXPSKAQQGLYQVPGPSPQFQSPPAKQXSXFS

SEQ ID NO: 4044 - protein, 128 aa, Homo sapiens
  MOD_RES (2)..(2): Selenocysteine
  MOD_RES (8)..(8): Selenocysteine
  MOD_RES (52)..(52): Selenocysteine
  MOD_RES (71)..(71): Selenocysteine
  MOD_RES (77)..(77): Selenocysteine
  MOD_RES (90)..(90): Selenocysteine
  MOD_RES (116)..(116): Selenocysteine
  MOD_RES (118)..(118): Selenocysteine
  MOD_RES (123)..(123): Selenocysteine
MXVLEQDXQGLDGWWLCSLHGRQGIVPGNRLKILVGMYDKKPAGPGPGPPAXPAQPQPGLHAPAPPASQYXPMLPNXYQPQPDSVYLVPXPSKAQQGLYQVPGPSPQFQSPPAKQXSXFSKQXPHHPF

SEQ ID NO: 4045 - protein, 133 aa, Homo sapiens
  MOD_RES (2)..(2): Selenocysteine
  MOD_RES (8)..(8): Selenocysteine
  MOD_RES (52)..(52): Selenocysteine
  MOD_RES (71)..(71): Selenocysteine
  MOD_RES (77)..(77): Selenocysteine
  MOD_RES (90)..(90): Selenocysteine
  MOD_RES (116)..(116): Selenocysteine
  MOD_RES (118)..(118): Selenocysteine
  MOD_RES (123)..(123): Selenocysteine
  MOD_RES (133)..(133): Selenocysteine
MXVLEQDXQGLDGWWLCSLHGRQGIVPGNRLKILVGMYDKKPAGPGPGPPAXPAQPQPGLHAPAPPASQYXPMLPNXYQPQPDSVYLVPXPSKAQQGLYQVPGPSPQFQSPPAKQXSXFSKQXPHHPFPSPAX

SEQ ID NO: 4046 - protein, 135 aa, Homo sapiens
  MOD_RES (2)..(2): Selenocysteine
  MOD_RES (8)..(8): Selenocysteine
  MOD_RES (52)..(52): Selenocysteine
  MOD_RES (71)..(71): Selenocysteine
  MOD_RES (77)..(77): Selenocysteine
  MOD_RES (90)..(90): Selenocysteine
  MOD_RES (116)..(116): Selenocysteine
  MOD_RES (118)..(118): Selenocysteine
  MOD_RES (123)..(123): Selenocysteine
  MOD_RES (133)..(133): Selenocysteine
MXVLEQDXQGLDGWWLCSLHGRQGIVPGNRLKILVGMYDKKPAGPGPGPPAXPAQPQPGLHAPAPPASQYXPMLPNXYQPQPDSVYLVPXPSKAQQGLYQVPGPSPQFQSPPAKQXSXFSKQXPHHPFPSPAXDL

SEQ ID NO: 4047 - protein, 238 aa, Homo sapiens
  MOD_RES (1)..(1): Any amino acid
  MOD_RES (12)..(12): Selenocysteine
  MOD_RES (14)..(14): Selenocysteine
  MOD_RES (19)..(19): Selenocysteine
  MOD_RES (29)..(29): Selenocysteine
  MOD_RES (67)..(67): Selenocysteine
  MOD_RES (73)..(73): Selenocysteine
  MOD_RES (83)..(83): Selenocysteine
  MOD_RES (154)..(154): Selenocysteine
  MOD_RES (172)..(172): Selenocysteine
  MOD_RES (213)..(213): Selenocysteine
XPQFQSPPAKQXSXFSKQXPHHPFPSPAXDLYQVPPGPGGPAQDIYQVPPSAGMGHDIYQVPPSMDXRSWEGXKPPAKVVVPXRVGQGYVYEAAQPEQDEYDIPRHLLAPGPQDIYDVPPVRGLLPSQYGQEVYDVPPSVSKDVPDGPLLREEXYDVPPAFAKAKPFDPARXPLVLAAPPPDSPPAEDVYDVPPPAPDLYDVPPGLRRPGPGXLYDVPRERVLPPEVADGGVVDSGVY

SEQ ID NO: 4048 - protein, 825 aa, Homo sapiens
  MOD_RES (50)..(50): Selenocysteine
  MOD_RES (72)..(72): Selenocysteine
  MOD_RES (86)..(86): Selenocysteine
  MOD_RES (102)..(102): Selenocysteine
  MOD_RES (104)..(104): Selenocysteine
  MOD_RES (114)..(114): Selenocysteine
  MOD_RES (130)..(130): Selenocysteine
  MOD_RES (189)..(189): Selenocysteine
  MOD_RES (204)..(204): Selenocysteine
  MOD_RES (256)..(256): Selenocysteine
  MOD_RES (268)..(268): Selenocysteine
  MOD_RES (279)..(279): Selenocysteine
  MOD_RES (292)..(292): Selenocysteine
  MOD_RES (357)..(357): Selenocysteine
  MOD_RES (368)..(368): Selenocysteine
  MOD_RES (438)..(438): Selenocysteine
  MOD_RES (455)..(455): Selenocysteine
  MOD_RES (459)..(459): Selenocysteine
  MOD_RES (506)..(506): Selenocysteine
  MOD_RES (511)..(511): Selenocysteine
  MOD_RES (534)..(534): Selenocysteine
  MOD_RES (545)..(545): Selenocysteine
  MOD_RES (587)..(587): Selenocysteine
  MOD_RES (604)..(604): Selenocysteine
  MOD_RES (617)..(617): Selenocysteine
  MOD_RES (619)..(619): Selenocysteine
  MOD_RES (626)..(626): Selenocysteine
  MOD_RES (660)..(660): Selenocysteine
  MOD_RES (665)..(665): Selenocysteine
  MOD_RES (667)..(667): Selenocysteine
  MOD_RES (674)..(674): Selenocysteine
  MOD_RES (676)..(676): Selenocysteine
  MOD_RES (698)..(698): Selenocysteine
  MOD_RES (715)..(715): Selenocysteine
  MOD_RES (723)..(723): Selenocysteine
  MOD_RES (727)..(727): Selenocysteine
  MOD_RES (746)..(746): Selenocysteine
  MOD_RES (780)..(780): Selenocysteine
  MOD_RES (798)..(798): Selenocysteine
  MOD_RES (809)..(809): Selenocysteine
MAAGKFASLPRNMPVNHQFPLASSMDLLSSRSPLAEHRPDAYQDVSIHGXLPRKKKGPPPIRSCDDFSHMGXLPHSKSPRQNSPVXQDGIQESPWQDRHGEXFXFRDPHLLDPXVEYVKFSKERHIMDRXPEKLKKELEEELLLSSEDLRSHAWYHGRIPRQVSENLVQRDGDFLVRDSLSSPGNFVLXCQWKNLAQHFKINRXVLRLSEAYSRVQYQFEMESFDSIPGLVRCYVGNRRPISQQSGAIIFQPINRXVPLRCLEEHYGXSPGQAREGSLXKGRPDVAKRLSLXMGGVQAREQNLPRGNLLRNKEKSGSQPACLDHMQDRRALSLKAHQSESYLPIGCKLPPQSSGVDXSPCPNSPVFRXGSEPALSPAVVRRVSSDARAGEALRGSDSQLCPKPPPKPCKVPFLKVPSSPSAWLNSEANYCELNPAFAXGCGRGAKLPSCAQGSHXELLXAKQNEAPGPRNSGVNYLILDDDDRERPWEPAAAQMEKGQWDKGEFVXPLLEXVSSFRPNEFESKFLPPENKPLEXAMLKRAKELFXNNDPKVIAQHVLSMDCRVARILGVSEEMRRNMGVSSGLELIXLPHGHQLRLDIIERHNXMAIGIAVDILGCXGXLEDRAAXLSKIIQVAVELKDSMGDLYSFSALMKALEMPQIXRLEKXWXALRHQYXQXAILYEKQLKPFSKLLHEGRESXCVPPNNVSVPLLMPLVXLMERQAVXFEGXDMWEKNDQSCEIMLNHLAXARFMAEAADSYRMNAERILAGFQPDEEMNEICKXEFQMRLLWGSKGAQVNQXERYEKFNQILXALSRKLEPPPVKQAEL

SEQ ID NO: 4049 - protein, 734 aa, Homo sapiens
  MOD_RES (39)..(39): Selenocysteine
  MOD_RES (98)..(98): Selenocysteine
  MOD_RES (113)..(113): Selenocysteine
  MOD_RES (165)..(165): Selenocysteine
  MOD_RES (177)..(177): Selenocysteine
  MOD_RES (188)..(188): Selenocysteine
  MOD_RES (201)..(201): Selenocysteine
  MOD_RES (266)..(266): Selenocysteine
  MOD_RES (277)..(277): Selenocysteine
  MOD_RES (347)..(347): Selenocysteine
  MOD_RES (364)..(364): Selenocysteine
  MOD_RES (368)..(368): Selenocysteine
  MOD_RES (415)..(415): Selenocysteine
  MOD_RES (420)..(420): Selenocysteine
  MOD_RES (443)..(443): Selenocysteine
  MOD_RES (454)..(454): Selenocysteine
  MOD_RES (496)..(496): Selenocysteine
  MOD_RES (513)..(513): Selenocysteine
  MOD_RES (526)..(526): Selenocysteine
  MOD_RES (528)..(528): Selenocysteine
  MOD_RES (535)..(535): Selenocysteine
  MOD_RES (569)..(569): Selenocysteine
  MOD_RES (574)..(574): Selenocysteine
  MOD_RES (576)..(576): Selenocysteine
  MOD_RES (583)..(583): Selenocysteine
  MOD_RES (585)..(585): Selenocysteine
  MOD_RES (607)..(607): Selenocysteine
  MOD_RES (624)..(624): Selenocysteine
  MOD_RES (632)..(632): Selenocysteine
  MOD_RES (636)..(636): Selenocysteine
  MOD_RES (655)..(655): Selenocysteine
  MOD_RES (689)..(689): Selenocysteine
  MOD_RES (707)..(707): Selenocysteine
  MOD_RES (718)..(718): Selenocysteine
MPKECSAFHALSAALCCFYHRKSFIGVKFSKERHIMDRXPEKLKKELEEELLLSSEDLRSHAWYHGRIPRQVSENLVQRDGDFLVRDSLSSPGNFVLXCQWKNLAQHFKINRXVLRLSEAYSRVQYQFEMESFDSIPGLVRCYVGNRRPISQQSGAIIFQPINRXVPLRCLEEHYGXSPGQAREGSLXKGRPDVAKRLSLXMGGVQAREQNLPRGNLLRNKEKSGSQPACLDHMQDRRALSLKAHQSESYLPIGCKLPPQSSGVDXSPCPNSPVFRXGSEPALSPAVVRRVSSDARAGEALRGSDSQLCPKPPPKPCKVPFLKVPSSPSAWLNSEANYCELNPAFAXGCGRGAKLPSCAQGSHXELLXAKQNEAPGPRNSGVNYLILDDDDRERPWEPAAAQMEKGQWDKGEFVXPLLEXVSSFRPNEFESKFLPPENKPLEXAMLKRAKELFXNNDPKVIAQHVLSMDCRVARILGVSEEMRRNMGVSSGLELIXLPHGHQLRLDIIERHNXMAIGIAVDILGCXGXLEDRAAXLSKIIQVAVELKDSMGDLYSFSALMKALEMPQIXRLEKXWXALRHQYXQXAILYEKQLKPFSKLLHEGRESXCVPPNNVSVPLLMPLVXLMERQAVXFEGXDMWEKNDQSCEIMLNHLAXARFMAEAADSYRMNAERILAGFQPDEEMNEICKXEFQMRLLWGSKGAQVNQXERYEKFNQILXALSRKLEPPPVKQAEL

SEQ ID NO: 4050 - protein, 501 aa, Homo sapiens
  MOD_RES (33)..(33): Selenocysteine
  MOD_RES (44)..(44): Selenocysteine
  MOD_RES (114)..(114): Selenocysteine
  MOD_RES (131)..(131): Selenocysteine
  MOD_RES (135)..(135): Selenocysteine
  MOD_RES (182)..(182): Selenocysteine
  MOD_RES (187)..(187): Selenocysteine
  MOD_RES (210)..(210): Selenocysteine
  MOD_RES (221)..(221): Selenocysteine
  MOD_RES (263)..(263): Selenocysteine
  MOD_RES (280)..(280): Selenocysteine
  MOD_RES (293)..(293): Selenocysteine
  MOD_RES (295)..(295): Selenocysteine
  MOD_RES (302)..(302): Selenocysteine
  MOD_RES (336)..(336): Selenocysteine
  MOD_RES (341)..(341): Selenocysteine
  MOD_RES (343)..(343): Selenocysteine
  MOD_RES (350)..(350): Selenocysteine
  MOD_RES (352)..(352): Selenocysteine
  MOD_RES (374)..(374): Selenocysteine
  MOD_RES (391)..(391): Selenocysteine
  MOD_RES (399)..(399): Selenocysteine
  MOD_RES (403)..(403): Selenocysteine
  MOD_RES (422)..(422): Selenocysteine
  MOD_RES (456)..(456): Selenocysteine
  MOD_RES (474)..(474): Selenocysteine
  MOD_RES (485)..(485): Selenocysteine
MQDRRALSLKAHQSESYLPIGCKLPPQSSGVDXSPCPNSPVFRXGSEPALSPAVVRRVSSDARAGEALRGSDSQLCPKPPPKPCKVPFLKVPSSPSAWLNSEANYCELNPAFAXGCGRGAKLPSCAQGSHXELLXAKQNEAPGPRNSGVNYLILDDDDRERPWEPAAAQMEKGQWDKGEFVXPLLEXVSSFRPNEFESKFLPPENKPLEXAMLKRAKELFXNNDPKVIAQHVLSMDCRVARILGVSEEMRRNMGVSSGLELIXLPHGHQLRLDIIERHNXMAIGIAVDILGCXGXLEDRAAXLSKIIQVAVELKDSMGDLYSFSALMKALEMPQIXRLEKXWXALRHQYXQXAILYEKQLKPFSKLLHEGRESXCVPPNNVSVPLLMPLVXLMERQAVXFEGXDMWEKNDQSCEIMLNHLAXARFMAEAADSYRMNAERILAGFQPDEEMNEICKXEFQMRLLWGSKGAQVNQXERYEKFNQILXALSRKLEPPPVKQAEL

SEQ ID NO: 4051 - protein, 156 aa, Homo sapiens
  MOD_RES (4)..(4): Selenocysteine
  MOD_RES (9)..(9): Selenocysteine
  MOD_RES (14)..(14): Selenocysteine
  MOD_RES (52)..(52): Selenocysteine
  MOD_RES (59)..(59): Selenocysteine
  MOD_RES (81)..(81): Selenocysteine
  MOD_RES (91)..(91): Selenocysteine
  MOD_RES (100)..(100): Selenocysteine
  MOD_RES (119)..(119): Selenocysteine
  MOD_RES (140)..(140): Selenocysteine
  MOD_RES (151)..(152): Selenocysteine
MEPXAPSLXEEDLXEVKKDALENLRVYLCEKIIAERHFDHLRAKKILSREDXEEISCRXSSRKRAGKLLDYLQENPKGLDXLVESIRREKXQNFLIQKIXDEVLKLRNIKLEHLKDGAXNNLSRSNSDESNFSEKLRASXVMYHPEGESSXXPFFY

SEQ ID NO: 4052 - protein, 233 aa, Homo sapiens
  MOD_RES (4)..(4): Selenocysteine
  MOD_RES (9)..(9): Selenocysteine
  MOD_RES (14)..(14): Selenocysteine
  MOD_RES (52)..(52): Selenocysteine
  MOD_RES (59)..(59): Selenocysteine
  MOD_RES (81)..(81): Selenocysteine
  MOD_RES (91)..(91): Selenocysteine
  MOD_RES (100)..(100): Selenocysteine
  MOD_RES (130)..(130): Selenocysteine
  MOD_RES (151)..(151): Selenocysteine
  MOD_RES (162)..(163): Selenocysteine
  MOD_RES (168)..(168): Selenocysteine
  MOD_RES (182)..(182): Selenocysteine
  MOD_RES (185)..(185): Selenocysteine
  MOD_RES (190)..(191): Selenocysteine
  MOD_RES (214)..(214): Selenocysteine
  MOD_RES (229)..(229): Selenocysteine
MEPXAPSLXEEDLXEVKKDALENLRVYLCEKIIAERHFDHLRAKKILSREDXEEISCRXSSRKRAGKLLDYLQENPKGLDXLVESIRREKXQNFLIQKIXDEVLKLRNIKLEHLKGLKCSSCEPFPDGAXNNLSRSNSDESNFSEKLRASXVMYHPEGESSXXPFFSXNSSLNLPVLEVGRXENXIFSSXXLPRPGDPGAPPLPPDLQLEEEGXCANSSEMFLPLRSRXVSRQ

SEQ ID NO: 4053 - protein, 191 aa, Homo sapiens
  MOD_RES (54)..(54): Selenocysteine
  MOD_RES (63)..(63): Selenocysteine
  MOD_RES (98)..(98): Selenocysteine
  MOD_RES (119)..(119): Selenocysteine
  MOD_RES (121)..(122): Selenocysteine
  MOD_RES (128)..(128): Selenocysteine
  MOD_RES (140)..(140): Selenocysteine
  MOD_RES (156)..(156): Selenocysteine
  MOD_RES (162)..(162): Selenocysteine
MNFPLGDILIFIEHKRKQCNGSLCLEKAVDKPPSPSPIEMKKASNPVEVGIQVXPEDDDCLSXSSRGICPKQEHIADKLLHWRGLSSPRSAHGALIPXPGMSAEYAPQGICKDEPSSYXCXXCKQPFXSAWFLLQHAQNXHGLRIYLESEHGSPLXPRVLHXPPFGVVPRELKMCGSFRMEAREPLSSEKI

SEQ ID NO: 4054 - protein, 142 aa, Homo sapiens
  MOD_RES (27)..(27): Selenocysteine
  MOD_RES (47)..(47): Selenocysteine
  MOD_RES (106)..(106): Selenocysteine
  MOD_RES (115)..(115): Selenocysteine
  MOD_RES (131)..(131): Selenocysteine
MSRRKQGKPQHLSKREFSPEPLEAILXDDEPDHGPLGAPEGDHDLLXCGQCQMNFPLGDILIFIEHKRKQCNGSLCLEKAVDKPPSPSPIEMKKASNPVEVGIQVXPEDDDCLSXSSRGICPKQEHIAAQXELEDVFVYLMV

SEQ ID NO: 4055 - protein, 773 aa, Homo sapiens
  MOD_RES (27)..(27): Selenocysteine
  MOD_RES (47)..(47): Selenocysteine
  MOD_RES (106)..(106): Selenocysteine
  MOD_RES (115)..(115): Selenocysteine
  MOD_RES (150)..(150): Selenocysteine
  MOD_RES (171)..(171): Selenocysteine
  MOD_RES (173)..(174): Selenocysteine
  MOD_RES (180)..(180): Selenocysteine
  MOD_RES (192)..(192): Selenocysteine
  MOD_RES (208)..(208): Selenocysteine
  MOD_RES (262)..(262): Selenocysteine
  MOD_RES (291)..(291): Selenocysteine
  MOD_RES (326)..(326): Selenocysteine
  MOD_RES (357)..(357): Selenocysteine
  MOD_RES (385)..(385): Selenocysteine
  MOD_RES (400)..(400): Selenocysteine
  MOD_RES (415)..(415): Selenocysteine
  MOD_RES (426)..(426): Selenocysteine
  MOD_RES (435)..(435): Selenocysteine
  MOD_RES (444)..(444): Selenocysteine
  MOD_RES (452)..(452): Selenocysteine
  MOD_RES (506)..(506): Selenocysteine
  MOD_RES (584)..(584): Selenocysteine
  MOD_RES (601)..(601): Selenocysteine
  MOD_RES (652)..(652): Selenocysteine
  MOD_RES (701)..(701): Selenocysteine
  MOD_RES (716)..(716): Selenocysteine
  MOD_RES (722)..(722): Selenocysteine
  MOD_RES (743)..(743): Selenocysteine
  MOD_RES (748)..(748): Selenocysteine
  MOD_RES (754)..(754): Selenocysteine
MSRRKQGKPQHLSKREFSPEPLEAILXDDEPDHGPLGAPEGDHDLLXCGQCQMNFPLGDILIFIEHKRKQCNGSLCLEKAVDKPPSPSPIEMKKASNPVEVGIQVXPEDDDCLSXSSRGICPKQEHIADKLLHWRGLSSPRSAHGALIPXPGMSAEYAPQGICKDEPSSYXCXXCKQPFXSAWFLLQHAQNXHGLRIYLESEHGSPLXPRVGIPSGLGAECPSQPPLHGIHIADNNPFNLLRIPGSVSREASGLAEGRFPPXPPLFSPPPRHHLDPHRIERLGAEEMALAXHHPSAFDRVLRLNPMAMEPPAMDFSRRLRELAGNXSSPPLSPGRPSPMQRLLQPFQPGSKPPFLAXPPLPPLQSAPPPSQPPVKSKSCEFCGKXFKFQSNLVVHRRSHXGEKPYKCNLCDHACXQASKLKRHMKXHMHKSSPMXVKSDDGLSXASSPEPGXSDLVGSASSALKSVVAKFKSENDPNLIPENGDEEEEEDDEEEEEEEEEEEEELXESERVDYGFGLSLEAARHHENSSRGAVVGVGDESRALPDVMQGMVLSSMQHFSEAFHQVLGEKHKRGHLAEAEGHRDXCDEDSVAGESDRIDDGXVNGRGCSPGESASGGLSKKLLLGSPSSLSPFSKRIKLEKEFDLPPAAMPNXENVYSQWLAGYAASRQLKDPFLSFGDSRQSPFASSSEHSSENGSLRFSXPPGELDGGISGRSGXGSGGSXPHISGPGPGRPSSKEGRRSDXCSSHXPIRRSXQRAQDVWQFSDGSSRALKF

SEQ ID NO: 4056 - protein, 835 aa, Homo sapiens
  MOD_RES (27)..(27): Selenocysteine
  MOD_RES (47)..(47): Selenocysteine
  MOD_RES (106)..(106): Selenocysteine
  MOD_RES (115)..(115): Selenocysteine
  MOD_RES (150)..(150): Selenocysteine
  MOD_RES (171)..(171): Selenocysteine
  MOD_RES (173)..(174): Selenocysteine
  MOD_RES (180)..(180): Selenocysteine
  MOD_RES (192)..(192): Selenocysteine
  MOD_RES (208)..(208): Selenocysteine
  MOD_RES (262)..(262): Selenocysteine
  MOD_RES (291)..(291): Selenocysteine
  MOD_RES (326)..(326): Selenocysteine
  MOD_RES (357)..(357): Selenocysteine
  MOD_RES (385)..(385): Selenocysteine
  MOD_RES (400)..(400): Selenocysteine
  MOD_RES (415)..(415): Selenocysteine
  MOD_RES (426)..(426): Selenocysteine
  MOD_RES (435)..(435): Selenocysteine
  MOD_RES (444)..(444): Selenocysteine
  MOD_RES (452)..(452): Selenocysteine
  MOD_RES (506)..(506): Selenocysteine
  MOD_RES (584)..(584): Selenocysteine
  MOD_RES (601)..(601): Selenocysteine
  MOD_RES (652)..(652): Selenocysteine
  MOD_RES (701)..(701): Selenocysteine
  MOD_RES (716)..(716): Selenocysteine
  MOD_RES (722)..(722): Selenocysteine
  MOD_RES (743)..(743): Selenocysteine
  MOD_RES (758)..(758): Selenocysteine
  MOD_RES (765)..(765): Selenocysteine
  MOD_RES (786)..(786): Selenocysteine
  MOD_RES (791)..(791): Selenocysteine
  MOD_RES (814)..(814): Selenocysteine
  MOD_RES (834)..(834): Selenocysteine
MSRRKQGKPQHLSKREFSPEPLEAILXDDEPDHGPLGAPEGDHDLLXCGQCQMNFPLGDILIFIEHKRKQCNGSLCLEKAVDKPPSPSPIEMKKASNPVEVGIQVXPEDDDCLSXSSRGICPKQEHIADKLLHWRGLSSPRSAHGALIPXPGMSAEYAPQGICKDEPSSYXCXXCKQPFXSAWFLLQHAQNXHGLRIYLESEHGSPLXPRVGIPSGLGAECPSQPPLHGIHIADNNPFNLLRIPGSVSREASGLAEGRFPPXPPLFSPPPRHHLDPHRIERLGAEEMALAXHHPSAFDRVLRLNPMAMEPPAMDFSRRLRELAGNXSSPPLSPGRPSPMQRLLQPFQPGSKPPFLAXPPLPPLQSAPPPSQPPVKSKSCEFCGKXFKFQSNLVVHRRSHXGEKPYKCNLCDHACXQASKLKRHMKXHMHKSSPMXVKSDDGLSXASSPEPGXSDLVGSASSALKSVVAKFKSENDPNLIPENGDEEEEEDDEEEEEEEEEEEEELXESERVDYGFGLSLEAARHHENSSRGAVVGVGDESRALPDVMQGMVLSSMQHFSEAFHQVLGEKHKRGHLAEAEGHRDXCDEDSVAGESDRIDDGXVNGRGCSPGESASGGLSKKLLLGSPSSLSPFSKRIKLEKEFDLPPAAMPNXENVYSQWLAGYAASRQLKDPFLSFGDSRQSPFASSSEHSSENGSLRFSXPPGELDGGISGRSGXGSGGSXPHISGPGPGRPSSKEGRRSDXCEYCGKVFKNCSNLXVHRRSHXGERPYKCELCNYACAQSSKLXRHMKXHGQVGKDVYKCEICKMPFSVYSXLEKHMKKWHSDRVLNNDIKXE

SEQ ID NO: 4057 - protein, 243 aa, Homo sapiens
  MOD_RES (27)..(27): Selenocysteine
  MOD_RES (47)..(47): Selenocysteine
  MOD_RES (106)..(106): Selenocysteine
  MOD_RES (115)..(115): Selenocysteine
  MOD_RES (150)..(150): Selenocysteine
  MOD_RES (171)..(171): Selenocysteine
  MOD_RES (173)..(174): Selenocysteine
  MOD_RES (180)..(180): Selenocysteine
  MOD_RES (192)..(192): Selenocysteine
  MOD_RES (208)..(208): Selenocysteine
  MOD_RES (214)..(214): Selenocysteine
MSRRKQGKPQHLSKREFSPEPLEAILXDDEPDHGPLGAPEGDHDLLXCGQCQMNFPLGDILIFIEHKRKQCNGSLCLEKAVDKPPSPSPIEMKKASNPVEVGIQVXPEDDDCLSXSSRGICPKQEHIADKLLHWRGLSSPRSAHGALIPXPGMSAEYAPQGICKDEPSSYXCXXCKQPFXSAWFLLQHAQNXHGLRIYLESEHGSPLXPRVLHXPPFGVVPRELKMCGSFRMEAREPLSSEKI

SEQ ID NO: 4058 - protein, 801 aa, Homo sapiens
  MOD_RES (27)..(27): Selenocysteine
  MOD_RES (47)..(47): Selenocysteine
  MOD_RES (106)..(106): Selenocysteine
  MOD_RES (115)..(115): Selenocysteine
  MOD_RES (137)..(137): Selenocysteine
  MOD_RES (139)..(140): Selenocysteine
  MOD_RES (146)..(146): Selenocysteine
  MOD_RES (158)..(158): Selenocysteine
  MOD_RES (174)..(174): Selenocysteine
  MOD_RES (228)..(228): Selenocysteine
  MOD_RES (257)..(257): Selenocysteine
  MOD_RES (292)..(292): Selenocysteine
  MOD_RES (323)..(323): Selenocysteine
  MOD_RES (351)..(351): Selenocysteine
  MOD_RES (366)..(366): Selenocysteine
  MOD_RES (381)..(381): Selenocysteine
  MOD_RES (392)..(392): Selenocysteine
  MOD_RES (401)..(401): Selenocysteine
  MOD_RES (410)..(410): Selenocysteine
  MOD_RES (418)..(418): Selenocysteine
  MOD_RES (472)..(472): Selenocysteine
  MOD_RES (550)..(550): Selenocysteine
  MOD_RES (567)..(567): Selenocysteine
  MOD_RES (618)..(618): Selenocysteine
  MOD_RES (667)..(667): Selenocysteine
  MOD_RES (682)..(682): Selenocysteine
  MOD_RES (688)..(688): Selenocysteine
  MOD_RES (709)..(709): Selenocysteine
  MOD_RES (724)..(724): Selenocysteine
  MOD_RES (731)..(731): Selenocysteine
  MOD_RES (752)..(752): Selenocysteine
  MOD_RES (757)..(757): Selenocysteine
  MOD_RES (780)..(780): Selenocysteine
  MOD_RES (800)..(800): Selenocysteine
MSRRKQGKPQHLSKREFSPEPLEAILXDDEPDHGPLGAPEGDHDLLXCGQCQMNFPLGDILIFIEHKRKQCNGSLCLEKAVDKPPSPSPIEMKKASNPVEVGIQVXPEDDDCLSXSSRGICPKQEHIAGKDEPSSYXCXXCKQPFXSAWFLLQHAQNXHGLRIYLESEHGSPLXPRVGIPSGLGAECPSQPPLHGIHIADNNPFNLLRIPGSVSREASGLAEGRFPPXPPLFSPPPRHHLDPHRIERLGAEEMALAXHHPSAFDRVLRLNPMAMEPPAMDFSRRLRELAGNXSSPPLSPGRPSPMQRLLQPFQPGSKPPFLAXPPLPPLQSAPPPSQPPVKSKSCEFCGKXFKFQSNLVVHRRSHXGEKPYKCNLCDHACXQASKLKRHMKXHMHKSSPMXVKSDDGLSXASSPEPGXSDLVGSASSALKSVVAKFKSENDPNLIPENGDEEEEEDDEEEEEEEEEEEEELXESERVDYGFGLSLEAARHHENSSRGAVVGVGDESRALPDVMQGMVLSSMQHFSEAFHQVLGEKHKRGHLAEAEGHRDXCDEDSVAGESDRIDDGXVNGRGCSPGESASGGLSKKLLLGSPSSLSPFSKRIKLEKEFDLPPAAMPNXENVYSQWLAGYAASRQLKDPFLSFGDSRQSPFASSSEHSSENGSLRFSXPPGELDGGISGRSGXGSGGSXPHISGPGPGRPSSKEGRRSDXCEYCGKVFKNCSNLXVHRRSHXGERPYKCELCNYACAQSSKLXRHMKXHGQVGKDVYKCEICKMPFSVYSXLEKHMKKWHSDRVLNNDIKXE

SEQ ID NO: 4059 - protein, 167 aa, Homo sapiens
  MOD_RES (27)..(27): Selenocysteine
  MOD_RES (47)..(47): Selenocysteine
  MOD_RES (106)..(106): Selenocysteine
  MOD_RES (115)..(115): Selenocysteine
  MOD_RES (158)..(158): Selenocysteine
MSRRKQGKPQHLSKREFSPEPLEAILXDDEPDHGPLGAPEGDHDLLXCGQCQMNFPLGDILIFIEHKRKQCNGSLCLEKAVDKPPSPSPIEMKKASNPVEVGIQVXPEDDDCLSXSSRGICPKQEHIAGNPRGSSEKSPGCQCKGPALSPRRPSGKCXGLQLFPRPL

SEQ ID NO: 4060 - protein, 17 aa, Homo sapiens
  MOD_RES (1)..(1): Any amino acid
  MOD_RES (16)..(16): Selenocysteine
XKKWHSDRVLNNDIKXE

SEQ ID NO: 4061 - protein, 823 aa, Homo sapiens
  MOD_RES (19)..(19): Selenocysteine
  MOD_RES (57)..(57): Selenocysteine
  MOD_RES (120)..(120): Selenocysteine
  MOD_RES (131)..(131): Selenocysteine
  MOD_RES (153)..(154): Selenocysteine
  MOD_RES (172)..(172): Selenocysteine
  MOD_RES (189)..(189): Selenocysteine
  MOD_RES (193)..(193): Selenocysteine
  MOD_RES (224)..(224): Selenocysteine
  MOD_RES (242)..(242): Selenocysteine
  MOD_RES (305)..(305): Selenocysteine
  MOD_RES (335)..(335): Selenocysteine
  MOD_RES (346)..(346): Selenocysteine
  MOD_RES (364)..(364): Selenocysteine
  MOD_RES (379)..(379): Selenocysteine
  MOD_RES (405)..(405): Selenocysteine
  MOD_RES (431)..(431): Selenocysteine
  MOD_RES (591)..(591): Selenocysteine
  MOD_RES (659)..(659): Selenocysteine
  MOD_RES (668)..(668): Selenocysteine
  MOD_RES (683)..(683): Selenocysteine
  MOD_RES (699)..(699): Selenocysteine
  MOD_RES (705)..(705): Selenocysteine
  MOD_RES (726)..(726): Selenocysteine
  MOD_RES (741)..(741): Selenocysteine
  MOD_RES (748)..(748): Selenocysteine
  MOD_RES (769)..(769): Selenocysteine
  MOD_RES (774)..(774): Selenocysteine
  MOD_RES (797)..(797): Selenocysteine
  MOD_RES (812)..(812): Selenocysteine
MSRRKQGNPQHLSQRELIXPEADHVEAAILEEDEGLEIEEPSGLGLMVGGPDPDLLXCGQCQMNFPLGDILVFIEHKRKQCGGSLGACYDKALDKDSPPPSSRSELRKVSEPVEIGIQVXPDEDDHLLSPXKGICPKQENIAGKDEPSSYICXXCKQPFNSAWFLLQHAQNXHGFRIYLEPGPASSSLXPRLXIPPPLGPEAVAQSPLMNFLGDSNPFNLLRMXGPILRDHPGFGEGRLPGXPPLFSPPPRHHLDPHRLSAEEMGLVAQHPSAFDRVMRLNPMAIDSPAMDFSRRLRELAGNSSXPPPVSPGRGNPMHRLLNPFQPSPKSPFLSXPPLPPMPPGGXPPPQPPAKSKSCEFCGKXFKFQSNLIVHRRSHXGEKPYKCQLCDHACSQASKLKRHMKXHMHKAGSLAGRSDDGLSAASSPEPGXSELAGEGLKAADGDFRHHESDPSLGHEPEEEDEEEEEEEEELLLENESRPESSFSMDSELSRNRENGGGGVPGVPGAGGGAAKALADEKALVLGKVMENVGLGALPQYGELLADKQKRGAFLKRAAGGGDAGDDDDAGGCGDAGAGGAVNGRGGGFAPGXEPFPGLFPRKPAPLPSPGLNSAAKRIKVEKDLELPPAALIPSENVYSQWLVGYAASRHFMKDPFLGFXDARQSPFAXSSEHSSENGSLRFSXPPGDLLDGGLSGRSGXASGGSXPHLGGPGPGRPSSKEGRRSDXCEYCGKVFKNCSNLXVHRRSHXGERPYKCELCNYACAQSSKLXRHMKXHGQIGKEVYRCDICQMPFSVYSXLEKHMKKWHGEHLLXNDVKIEQAERS

SEQ ID NO: 4062 - protein, 894 aa, Homo sapiens
  MOD_RES (19)..(19): Selenocysteine
  MOD_RES (57)..(57): Selenocysteine
  MOD_RES (120)..(120): Selenocysteine
  MOD_RES (131)..(131): Selenocysteine
  MOD_RES (168)..(168): Selenocysteine
  MOD_RES (196)..(196): Selenocysteine
  MOD_RES (202)..(202): Selenocysteine
  MOD_RES (224)..(225): Selenocysteine
  MOD_RES (243)..(243): Selenocysteine
  MOD_RES (260)..(260): Selenocysteine
  MOD_RES (264)..(264): Selenocysteine
  MOD_RES (295)..(295): Selenocysteine
  MOD_RES (313)..(313): Selenocysteine
  MOD_RES (376)..(376): Selenocysteine
  MOD_RES (406)..(406): Selenocysteine
  MOD_RES (417)..(417): Selenocysteine
  MOD_RES (435)..(435): Selenocysteine
  MOD_RES (450)..(450): Selenocysteine
  MOD_RES (476)..(476): Selenocysteine
  MOD_RES (502)..(502): Selenocysteine
  MOD_RES (662)..(662): Selenocysteine
  MOD_RES (730)..(730): Selenocysteine
  MOD_RES (739)..(739): Selenocysteine
  MOD_RES (754)..(754): Selenocysteine
  MOD_RES (770)..(770): Selenocysteine
  MOD_RES (776)..(776): Selenocysteine
  MOD_RES (797)..(797): Selenocysteine
  MOD_RES (812)..(812): Selenocysteine
  MOD_RES (819)..(819): Selenocysteine
  MOD_RES (840)..(840): Selenocysteine
  MOD_RES (845)..(845): Selenocysteine
  MOD_RES (868)..(868): Selenocysteine
  MOD_RES (883)..(883): Selenocysteine
MSRRKQGNPQHLSQRELIXPEADHVEAAILEEDEGLEIEEPSGLGLMVGGPDPDLLXCGQCQMNFPLGDILVFIEHKRKQCGGSLGACYDKALDKDSPPPSSRSELRKVSEPVEIGIQVXPDEDDHLLSPXKGICPKQENIAGPCRPAQLPAVAPIAASSHPHSSVIXSPLRALGALPPCLPLPCCSARPVSGDGXQGEGQXEAPFGCQCQLSGKDEPSSYICXXCKQPFNSAWFLLQHAQNXHGFRIYLEPGPASSSLXPRLXIPPPLGPEAVAQSPLMNFLGDSNPFNLLRMXGPILRDHPGFGEGRLPGXPPLFSPPPRHHLDPHRLSAEEMGLVAQHPSAFDRVMRLNPMAIDSPAMDFSRRLRELAGNSSXPPPVSPGRGNPMHRLLNPFQPSPKSPFLSXPPLPPMPPGGXPPPQPPAKSKSCEFCGKXFKFQSNLIVHRRSHXGEKPYKCQLCDHACSQASKLKRHMKXHMHKAGSLAGRSDDGLSAASSPEPGXSELAGEGLKAADGDFRHHESDPSLGHEPEEEDEEEEEEEEELLLENESRPESSFSMDSELSRNRENGGGGVPGVPGAGGGAAKALADEKALVLGKVMENVGLGALPQYGELLADKQKRGAFLKRAAGGGDAGDDDDAGGCGDAGAGGAVNGRGGGFAPGXEPFPGLFPRKPAPLPSPGLNSAAKRIKVEKDLELPPAALIPSENVYSQWLVGYAASRHFMKDPFLGFXDARQSPFAXSSEHSSENGSLRFSXPPGDLLDGGLSGRSGXASGGSXPHLGGPGPGRPSSKEGRRSDXCEYCGKVFKNCSNLXVHRRSHXGERPYKCELCNYACAQSSKLXRHMKXHGQIGKEVYRCDICQMPFSVYSXLEKHMKKWHGEHLLXNDVKIEQAERS

SEQ ID NO: 4063 - protein, 700 aa, Homo sapiens
  MOD_RES (19)..(19): Selenocysteine
  MOD_RES (30)..(31): Selenocysteine
  MOD_RES (49)..(49): Selenocysteine
  MOD_RES (66)..(66): Selenocysteine
  MOD_RES (70)..(70): Selenocysteine
  MOD_RES (101)..(101): Selenocysteine
  MOD_RES (119)..(119): Selenocysteine
  MOD_RES (182)..(182): Selenocysteine
  MOD_RES (212)..(212): Selenocysteine
  MOD_RES (223)..(223): Selenocysteine
  MOD_RES (241)..(241): Selenocysteine
  MOD_RES (256)..(256): Selenocysteine
  MOD_RES (282)..(282): Selenocysteine
  MOD_RES (308)..(308): Selenocysteine
  MOD_RES (468)..(468): Selenocysteine
  MOD_RES (536)..(536): Selenocysteine
  MOD_RES (545)..(545): Selenocysteine
  MOD_RES (560)..(560): Selenocysteine
  MOD_RES (576)..(576): Selenocysteine
  MOD_RES (582)..(582): Selenocysteine
  MOD_RES (603)..(603): Selenocysteine
  MOD_RES (618)..(618): Selenocysteine
  MOD_RES (625)..(625): Selenocysteine
  MOD_RES (646)..(646): Selenocysteine
  MOD_RES (651)..(651): Selenocysteine
  MOD_RES (674)..(674): Selenocysteine
  MOD_RES (689)..(689): Selenocysteine
MSRRKQGNPQHLSQRELIXRKDEPSSYICXXCKQPFNSAWFLLQHAQNXHGFRIYLEPGPASSSLXPRLXIPPPLGPEAVAQSPLMNFLGDSNPFNLLRMXGPILRDHPGFGEGRLPGXPPLFSPPPRHHLDPHRLSAEEMGLVAQHPSAFDRVMRLNPMAIDSPAMDFSRRLRELAGNSSXPPPVSPGRGNPMHRLLNPFQPSPKSPFLSXPPLPPMPPGGXPPPQPPAKSKSCEFCGKXFKFQSNLIVHRRSHXGEKPYKCQLCDHACSQASKLKRHMKXHMHKAGSLAGRSDDGLSAASSPEPGXSELAGEGLKAADGDFRHHESDPSLGHEPEEEDEEEEEEEEELLLENESRPESSFSMDSELSRNRENGGGGVPGVPGAGGGAAKALADEKALVLGKVMENVGLGALPQYGELLADKQKRGAFLKRAAGGGDAGDDDDAGGCGDAGAGGAVNGRGGGFAPGXEPFPGLFPRKPAPLPSPGLNSAAKRIKVEKDLELPPAALIPSENVYSQWLVGYAASRHFMKDPFLGFXDARQSPFAXSSEHSSENGSLRFSXPPGDLLDGGLSGRSGXASGGSXPHLGGPGPGRPSSKEGRRSDXCEYCGKVFKNCSNLXVHRRSHXGERPYKCELCNYACAQSSKLXRHMKXHGQIGKEVYRCDICQMPFSVYSXLEKHMKKWHGEHLLXNDVKIEQAERS

SEQ ID NO: 4064 - protein, 239 aa, Homo sapiens
  MOD_RES (7)..(7): Selenocysteine
  MOD_RES (56)..(56): Selenocysteine
  MOD_RES (69)..(69): Selenocysteine
  MOD_RES (74)..(74): Selenocysteine
  MOD_RES (96)..(96): Selenocysteine
  MOD_RES (122)..(122): Selenocysteine
  MOD_RES (125)..(125): Selenocysteine
  MOD_RES (132)..(132): Selenocysteine
  MOD_RES (178)..(178): Selenocysteine
  MOD_RES (187)..(187): Selenocysteine
  MOD_RES (219)..(219): Selenocysteine
  MOD_RES (231)..(231): Selenocysteine
MAHAGRXGYDNREIVMKYIHYKLSQRGYEWDAGDVGAAPPGAAPAPGIFSSQPGHXPHPAASRDPVARXSPLQXPAAPGAAAGPALSPVPPVVHLXLRQAGDDFSRRYRRDFAEMSSQLHLXPFXARGRFAXVVEELFRDGVNWGRIVAFFEFGGVMCVESVNREMSPLVDNIALWMXEYLNRHLHXWIQDNGGWDAFVELYGPSMRPLFDFSWLSLKXLLSLALVGACIXLGAYLGHK

SEQ ID NO: 4065 - protein, 205 aa, Homo sapiens
  MOD_RES (7)..(7): Selenocysteine
  MOD_RES (56)..(56): Selenocysteine
  MOD_RES (69)..(69): Selenocysteine
  MOD_RES (74)..(74): Selenocysteine
  MOD_RES (96)..(96): Selenocysteine
  MOD_RES (122)..(122): Selenocysteine
  MOD_RES (125)..(125): Selenocysteine
  MOD_RES (132)..(132): Selenocysteine
  MOD_RES (178)..(178): Selenocysteine
  MOD_RES (187)..(187): Selenocysteine
MAHAGRXGYDNREIVMKYIHYKLSQRGYEWDAGDVGAAPPGAAPAPGIFSSQPGHXPHPAASRDPVARXSPLQXPAAPGAAAGPALSPVPPVVHLXLRQAGDDFSRRYRRDFAEMSSQLHLXPFXARGRFAXVVEELFRDGVNWGRIVAFFEFGGVMCVESVNREMSPLVDNIALWMXEYLNRHLHXWIQDNGGWVGALGDVSLG

SEQ ID NO: 4066 - protein, 175 aa, Homo sapiens
  MOD_RES (2)..(2): Selenocysteine
  MOD_RES (33)..(33): Selenocysteine
  MOD_RES (66)..(66): Selenocysteine
  MOD_RES (69)..(69): Selenocysteine
  MOD_RES (91)..(91): Selenocysteine
  MOD_RES (114)..(114): Selenocysteine
  MOD_RES (130)..(130): Selenocysteine
  MOD_RES (156)..(156): Selenocysteine
  MOD_RES (161)..(161): Selenocysteine
MXDCEFGYIYRLAQDYLQCVLQIPQPGSGPSKXSRVLQNVAFSVQKEVEKNLKSCLDNVNVVSVDXARXLFNQVMEKEFEDGIINWGRIVXIFAFEGILIKKLLRQQIAPDVDXYKEISYFVAEFIMNNXGEWIRQNGGWENGFVKKFEPKSGWMXFLEVXGKICEMLSLLKQYC

SEQ ID NO: 4067 - protein, 163 aa, Homo sapiens
  MOD_RES (2)..(2): Selenocysteine
  MOD_RES (33)..(33): Selenocysteine
  MOD_RES (66)..(66): Selenocysteine
  MOD_RES (69)..(69): Selenocysteine
  MOD_RES (91)..(91): Selenocysteine
  MOD_RES (114)..(114): Selenocysteine
  MOD_RES (130)..(130): Selenocysteine
  MOD_RES (147)..(147): Selenocysteine
MXDCEFGYIYRLAQDYLQCVLQIPQPGSGPSKXSRVLQNVAFSVQKEVEKNLKSCLDNVNVVSVDXARXLFNQVMEKEFEDGIINWGRIVXIFAFEGILIKKLLRQQIAPDVDXYKEISYFVAEFIMNNXGEWIRQNGGWGKWHNHXPMLVESVAHKKRKMAL

SEQ ID NO: 4068 - protein, 48 aa, Homo sapiens
  MOD_RES (35)..(35): Selenocysteine
  MOD_RES (41)..(41): Selenocysteine
  MOD_RES (47)..(47): Selenocysteine
MSQSNRELVVDFLSYKLSQKGYSWSQFSDVEENRXEAPEGXESEMEXP

SEQ ID NO: 4069 - protein, 170 aa, Homo sapiens
  MOD_RES (35)..(35): Selenocysteine
  MOD_RES (41)..(41): Selenocysteine
  MOD_RES (47)..(47): Selenocysteine
  MOD_RES (69)..(69): Selenocysteine
  MOD_RES (109)..(109): Selenocysteine
  MOD_RES (115)..(115): Selenocysteine
  MOD_RES (118)..(118): Selenocysteine
  MOD_RES (127)..(127): Selenocysteine
  MOD_RES (153)..(153): Selenocysteine
  MOD_RES (156)..(156): Selenocysteine
MSQSNRELVVDFLSYKLSQKGYSWSQFSDVEENRXEAPEGXESEMEXPSAINGNPSWHLADSPAVNGAXGHSSSLDAREVIPMAAVKQALREAGDEFELRYRRAFSDLXSQLHIXPGXAYQSFEQDXFVELYGNNAAAESRKGQERFNRWFLXGMXVAGVVLLGSLFSRK

SEQ ID NO: 4070 - protein, 181 aa, Homo sapiens
  MOD_RES (35)..(35): Selenocysteine
  MOD_RES (41)..(41): Selenocysteine
  MOD_RES (47)..(47): Selenocysteine
  MOD_RES (69)..(69): Selenocysteine
  MOD_RES (109)..(109): Selenocysteine
  MOD_RES (115)..(115): Selenocysteine
  MOD_RES (118)..(118): Selenocysteine
  MOD_RES (172)..(172): Selenocysteine
MSQSNRELVVDFLSYKLSQKGYSWSQFSDVEENRXEAPEGXESEMEXPSAINGNPSWHLADSPAVNGAXGHSSSLDAREVIPMAAVKQALREAGDEFELRYRRAFSDLXSQLHIXPGXAYQSFEQVVNELFRDGVNWGRIVAFFSFGGALCVESVDKEMQVLVSRIAAWMAXYLNDHLEPW

SEQ ID NO: 4071 - protein, 188 aa, Homo sapiens
  MOD_RES (35)..(35): Selenocysteine
  MOD_RES (41)..(41): Selenocysteine
  MOD_RES (47)..(47): Selenocysteine
  MOD_RES (69)..(69): Selenocysteine
  MOD_RES (109)..(109): Selenocysteine
  MOD_RES (115)..(115): Selenocysteine
  MOD_RES (118)..(118): Selenocysteine
  MOD_RES (172)..(172): Selenocysteine
MSQSNRELVVDFLSYKLSQKGYSWSQFSDVEENRXEAPEGXESEMEXPSAINGNPSWHLADSPAVNGAXGHSSSLDAREVIPMAAVKQALREAGDEFELRYRRAFSDLXSQLHIXPGXAYQSFEQVVNELFRDGVNWGRIVAFFSFGGALCVESVDKEMQVLVSRIAAWMAXYLNDHLEPWIQENGGW

SEQ ID NO: 4072 - protein, 205 aa, Homo sapiens
  MOD_RES (35)..(35): Selenocysteine
  MOD_RES (41)..(41): Selenocysteine
  MOD_RES (47)..(47): Selenocysteine
  MOD_RES (69)..(69): Selenocysteine
  MOD_RES (109)..(109): Selenocysteine
  MOD_RES (115)..(115): Selenocysteine
  MOD_RES (118)..(118): Selenocysteine
  MOD_RES (172)..(172): Selenocysteine
  MOD_RES (190)..(190): Selenocysteine
MSQSNRELVVDFLSYKLSQKGYSWSQFSDVEENRXEAPEGXESEMEXPSAINGNPSWHLADSPAVNGAXGHSSSLDAREVIPMAAVKQALREAGDEFELRYRRAFSDLXSQLHIXPGXAYQSFEQVVNELFRDGVNWGRIVAFFSFGGALCVESVDKEMQVLVSRIAAWMAXYLNDHLEPWIQENGGWDXFVELYGNNAAAESRK

SEQ ID NO: 4073 - protein, 233 aa, Homo sapiens
  MOD_RES (35)..(35): Selenocysteine
  MOD_RES (41)..(41): Selenocysteine
  MOD_RES (47)..(47): Selenocysteine
  MOD_RES (69)..(69): Selenocysteine
  MOD_RES (109)..(109): Selenocysteine
  MOD_RES (115)..(115): Selenocysteine
  MOD_RES (118)..(118): Selenocysteine
  MOD_RES (172)..(172): Selenocysteine
  MOD_RES (190)..(190): Selenocysteine
  MOD_RES (216)..(216): Selenocysteine
  MOD_RES (219)..(219): Selenocysteine
MSQSNRELVVDFLSYKLSQKGYSWSQFSDVEENRXEAPEGXESEMEXPSAINGNPSWHLADSPAVNGAXGHSSSLDAREVIPMAAVKQALREAGDEFELRYRRAFSDLXSQLHIXPGXAYQSFEQVVNELFRDGVNWGRIVAFFSFGGALCVESVDKEMQVLVSRIAAWMAXYLNDHLEPWIQENGGWDXFVELYGNNAAAESRKGQERFNRWFLXGMXVAGVVLLGSLFSRK

SEQ ID NO: 4074 - protein, 204 aa, Homo sapiens
  MOD_RES (9)..(10): Selenocysteine
  MOD_RES (19)..(19): Selenocysteine
  MOD_RES (36)..(36): Selenocysteine
  MOD_RES (43)..(43): Selenocysteine
  MOD_RES (93)..(93): Selenocysteine
  MOD_RES (99)..(99): Selenocysteine
  MOD_RES (102)..(102): Selenocysteine
  MOD_RES (106)..(106): Selenocysteine
  MOD_RES (115)..(115): Selenocysteine
  MOD_RES (172)..(172): Selenocysteine
  MOD_RES (193)..(194): Selenocysteine
  MOD_RES (201)..(201): Selenocysteine
MVDQLRERXXMADPLRERXELLLADYLGYCAREPGXPEPAPSXPEAAVLRSAAARLRQIHRSFFSAYLGYPGNRFELVALMADSVLSDSPGPXWGRVVXLVXFAGXLLERGPLVXARWKKWGFQPRLKEQEGDVARDCQRLVALLSSRLMGQHRAWLQAQGGWDGFCHFFRXPFPLAFWRKQLVQAFLSCLLXXAFIYLWXRLL

SEQ ID NO: 4075 - protein, 241 aa, Homo sapiens
  MOD_RES (9)..(10): Selenocysteine
  MOD_RES (19)..(19): Selenocysteine
  MOD_RES (36)..(36): Selenocysteine
  MOD_RES (43)..(43): Selenocysteine
  MOD_RES (93)..(93): Selenocysteine
  MOD_RES (99)..(99): Selenocysteine
  MOD_RES (102)..(102): Selenocysteine
  MOD_RES (106)..(106): Selenocysteine
  MOD_RES (115)..(115): Selenocysteine
  MOD_RES (166)..(166): Selenocysteine
  MOD_RES (169)..(169): Selenocysteine
  MOD_RES (199)..(199): Selenocysteine
  MOD_RES (205)..(205): Selenocysteine
  MOD_RES (225)..(225): Selenocysteine
  MOD_RES (232)..(232): Selenocysteine
MVDQLRERXXMADPLRERXELLLADYLGYCAREPGXPEPAPSXPEAAVLRSAAARLRQIHRSFFSAYLGYPGNRFELVALMADSVLSDSPGPXWGRVVXLVXFAGXLLERGPLVXARWKKWGFQPRLKEQEGDVARDCQRLVALLSSRLMGQHRAWLQAQGGWVSXRRXPGHGAGRAAGKRPRGWHGWLLSLLQDPLSXGFLEKXAGPGFSVMLVNNSLHLSLDXIIMSFKXFNPLLPAQL

SEQ ID NO: 4076 - protein, 96 aa, Homo sapiens
  MOD_RES (32)..(32): Selenocysteine
  MOD_RES (36)..(36): Selenocysteine
  MOD_RES (52)..(52): Selenocysteine
  MOD_RES (54)..(54): Selenocysteine
KQPSDVSSECDREGRQLQPAERPPQLRPGAPXSLQXEPQDRSPAPMSCDKSXQXPSPPCQAFNHYLSAMDDSAGSSLRIALHREVQWPLKWLAKSS

SEQ ID NO: 4077 - protein, 85 aa, Homo sapiens
  MOD_RES (34)..(34): Selenocysteine
  MOD_RES (38)..(38): Selenocysteine
  MOD_RES (85)..(85): Selenocysteine
MAKQPSDVSSECDREGRQLQPAERPPQLRPGAPXSLQXEPQASMRQAEPADMRPEIWIAQELRRIGDEFNAYYARRLAKLLASSX

SEQ ID NO: 4078 - protein, 82 aa, Homo sapiens
  MOD_RES (34)..(34): Selenocysteine
  MOD_RES (38)..(38): Selenocysteine
MAKQPSDVSSECDREGRQLQPAERPPQLRPGAPXSLQXEPQASMRQAEPADMRPEIWIAQELRRIGDEFNAYYARRMPLPPD

SEQ ID NO: 4079 - protein, 109 aa, Homo sapiens
  MOD_RES (34)..(34): Selenocysteine
  MOD_RES (38)..(38): Selenocysteine
  MOD_RES (54)..(54): Selenocysteine
  MOD_RES (56)..(56): Selenocysteine
MAKQPSDVSSECDREGRQLQPAERPPQLRPGAPXSLQXEPQDRSPAPMSCDKSXQXPSPPCQAFNHYLSAMASMRQAEPADMRPEIWIAQELRRIGDEFNAYYARRLEK

SEQ ID NO: 4080 - protein, 138 aa, Homo sapiens
  MOD_RES (34)..(34): Selenocysteine
  MOD_RES (38)..(38): Selenocysteine
  MOD_RES (54)..(54): Selenocysteine
  MOD_RES (56)..(56): Selenocysteine
MAKQPSDVSSECDREGRQLQPAERPPQLRPGAPXSLQXEPQDRSPAPMSCDKSXQXPSPPCQAFNHYLSAMASMRQAEPADMRPEIWIAQELRRIGDEFNAYYARRVFLNNYQAAEDHPRMVILRLLRYIVRLVWRMH

SEQ ID NO: 4081 - protein, 98 aa, Homo sapiens
  MOD_RES (34)..(34): Selenocysteine
  MOD_RES (38)..(38): Selenocysteine
  MOD_RES (54)..(54): Selenocysteine
  MOD_RES (56)..(56): Selenocysteine
MAKQPSDVSSECDREGRQLQPAERPPQLRPGAPXSLQXEPQDRSPAPMSCDKSXQXPSPPCQAFNHYLSAMDDSAGSSLRIALHREVQWPLKWLAKSS

SEQ ID NO: 4082 - protein, 80 aa, Homo sapiens
  MOD_RES (34)..(34): Selenocysteine
  MOD_RES (38)..(38): Selenocysteine
  MOD_RES (54)..(54): Selenocysteine
  MOD_RES (56)..(56): Selenocysteine
MAKQPSDVSSECDREGRQLQPAERPPQLRPGAPXSLQXEPQDRSPAPMSCDKSXQXPSPPCQAFNHYLSAMVREIEEVVV

SEQ ID NO: 4083 - protein, 112 aa, Homo sapiens
  MOD_RES (34)..(34): Selenocysteine
  MOD_RES (38)..(38): Selenocysteine
  MOD_RES (54)..(54): Selenocysteine
  MOD_RES (56)..(56): Selenocysteine
  MOD_RES (90)..(90): Selenocysteine
  MOD_RES (103)..(103): Selenocysteine
MAKQPSDVSSECDREGRQLQPAERPPQLRPGAPXSLQXEPQDRSPAPMSCDKSXQXPSPPCQAFNHYLSAMVVILEDIGDLSLCFGFIFXGLDLYGHHHSQDXEQLNHKDFS

SEQ ID NO: 4084 - protein, 72 aa, Homo sapiens
  MOD_RES (34)..(34): Selenocysteine
  MOD_RES (38)..(38): Selenocysteine
MAKQPSDVSSECDREGRQLQPAERPPQLRPGAPXSLQXEPQGNPEGNHGGEGDSCPHGSPQGPLAPPASPGP

SEQ ID NO: 4085 - protein, 122 aa, Homo sapiens
  MOD_RES (34)..(34): Selenocysteine
  MOD_RES (38)..(38): Selenocysteine
  MOD_RES (75)..(75): Selenocysteine
  MOD_RES (101)..(101): Selenocysteine
  MOD_RES (114)..(114): Selenocysteine
  MOD_RES (116)..(116): Selenocysteine
MAKQPSDVSSECDREGRQLQPAERPPQLRPGAPXSLQXEPQGNPEGNHGGEGDSCPHGSPQGPLAPPASPGPFAXRSPLFIFMRRSSLLSRSSSGYFSFDXDRSPAPMSCDKSXQXPSPPCQ

SEQ ID NO: 4086 - protein, 135 aa, Homo sapiens
  MOD_RES (34)..(34): Selenocysteine
  MOD_RES (38)..(38): Selenocysteine
  MOD_RES (75)..(75): Selenocysteine
  MOD_RES (101)..(101): Selenocysteine
  MOD_RES (114)..(114): Selenocysteine
  MOD_RES (116)..(116): Selenocysteine
MAKQPSDVSSECDREGRQLQPAERPPQLRPGAPXSLQXEPQGNPEGNHGGEGDSCPHGSPQGPLAPPASPGPFAXRSPLFIFMRRSSLLSRSSSGYFSFDXDRSPAPMSCDKSXQXPSPPCQAFNHYLSAMANWD

SEQ ID NO: 4087 - protein, 169 aa, Homo sapiens
  MOD_RES (34)..(34): Selenocysteine
  MOD_RES (38)..(38): Selenocysteine
  MOD_RES (75)..(75): Selenocysteine
  MOD_RES (101)..(101): Selenocysteine
  MOD_RES (114)..(114): Selenocysteine
  MOD_RES (116)..(116): Selenocysteine
MAKQPSDVSSECDREGRQLQPAERPPQLRPGAPXSLQXEPQGNPEGNHGGEGDSCPHGSPQGPLAPPASPGPFAXRSPLFIFMRRSSLLSRSSSGYFSFDXDRSPAPMSCDKSXQXPSPPCQAFNHYLSAMASMRQAEPADMRPEIWIAQELRRIGDEFNAYYARRLEK

SEQ ID NO: 4088 - protein, 172 aa, Homo sapiens
  MOD_RES (34)..(34): Selenocysteine
  MOD_RES (38)..(38): Selenocysteine
  MOD_RES (75)..(75): Selenocysteine
  MOD_RES (101)..(101): Selenocysteine
  MOD_RES (114)..(114): Selenocysteine
  MOD_RES (116)..(116): Selenocysteine
MAKQPSDVSSECDREGRQLQPAERPPQLRPGAPXSLQXEPQGNPEGNHGGEGDSCPHGSPQGPLAPPASPGPFAXRSPLFIFMRRSSLLSRSSSGYFSFDXDRSPAPMSCDKSXQXPSPPCQAFNHYLSAMASMRQAEPADMRPEIWIAQELRRIGDEFNAYYARRMPLPPD

SEQ ID NO: 4089 - protein, 198 aa, Homo sapiens
  MOD_RES (34)..(34): Selenocysteine
  MOD_RES (38)..(38): Selenocysteine
  MOD_RES (75)..(75): Selenocysteine
  MOD_RES (101)..(101): Selenocysteine
  MOD_RES (114)..(114): Selenocysteine
  MOD_RES (116)..(116): Selenocysteine
MAKQPSDVSSECDREGRQLQPAERPPQLRPGAPXSLQXEPQGNPEGNHGGEGDSCPHGSPQGPLAPPASPGPFAXRSPLFIFMRRSSLLSRSSSGYFSFDXDRSPAPMSCDKSXQXPSPPCQAFNHYLSAMASMRQAEPADMRPEIWIAQELRRIGDEFNAYYARRVFLNNYQAAEDHPRMVILRLLRYIVRLVWRMH

SEQ ID NO: 4090 - protein, 135 aa, Homo sapiens
  MOD_RES (34)..(34): Selenocysteine
  MOD_RES (38)..(38): Selenocysteine
  MOD_RES (75)..(75): Selenocysteine
  MOD_RES (101)..(101): Selenocysteine
  MOD_RES (114)..(114): Selenocysteine
  MOD_RES (116)..(116): Selenocysteine
MAKQPSDVSSECDREGRQLQPAERPPQLRPGAPXSLQXEPQGNPEGNHGGEGDSCPHGSPQGPLAPPASPGPFAXRSPLFIFMRRSSLLSRSSSGYFSFDXDRSPAPMSCDKSXQXPSPPCQAFNHYLSAMGIFE

SEQ ID NO: 4091 - protein, 140 aa, Homo sapiens
  MOD_RES (34)..(34): Selenocysteine
  MOD_RES (38)..(38): Selenocysteine
  MOD_RES (75)..(75): Selenocysteine
  MOD_RES (101)..(101): Selenocysteine
  MOD_RES (114)..(114): Selenocysteine
  MOD_RES (116)..(116): Selenocysteine
MAKQPSDVSSECDREGRQLQPAERPPQLRPGAPXSLQXEPQGNPEGNHGGEGDSCPHGSPQGPLAPPASPGPFAXRSPLFIFMRRSSLLSRSSSGYFSFDXDRSPAPMSCDKSXQXPSPPCQAFNHYLSAMVREIEEVVV

SEQ ID NO: 4092 - protein, 75 aa, Homo sapiens
  MOD_RES (34)..(34): Selenocysteine
  MOD_RES (38)..(38): Selenocysteine
  MOD_RES (58)..(58): Selenocysteine
  MOD_RES (60)..(60): Selenocysteine
MAKQPSDVSSECDREGRQLQPAERPPQLRPGAPXSLQXEPQVSLCHPGWSALVRSWLXAXSNSQVQAVLLPQPPK

SEQ ID NO: 4093 - protein, 92 aa, Homo sapiens
  MOD_RES (13)..(13): Selenocysteine
  MOD_RES (33)..(33): Selenocysteine
  MOD_RES (52)..(52): Selenocysteine
  MOD_RES (67)..(67): Selenocysteine
  MOD_RES (78)..(78): Selenocysteine
MAGSEELGLREDXLRVLAAFLRRGEAAGSPVPXPPRPSYSRLLCFGGPAAGXAGPRAAEISAQPRIXGSPIDREGSHXAEAGGPAGGGGRSH

SEQ ID NO: 4094 - protein, 250 aa, Homo sapiens
  MOD_RES (13)..(13): Selenocysteine
  MOD_RES (33)..(33): Selenocysteine
  MOD_RES (44)..(44): Selenocysteine
  MOD_RES (87)..(87): Selenocysteine
  MOD_RES (120)..(120): Selenocysteine
  MOD_RES (212)..(212): Selenocysteine
  MOD_RES (225)..(225): Selenocysteine
MAGSEELGLREDXLRVLAAFLRRGEAAGSPVPXPPRSPAQEEPXDFLSRLRRCLPCSLGRGAAPSESPRPCSLPIRPCYGLEPGPAXPDFYALVAQRLEQLVQEQLKSPPSPELQGPPSXEKEAILRRLVALLEEEAEVINQKLASDPALRSKLVRLSSDSFARLVELFCSRDDSSRPSRACPGPPPPSPEPLARLALAMELSRRVAGLGGXLAGLSVEHVHSFXPWIQAHGGWEGILAVSPVDLNLPLD

SEQ ID NO: 4095 - protein, 138 aa, Homo sapiens
  MOD_RES (13)..(13): Selenocysteine
  MOD_RES (33)..(33): Selenocysteine
  MOD_RES (44)..(44): Selenocysteine
  MOD_RES (87)..(87): Selenocysteine
  MOD_RES (120)..(120): Selenocysteine
  MOD_RES (137)..(137): Selenocysteine
MAGSEELGLREDXLRVLAAFLRRGEAAGSPVPXPPRSPAQEEPXDFLSRLRRCLPCSLGRGAAPSESPRPCSLPIRPCYGLEPGPAXPDFYALVAQRLEQLVQEQLKSPPSPGGHPGCFXRGLELAIGLSSFSEAAXR

SEQ ID NO: 4096 - protein, 92 aa, Homo sapiens
  MOD_RES (13)..(13): Selenocysteine
  MOD_RES (33)..(33): Selenocysteine
  MOD_RES (44)..(44): Selenocysteine
  MOD_RES (67)..(67): Selenocysteine
MAGSEELGLREDXLRVLAAFLRRGEAAGSPVPXPPRSPAQEEPXDFLSRLRRCLPCSLGVEHVHSFXPWIQAHGGWEGILAVSPVDLNLPLD

SEQ ID NO: 4097 - protein, 130 aa, Homo sapiens
  MOD_RES (97)..(97): Selenocysteine
  MOD_RES (117)..(117): Selenocysteine
  MOD_RES (130)..(130): Selenocysteine
MGRPAGLFPPLCPFLGFRPEACWERHMQIERAPSVPPFLRWAGYRPGPVRRRGKVELIKFVRVQWRRPQVEWRRRRWGPGPGASMAGSEELGLREDXLRVLAAFLRRGEAAGSPVPXPPRRASWLFHPWX

SEQ ID NO: 4098 - protein, 193 aa, Homo sapiens
  MOD_RES (97)..(97): Selenocysteine
  MOD_RES (117)..(117): Selenocysteine
  MOD_RES (128)..(128): Selenocysteine
  MOD_RES (175)..(175): Selenocysteine
  MOD_RES (192)..(192): Selenocysteine
MGRPAGLFPPLCPFLGFRPEACWERHMQIERAPSVPPFLRWAGYRPGPVRRRGKVELIKFVRVQWRRPQVEWRRRRWGPGPGASMAGSEELGLREDXLRVLAAFLRRGEAAGSPVPXPPRSPAQEEPXDFLSRLRRCLPCSLGRGAAPSESPRPCSLPIRPCYGLEPGGHPGCFXRGLELAIGLSSFSEAAXR

SEQ ID NO: 4099 - protein, 334 aa, Homo sapiens
  MOD_RES (97)..(97): Selenocysteine
  MOD_RES (117)..(117): Selenocysteine
  MOD_RES (128)..(128): Selenocysteine
  MOD_RES (171)..(171): Selenocysteine
  MOD_RES (204)..(204): Selenocysteine
  MOD_RES (296)..(296): Selenocysteine
  MOD_RES (309)..(309): Selenocysteine
MGRPAGLFPPLCPFLGFRPEACWERHMQIERAPSVPPFLRWAGYRPGPVRRRGKVELIKFVRVQWRRPQVEWRRRRWGPGPGASMAGSEELGLREDXLRVLAAFLRRGEAAGSPVPXPPRSPAQEEPXDFLSRLRRCLPCSLGRGAAPSESPRPCSLPIRPCYGLEPGPAXPDFYALVAQRLEQLVQEQLKSPPSPELQGPPSXEKEAILRRLVALLEEEAEVINQKLASDPALRSKLVRLSSDSFARLVELFCSRDDSSRPSRACPGPPPPSPEPLARLALAMELSRRVAGLGGXLAGLSVEHVHSFXPWIQAHGGWEGILAVSPVDLNLPLD

SEQ ID NO: 4100 - protein, 269 aa, Homo sapiens
  MOD_RES (97)..(97): Selenocysteine
  MOD_RES (117)..(117): Selenocysteine
  MOD_RES (128)..(128): Selenocysteine
  MOD_RES (171)..(171): Selenocysteine
  MOD_RES (204)..(204): Selenocysteine
  MOD_RES (234)..(234): Selenocysteine
  MOD_RES (251)..(251): Selenocysteine
  MOD_RES (268)..(268): Selenocysteine
MGRPAGLFPPLCPFLGFRPEACWERHMQIERAPSVPPFLRWAGYRPGPVRRRGKVELIKFVRVQWRRPQVEWRRRRWGPGPGASMAGSEELGLREDXLRVLAAFLRRGEAAGSPVPXPPRSPAQEEPXDFLSRLRRCLPCSLGRGAAPSESPRPCSLPIRPCYGLEPGPAXPDFYALVAQRLEQLVQEQLKSPPSPELQGPPSXEKEAILRRLVALLEEEAEVINQKVMGICPXPWQGQELRNGGHPGCFXRGLELAIGLSSFSEAAXR

SEQ ID NO: 4101 - protein, 333 aa, Homo sapiens
  MOD_RES (97)..(97): Selenocysteine
  MOD_RES (117)..(117): Selenocysteine
  MOD_RES (127)..(127): Selenocysteine
  MOD_RES (170)..(170): Selenocysteine
  MOD_RES (203)..(203): Selenocysteine
  MOD_RES (295)..(295): Selenocysteine
  MOD_RES (308)..(308): Selenocysteine
MGRPAGLFPPLCPFLGFRPEACWERHMQIERAPSVPPFLRWAGYRPGPVRRRGKVELIKFVRVQWRRPQVEWRRRRWGPGPGASMAGSEELGLREDXLRVLAAFLRRGEAAGSPVPXPPSPAQEEPXDFLSRLRRCLPCSLGRGAAPSESPRPCSLPIRPCYGLEPGPAXPDFYALVAQRLEQLVQEQLKSPPSPELQGPPSXEKEAILRRLVALLEEEAEVINQKLASDPALRSKLVRLSSDSFARLVELFCSRDDSSRPSRACPGPPPPSPEPLARLALAMELSRRVAGLGGXLAGLSVEHVHSFXPWIQAHGGWEGILAVSPVDLNLPLD

SEQ ID NO: 4102 - protein, 51 aa, Homo sapiens
  MOD_RES (3)..(3): Selenocysteine
  MOD_RES (10)..(10): Selenocysteine
MAXPASAPDXRALVADFVGYKLRQKGYVCGAGPGEGPAADPLHQAMRAAGD

SEQ ID NO: 4103 - protein, 72 aa, Homo sapiens
  MOD_RES (3)..(3): Selenocysteine
  MOD_RES (10)..(10): Selenocysteine
  MOD_RES (55)..(55): Selenocysteine
  MOD_RES (60)..(60): Selenocysteine
  MOD_RES (71)..(71): Selenocysteine
MAXPASAPDXRALVADFVGYKLRQKGYVCGAGPGEGPAADPLHQAMRAAGDEFEXRFRRXFSDLAAQLHVXP

SEQ ID NO: 4104 - protein, 144 aa, Homo sapiens
  MOD_RES (3)..(3): Selenocysteine
  MOD_RES (10)..(10): Selenocysteine
  MOD_RES (55)..(55): Selenocysteine
  MOD_RES (60)..(60): Selenocysteine
  MOD_RES (71)..(71): Selenocysteine
  MOD_RES (80)..(80): Selenocysteine
  MOD_RES (132)..(132): Selenocysteine
MAXPASAPDXRALVADFVGYKLRQKGYVCGAGPGEGPAADPLHQAMRAAGDEFEXRFRRXFSDLAAQLHVXPGSAQQRFXQVSDELFQGGPNWGRLVAFFVFGAALCAESVNKEMEPLVGQVQEWMVAYLEXQLADWIHSSGGW

SEQ ID NO: 4105 - protein, 149 aa, Homo sapiens
  MOD_RES (3)..(3): Selenocysteine
  MOD_RES (10)..(10): Selenocysteine
  MOD_RES (55)..(55): Selenocysteine
  MOD_RES (60)..(60): Selenocysteine
  MOD_RES (71)..(71): Selenocysteine
  MOD_RES (80)..(80): Selenocysteine
  MOD_RES (132)..(132): Selenocysteine
  MOD_RES (148)..(148): Selenocysteine
MAXPASAPDXRALVADFVGYKLRQKGYVCGAGPGEGPAADPLHQAMRAAGDEFEXRFRRXFSDLAAQLHVXPGSAQQRFXQVSDELFQGGPNWGRLVAFFVFGAALCAESVNKEMEPLVGQVQEWMVAYLEXQLADWIHSSGGWAEFXA

SEQ ID NO: 4106 - protein, 193 aa, Homo sapiens
  MOD_RES (3)..(3): Selenocysteine
  MOD_RES (10)..(10): Selenocysteine
  MOD_RES (55)..(55): Selenocysteine
  MOD_RES (60)..(60): Selenocysteine
  MOD_RES (71)..(71): Selenocysteine
  MOD_RES (80)..(80): Selenocysteine
  MOD_RES (132)..(132): Selenocysteine
  MOD_RES (148)..(148): Selenocysteine
  MOD_RES (172)..(172): Selenocysteine
  MOD_RES (175)..(175): Selenocysteine
  MOD_RES (185)..(185): Selenocysteine
MAXPASAPDXRALVADFVGYKLRQKGYVCGAGPGEGPAADPLHQAMRAAGDEFEXRFRRXFSDLAAQLHVXPGSAQQRFXQVSDELFQGGPNWGRLVAFFVFGAALCAESVNKEMEPLVGQVQEWMVAYLEXQLADWIHSSGGWAEFXALYGDGALEEARRLREGNWASVRXVLXGAVALGALVXVGAFFASK

SEQ ID NO: 4107 - protein, 167 aa, Homo sapiens
  MOD_RES (1)..(1): Any amino acid
  MOD_RES (3)..(3): Selenocysteine
  MOD_RES (14)..(14): Selenocysteine
  MOD_RES (23)..(23): Selenocysteine
  MOD_RES (75)..(75): Selenocysteine
  MOD_RES (91)..(91): Selenocysteine
  MOD_RES (115)..(115): Selenocysteine
  MOD_RES (118)..(118): Selenocysteine
  MOD_RES (130)..(130): Selenocysteine
  MOD_RES (133)..(133): Selenocysteine
  MOD_RES (137)..(138): Selenocysteine
  MOD_RES (149)..(149): Selenocysteine
XRXFSDLAAQLHVXPGSAQQRFXQVSDELFQGGPNWGRLVAFFVFGAALCAESVNKEMEPLVGQVQEWMVAYLEXQLADWIHSSGGWAEFXALYGDGALEEARRLREGNWASVRXVLXGAVALGALVWSXLFXLPSXXGHISLLAFPGXFSQEELQGPWPGYQNALL

SEQ ID NO: 4108 - protein, 333 aa, Homo sapiens
  MOD_RES (3)..(3): Selenocysteine
  MOD_RES (10)..(10): Selenocysteine
  MOD_RES (55)..(55): Selenocysteine
  MOD_RES (60)..(60): Selenocysteine
  MOD_RES (71)..(71): Selenocysteine
  MOD_RES (80)..(80): Selenocysteine
  MOD_RES (132)..(132): Selenocysteine
  MOD_RES (211)..(211): Selenocysteine
  MOD_RES (229)..(229): Selenocysteine
  MOD_RES (255)..(255): Selenocysteine
  MOD_RES (276)..(276): Selenocysteine
  MOD_RES (283)..(284): Selenocysteine
  MOD_RES (297)..(298): Selenocysteine
  MOD_RES (327)..(327): Selenocysteine
MAXPASAPDXRALVADFVGYKLRQKGYVCGAGPGEGPAADPLHQAMRAAGDEFEXRFRRXFSDLAAQLHVXPGSAQQRFXQVSDELFQGGPNWGRLVAFFVFGAALCAESVNKEMEPLVGQVQEWMVAYLEXQLADWIHSSGGWELEAIKARVREMEEEAEKLKELQNEVEKQMNMSPPPGNAGPVIMSIEEKMEADARSIYVGNVDYGAXAEELEAHFHGCGSVNRVXILCDKFSGHPKGFAYIEFSDKESVRXSLALDESLFRGRQIKVIPKRXNRPGISXXDRGFPRARYRARXXNYNSSRSRFYSGFNSRPRGRVYRGRARAXSWYSPY

SEQ ID NO: 4109 - protein, 454 aa, Homo sapiens
  MOD_RES (18)..(18): Selenocysteine
  MOD_RES (94)..(94): Selenocysteine
  MOD_RES (108)..(108): Selenocysteine
  MOD_RES (129)..(129): Selenocysteine
  MOD_RES (137)..(137): Selenocysteine
  MOD_RES (174)..(174): Selenocysteine
  MOD_RES (182)..(183): Selenocysteine
  MOD_RES (193)..(193): Selenocysteine
  MOD_RES (207)..(207): Selenocysteine
  MOD_RES (219)..(219): Selenocysteine
  MOD_RES (232)..(232): Selenocysteine
  MOD_RES (244)..(244): Selenocysteine
  MOD_RES (252)..(252): Selenocysteine
  MOD_RES (257)..(257): Selenocysteine
  MOD_RES (327)..(327): Selenocysteine
  MOD_RES (344)..(344): Selenocysteine
  MOD_RES (363)..(363): Selenocysteine
  MOD_RES (368)..(368): Selenocysteine
  MOD_RES (381)..(381): Selenocysteine
MPRCPAGAMDEGPVDLRXRPKAAGLPGAALPLRKRPLRAPSPEPAAPRGAAGLVVPLDPLRGGCDLPAVPGPPHGLARPEALYYPGALLPLYPXRAMGSPFPLVNLPXPLYPMMCPMEHPLSADIAMAXRADEDGDXPLHIAVVQGNLPAVHRLVNLFQQGGRELDIYNNLRQXPLHLAVIXXLPSVVRLLVXAGASPMALDRHGQXAAHLACEHRSPXCLRALLDSAAPGXLDLEARNYDGLXALHVAVNXECQEXVQLLLERGADIDAVDIKSGRSPLIHAVENNSLSMVQLLLQHGANVNAQMYSGSSALHSASGRGLLPLVRXLVRSGADSSLKNCHNDXPLMVARSRRVIDILRGKAXRPASXSQPDPSPDRSANXSPESSSRLSSNGLLSASPSSSPSQSPPRDPPGFPMAPPNFFLPSPSPPAFLPFAGVLRGPGRPVPPSPAPGGS

SEQ ID NO: 4110 - protein, 308 aa, Homo sapiens
  MOD_RES (1)..(1): Any amino acid
  MOD_RES (13)..(13): Selenocysteine
  MOD_RES (21)..(21): Selenocysteine
  MOD_RES (58)..(58): Selenocysteine
  MOD_RES (66)..(67): Selenocysteine
  MOD_RES (77)..(77): Selenocysteine
  MOD_RES (91)..(91): Selenocysteine
  MOD_RES (103)..(103): Selenocysteine
  MOD_RES (116)..(116): Selenocysteine
  MOD_RES (128)..(128): Selenocysteine
  MOD_RES (136)..(136): Selenocysteine
  MOD_RES (141)..(141): Selenocysteine
  MOD_RES (211)..(211): Selenocysteine
  MOD_RES (228)..(228): Selenocysteine
  MOD_RES (249)..(249): Selenocysteine
  MOD_RES (267)..(267): Selenocysteine
  MOD_RES (272)..(272): Selenocysteine
  MOD_RES (285)..(285): Selenocysteine
XEHPLSADIAMAXRADEDGDXPLHIAVVQGNLPAVHRLVNLFQQGGRELDIYNNLRQXPLHLAVIXXLPSVVRLLVXAGASPMALDRHGQXAAHLACEHRSPXCLRALLDSAAPGXLDLEARNYDGLXALHVAVNXECQEXVQLLLERGADIDAVDIKSGRSPLIHAVENNSLSMVQLLLQHGANVNAQMYSGSSALHSASGRGLLPLVRXLVRSGADSSLKNCHNDXPLMVARSRRVSRGSCGHAPCXRVSAGWLQVIDILRGKAXRPASXSQPDPSPDRSANXSPESSSRLSSNGLLSASPSSSPS

SEQ ID NO: 4111 - protein, 55 aa, Homo sapiens
  MOD_RES (12)..(12): Selenocysteine
  MOD_RES (32)..(32): Selenocysteine
  MOD_RES (48)..(48): Selenocysteine
MASPADSCIQFXRHASDVLLNLNRLRSRDILXDVVIVVSREQFRAHKXVLMACRS

SEQ ID NO: 4112 - protein, 104 aa, Homo sapiens
  MOD_RES (12)..(12): Selenocysteine
  MOD_RES (32)..(32): Selenocysteine
  MOD_RES (48)..(48): Selenocysteine
  MOD_RES (62)..(62): Selenocysteine
  MOD_RES (92)..(92): Selenocysteine
MASPADSCIQFXRHASDVLLNLNRLRSRDILXDVVIVVSREQFRAHKXVLMACSGLFYSIFXDQLKCNLSVINLDPEINPEGFCILLDFMYXSRLNLREGNIMA

SEQ ID NO: 4113 - protein, 122 aa, Homo sapiens
  MOD_RES (12)..(12): Selenocysteine
  MOD_RES (32)..(32): Selenocysteine
  MOD_RES (48)..(48): Selenocysteine
  MOD_RES (62)..(62): Selenocysteine
  MOD_RES (92)..(92): Selenocysteine
  MOD_RES (108)..(108): Selenocysteine
  MOD_RES (120)..(120): Selenocysteine
MASPADSCIQFXRHASDVLLNLNRLRSRDILXDVVIVVSREQFRAHKXVLMACSGLFYSIFXDQLKCNLSVINLDPEINPEGFCILLDFMYXSRLNLREGNIMAVMAXAMYLQMEHVVDXCR

SEQ ID NO: 4114 - protein, 650 aa, Homo sapiens
  MOD_RES (12)..(12): Selenocysteine
  MOD_RES (32)..(32): Selenocysteine
  MOD_RES (48)..(48): Selenocysteine
  MOD_RES (62)..(62): Selenocysteine
  MOD_RES (92)..(92): Selenocysteine
  MOD_RES (108)..(108): Selenocysteine
  MOD_RES (120)..(120): Selenocysteine
  MOD_RES (190)..(190): Selenocysteine
  MOD_RES (246)..(246): Selenocysteine
  MOD_RES (264)..(264): Selenocysteine
  MOD_RES (345)..(345): Selenocysteine
  MOD_RES (368)..(368): Selenocysteine
  MOD_RES (409)..(409): Selenocysteine
  MOD_RES (429)..(429): Selenocysteine
  MOD_RES (439)..(439): Selenocysteine
  MOD_RES (455)..(455): Selenocysteine
  MOD_RES (476)..(476): Selenocysteine
  MOD_RES (492)..(492): Selenocysteine
  MOD_RES (496)..(496): Selenocysteine
  MOD_RES (504)..(504): Selenocysteine
  MOD_RES (535)..(535): Selenocysteine
  MOD_RES (537)..(537): Selenocysteine
  MOD_RES (550)..(550): Selenocysteine
  MOD_RES (569)..(569): Selenocysteine
  MOD_RES (581)..(581): Selenocysteine
  MOD_RES (588)..(588): Selenocysteine
  MOD_RES (597)..(597): Selenocysteine
  MOD_RES (629)..(629): Selenocysteine
  MOD_RES (631)..(631): Selenocysteine
  MOD_RES (640)..(640): Selenocysteine
MASPADSCIQFXRHASDVLLNLNRLRSRDILXDVVIVVSREQFRAHKXVLMACSGLFYSIFXDQLKCNLSVINLDPEINPEGFCILLDFMYXSRLNLREGNIMAVMAXAMYLQMEHVVDXCRKFIKASEAEMVSAIKPPREEFLNSRMLMPQDIMAYRGREVVENNLPLRSAPGCESRAFAPSLYSGLSXPPASYSMYSHLPVSSLLFSDEEFRDVRMPVANPFPKERALPCDSARPVPGEYSRPXLEVSPNVCHSNIYSPKEXIPEEARSDMHYSVAEGLKPAAPSARNAPYFPCDKASKEEERPSSEDEIALHFEPPNAPLNRKGLVSPQSPQKSDCQPNSPXESCSSKNACILQASGSPPAKSPXDPKACNWKKYKFIVLNSLNQNAKPEGPEQAELGRLSPRAYXAPPACQPPMEPENLDLQSPXKLSASGEDSXIPQASRLNNIVNRSMXGSPRSSSESHSPLYMHPPKCXSCGSQSPQHAEMCLHXAGPXFPEEMGEXQSEYSDSSCGEKPYRCNICGAQFNRPANLKXHXRIHSGEKPYKCEXCGARFVQVAHLRAHVLIHXGEKPYPCEICGXRFRHLQXLKSHLRIHXGEKPYHCEKCNLHFRHKSQLRLHLRQKHGAIXNXKVQYRVSAXDLPPELPKAC

SEQ ID NO: 4115 - protein, 706 aa, Homo sapiens
  MOD_RES (12)..(12): Selenocysteine
  MOD_RES (32)..(32): Selenocysteine
  MOD_RES (48)..(48): Selenocysteine
  MOD_RES (62)..(62): Selenocysteine
  MOD_RES (92)..(92): Selenocysteine
  MOD_RES (108)..(108): Selenocysteine
  MOD_RES (120)..(120): Selenocysteine
  MOD_RES (190)..(190): Selenocysteine
  MOD_RES (246)..(246): Selenocysteine
  MOD_RES (264)..(264): Selenocysteine
  MOD_RES (345)..(345): Selenocysteine
  MOD_RES (368)..(368): Selenocysteine
  MOD_RES (409)..(409): Selenocysteine
  MOD_RES (429)..(429): Selenocysteine
  MOD_RES (439)..(439): Selenocysteine
  MOD_RES (455)..(455): Selenocysteine
  MOD_RES (476)..(476): Selenocysteine
  MOD_RES (492)..(492): Selenocysteine
  MOD_RES (496)..(496): Selenocysteine
  MOD_RES (504)..(504): Selenocysteine
  MOD_RES (537)..(537): Selenocysteine
  MOD_RES (540)..(540): Selenocysteine
  MOD_RES (566)..(566): Selenocysteine
  MOD_RES (569)..(569): Selenocysteine
  MOD_RES (591)..(591): Selenocysteine
  MOD_RES (593)..(593): Selenocysteine
  MOD_RES (606)..(606): Selenocysteine
  MOD_RES (625)..(625): Selenocysteine
  MOD_RES (637)..(637): Selenocysteine
  MOD_RES (644)..(644): Selenocysteine
  MOD_RES (653)..(653): Selenocysteine
  MOD_RES (685)..(685): Selenocysteine
  MOD_RES (687)..(687): Selenocysteine
  MOD_RES (696)..(696): Selenocysteine
MASPADSCIQFXRHASDVLLNLNRLRSRDILXDVVIVVSREQFRAHKXVLMACSGLFYSIFXDQLKCNLSVINLDPEINPEGFCILLDFMYXSRLNLREGNIMAVMAXAMYLQMEHVVDXCRKFIKASEAEMVSAIKPPREEFLNSRMLMPQDIMAYRGREVVENNLPLRSAPGCESRAFAPSLYSGLSXPPASYSMYSHLPVSSLLFSDEEFRDVRMPVANPFPKERALPCDSARPVPGEYSRPXLEVSPNVCHSNIYSPKEXIPEEARSDMHYSVAEGLKPAAPSARNAPYFPCDKASKEEERPSSEDEIALHFEPPNAPLNRKGLVSPQSPQKSDCQPNSPXESCSSKNACILQASGSPPAKSPXDPKACNWKKYKFIVLNSLNQNAKPEGPEQAELGRLSPRAYXAPPACQPPMEPENLDLQSPXKLSASGEDSXIPQASRLNNIVNRSMXGSPRSSSESHSPLYMHPPKCXSCGSQSPQHAEMCLHXAGPXFPEEMGEXQSEYSDSSCENGAFFCNECDCRFSEEASLKRHXLQXHSDKPYKCDRCQASFRYKGNLASHKXVHXGEKPYRCNICGAQFNRPANLKXHXRIHSGEKPYKCEXCGARFVQVAHLRAHVLIHXGEKPYPCEICGXRFRHLQXLKSHLRIHXGEKPYHCEKCNLHFRHKSQLRLHLRQKHGAIXNXKVQYRVSAXDLPPELPKAC

SEQ ID NO: 4116 - protein, 135 aa, Homo sapiens
  MOD_RES (37)..(37): Selenocysteine
  MOD_RES (40)..(40): Selenocysteine
  MOD_RES (62)..(62): Selenocysteine
  MOD_RES (77)..(77): Selenocysteine
  MOD_RES (96)..(96): Selenocysteine
  MOD_RES (105)..(105): Selenocysteine
  MOD_RES (108)..(108): Selenocysteine
  MOD_RES (115)..(115): Selenocysteine
  MOD_RES (124)..(124): Selenocysteine
  MOD_RES (134)..(134): Selenocysteine
CSSGLDSLVPGDEDKPYKCQLCRSSFRYKGNLASHRXVHXGEKPYHCSICGARFNRPANLKXHSRIHSGEKPYKCEXCGSRFVQVAHLRAHVLIHXGEKPYPCPXCGXRFRHLQXLKSHVRIHXGEKPYHEPVXS

SEQ ID NO: 4117 - protein, 111 aa, Homo sapiens
  MOD_RES (18)..(18): Selenocysteine
  MOD_RES (38)..(38): Selenocysteine
  MOD_RES (41)..(41): Selenocysteine
  MOD_RES (98)..(98): Selenocysteine
  MOD_RES (107)..(107): Selenocysteine
MGSPAAPEGALGYVREFXRHSSDVLGNLNELRLRGILXDVXLLVGGQPLRAHKAVLIACSGFFYSIFRGRAGVGVDVLSLPGGPEARGFAPLLDFMYXSRLRLSPAXAPAV

SEQ ID NO: 4118 - protein, 133 aa, Homo sapiens
  MOD_RES (18)..(18): Selenocysteine
  MOD_RES (38)..(38): Selenocysteine
  MOD_RES (41)..(41): Selenocysteine
  MOD_RES (98)..(98): Selenocysteine
  MOD_RES (107)..(107): Selenocysteine
  MOD_RES (116)..(116): Selenocysteine
MGSPAAPEGALGYVREFXRHSSDVLGNLNELRLRGILXDVXLLVGGQPLRAHKAVLIACSGFFYSIFRGRAGVGVDVLSLPGGPEARGFAPLLDFMYXSRLRLSPAXAPAVLAAAXYLQMEHVVQACHRFIQA

SEQ ID NO: 4119 - protein, 479 aa, Homo sapiens
  MOD_RES (18)..(18): Selenocysteine
  MOD_RES (38)..(38): Selenocysteine
  MOD_RES (41)..(41): Selenocysteine
  MOD_RES (98)..(98): Selenocysteine
  MOD_RES (107)..(107): Selenocysteine
  MOD_RES (116)..(116): Selenocysteine
  MOD_RES (151)..(151): Selenocysteine
  MOD_RES (154)..(154): Selenocysteine
  MOD_RES (172)..(172): Selenocysteine
  MOD_RES (259)..(259): Selenocysteine
  MOD_RES (262)..(262): Selenocysteine
  MOD_RES (273)..(273): Selenocysteine
  MOD_RES (278)..(278): Selenocysteine
  MOD_RES (284)..(284): Selenocysteine
  MOD_RES (348)..(348): Selenocysteine
  MOD_RES (351)..(351): Selenocysteine
  MOD_RES (373)..(373): Selenocysteine
  MOD_RES (388)..(388): Selenocysteine
  MOD_RES (407)..(407): Selenocysteine
  MOD_RES (416)..(416): Selenocysteine
  MOD_RES (419)..(419): Selenocysteine
  MOD_RES (426)..(426): Selenocysteine
  MOD_RES (435)..(435): Selenocysteine
  MOD_RES (467)..(467): Selenocysteine
  MOD_RES (469)..(469): Selenocysteine
MGSPAAPEGALGYVREFXRHSSDVLGNLNELRLRGILXDVXLLVGGQPLRAHKAVLIACSGFFYSIFRGRAGVGVDVLSLPGGPEARGFAPLLDFMYXSRLRLSPAXAPAVLAAAXYLQMEHVVQACHRFIQASYEPLGISLRPLEAEPPXPPXAPPPGSPRRSEGHPDPPXESRSCSQGPPSPASPDPKACNWKKYKYIVLNSQASQAGSLVGERSSGQPCPQARLPSGDEASSSSSSSSSSSEEGPIPGPQSRLSPXAAXVQFKCGAPASXPYLLXSQAQDXSGSPSERARPLPGSEFFSCQNCEAVAGCSSGLDSLVPGDEDKPYKCQLCRSSFRYKGNLASHRXVHXGEKPYHCSICGARFNRPANLKXHSRIHSGEKPYKCEXCGSRFVQVAHLRAHVLIHXGEKPYPCPXCGXRFRHLQXLKSHVRIHXGEKPYHCDPCGLHFRHKSQLRLHLRQKHGAAXNXKVHYHILGGP

SEQ ID NO: 4120 - protein, 202 aa, Homo sapiens
  MOD_RES (10)..(10): Selenocysteine
  MOD_RES (37)..(37): Selenocysteine
  MOD_RES (41)..(41): Selenocysteine
  MOD_RES (52)..(52): Selenocysteine
  MOD_RES (109)..(109): Selenocysteine
  MOD_RES (126)..(126): Selenocysteine
  MOD_RES (131)..(131): Selenocysteine
  MOD_RES (138)..(138): Selenocysteine
  MOD_RES (160)..(160): Selenocysteine
  MOD_RES (162)..(162): Selenocysteine
  MOD_RES (171)..(171): Selenocysteine
  MOD_RES (194)..(194): Selenocysteine
  MOD_RES (198)..(198): Selenocysteine
MSGRSVRAEXRSRAKDDIKKVMAAIEKVRKWEKKWVXVGDXSLRIFKWVPVXDSKEKEKSKSNSSAAREPNGFPSDASANSSLLLEFQDENSNQSSVSDVYQLKVDSSXNSSPSPQQSESLSPAHXSDFRXDDSQPPXLGQEILEEPSLPSSEVADEPPXLXKEEPVPLEXQVVEEEEDSGAPPLKRFCVDQPXVPQXASES

SEQ ID NO: 4121 - protein, 145 aa, Homo sapiens
  MOD_RES (10)..(10): Selenocysteine
  MOD_RES (37)..(37): Selenocysteine
  MOD_RES (41)..(41): Selenocysteine
  MOD_RES (52)..(52): Selenocysteine
  MOD_RES (103)..(103): Selenocysteine
  MOD_RES (105)..(105): Selenocysteine
  MOD_RES (114)..(114): Selenocysteine
  MOD_RES (137)..(137): Selenocysteine
  MOD_RES (141)..(141): Selenocysteine
MSGRSVRAEXRSRAKDDIKKVMAAIEKVRKWEKKWVXVGDXSLRIFKWVPVXDSKEKEKSKSNSSAAREPNGFPSDASANSSLLLEFQEPSLPSSEVADEPPXLXKEEPVPLEXQVVEEEEDSGAPPLKRFCVDQPXVPQXASES

SEQ ID NO: 4122 - protein, 78 aa, Homo sapiens
  MOD_RES (10)..(10): Selenocysteine
  MOD_RES (37)..(37): Selenocysteine
  MOD_RES (41)..(41): Selenocysteine
  MOD_RES (52)..(52): Selenocysteine
MSGRSVRAEXRSRAKDDIKKVMAAIEKVRKWEKKWVXVGDXSLRIFKWVPVXDSKERQSLAMLSRLVVNSWPQAVPQP

SEQ ID NO: 4123 - protein, 88 aa, Homo sapiens
  MOD_RES (10)..(10): Selenocysteine
  MOD_RES (37)..(37): Selenocysteine
  MOD_RES (41)..(41): Selenocysteine
  MOD_RES (52)..(52): Selenocysteine
  MOD_RES (57)..(57): Selenocysteine
  MOD_RES (59)..(59): Selenocysteine
  MOD_RES (61)..(61): Selenocysteine
  MOD_RES (67)..(67): Selenocysteine
  MOD_RES (74)..(74): Selenocysteine
  MOD_RES (78)..(78): Selenocysteine
MSGRSVRAEXRSRAKDDIKKVMAAIEKVRKWEKKWVXVGDXSLRIFKWVPVXDSKEXKXAXRVPCLXSISLRWXAAPXQAPAPSRVSP

SEQ ID NO: 4124 - protein, 213 aa, Homo sapiens
  MOD_RES (2)..(2): Selenocysteine
  MOD_RES (8)..(8): Selenocysteine
  MOD_RES (48)..(48): Selenocysteine
  MOD_RES (52)..(52): Selenocysteine
  MOD_RES (63)..(63): Selenocysteine
  MOD_RES (120)..(120): Selenocysteine
  MOD_RES (137)..(137): Selenocysteine
  MOD_RES (142)..(142): Selenocysteine
  MOD_RES (149)..(149): Selenocysteine
  MOD_RES (171)..(171): Selenocysteine
  MOD_RES (173)..(173): Selenocysteine
  MOD_RES (182)..(182): Selenocysteine
  MOD_RES (205)..(205): Selenocysteine
  MOD_RES (209)..(209): Selenocysteine
MXESRSVXQAGVHWRNLGSLQPLPLRFKQFSCLSLLSSWDYREKKWVXVGDXSLRIFKWVPVXDSKEKEKSKSNSSAAREPNGFPSDASANSSLLLEFQDENSNQSSVSDVYQLKVDSSXNSSPSPQQSESLSPAHXSDFRXDDSQPPXLGQEILEEPSLPSSEVADEPPXLXKEEPVPLEXQVVEEEEDSGAPPLKRFCVDQPXVPQXASES

SEQ ID NO: 4125 - protein, 1426 aa, Homo sapiens
  MOD_RES (16)..(16): Selenocysteine
  MOD_RES (32)..(32): Selenocysteine
  MOD_RES (72)..(72): Selenocysteine
  MOD_RES (115)..(115): Selenocysteine
  MOD_RES (139)..(139): Selenocysteine
  MOD_RES (144)..(144): Selenocysteine
  MOD_RES (149)..(149): Selenocysteine
  MOD_RES (155)..(155): Selenocysteine
  MOD_RES (161)..(162): Selenocysteine
  MOD_RES (164)..(164): Selenocysteine
  MOD_RES (167)..(167): Selenocysteine
  MOD_RES (172)..(172): Selenocysteine
  MOD_RES (182)..(182): Selenocysteine
  MOD_RES (199)..(199): Selenocysteine
  MOD_RES (213)..(213): Selenocysteine
  MOD_RES (217)..(217): Selenocysteine
  MOD_RES (222)..(222): Selenocysteine
  MOD_RES (252)..(252): Selenocysteine
  MOD_RES (257)..(257): Selenocysteine
  MOD_RES (296)..(296): Selenocysteine
  MOD_RES (303)..(303): Selenocysteine
  MOD_RES (308)..(308): Selenocysteine
  MOD_RES (315)..(315): Selenocysteine
  MOD_RES (343)..(343): Selenocysteine
  MOD_RES (365)..(365): Selenocysteine
  MOD_RES (381)..(381): Selenocysteine
  MOD_RES (424)..(424): Selenocysteine
  MOD_RES (456)..(456): Selenocysteine
  MOD_RES (466)..(466): Selenocysteine
  MOD_RES (521)..(521): Selenocysteine
  MOD_RES (531)..(531): Selenocysteine
  MOD_RES (810)..(810): Selenocysteine
  MOD_RES (829)..(829): Selenocysteine
  MOD_RES (833)..(833): Selenocysteine
  MOD_RES (867)..(867): Selenocysteine
  MOD_RES (888)..(888): Selenocysteine
  MOD_RES (934)..(934): Selenocysteine
  MOD_RES (955)..(955): Selenocysteine
  MOD_RES (974)..(974): Selenocysteine
  MOD_RES (991)..(991): Selenocysteine
  MOD_RES (994)..(994): Selenocysteine
  MOD_RES (1000)..(1000): Selenocysteine
  MOD_RES (1022)..(1022): Selenocysteine
  MOD_RES (1031)..(1031): Selenocysteine
  MOD_RES (1060)..(1060): Selenocysteine
  MOD_RES (1076)..(1076): Selenocysteine
  MOD_RES (1083)..(1083): Selenocysteine
  MOD_RES (1205)..(1205): Selenocysteine
  MOD_RES (1216)..(1216): Selenocysteine
  MOD_RES (1229)..(1229): Selenocysteine
  MOD_RES (1248)..(1248): Selenocysteine
  MOD_RES (1299)..(1299): Selenocysteine
  MOD_RES (1306)..(1306): Selenocysteine
  MOD_RES (1340)..(1340): Selenocysteine
  MOD_RES (1346)..(1346): Selenocysteine
  MOD_RES (1370)..(1370): Selenocysteine
MHSSNPKVRSSPSGNXQSSPKSKQEVMVRPPXVMSPSGNPQLDSKFSNQGKQGGSASQSQPSPCDSKSGGHXPKALPGPGGSMGLKNGAGNGAKGKGKRERSISADSFDQRDPGXPNDDSDIKECNSADHIKSQDSQHXPHSMXPSNAXAPRSSXPSHGQXXAXEPXPAQKXPAKVVYVFSXEMANKAAEAVLKGQVEXIVSFHIQNISNNKXERSXAPLNXQISALRNDPKPLPQQPPAPANQDQNSSQNXRLQPXPPIPAPAPKPAAPPRPLDRESPGVENKLIPSVGSPASSXPLPPDGXGPNSXPNNRAVXPVSQGSNSSSADPKAPPPPPVSSGEPPXLGENPDGLSQEQLEHRERSLQXLRDIQRMLFPDEKEFXGAQSGGPQQNPGVLDGPQKKPEGPIQAMMAQSQSLGKGPGPRXDVGAPFGPQGHRDVPFSPDEMVPPSMNSQSGXIGPDHLDHMXPEQIAWLKLQQEFYEEKRRKQEQVVVQQCSLQDMMVHQHGPRGVVRGPPPPYQMXPSEGWAPGGXEPFSDGINMPHSLPPRGMAPHPNMPGSQMRLPGFAGMINSEMEGPNVPNPASRPGLSGVSWPDDVPKIPDGRNFPPGQGIFSGPGRGERFPNPQGLSEEMFQQQLAEKQLGLPPGMAMEGIRPSMEMNRMIPGSQRHMEPGNNPIFPRIPVEGPLSPSRGDFPKGIPPQMGPGRELEFGMVPSGMKGDVNLNVNMGSNSQMIPQKMREAGAGPEEMLKLRPGGSDMLPAQQKMVPLPFGEHPQQEYGMGPRPFLPMSQGPGSNSGLRNLREPIGPDQRXNSRLSHMPPLPLNPSSNPXSLNXAPPVQRGLGRKPLDISVAGSQVHSPGINPLKSPXMHQVQSPMLGSPSGNLKSPQXPSQLAGMLAGPAAAASIKSPPVLGSAAASPVHLKSPSLPAPSPGWXSSPKPPLQSPGIPPNHKAPLXMASPAMLGNVESGGPPPPXASQPASVNIPGSLPSSXPYXMPPEPXLSQNPLSIMMSRMSKFAMPSSXPLYHDAIKXVASSDDDSPPARSPNLPSMNNMPGMGINXQNPRISGPNPVVPMPXLSPMGMXQPLSHSNQMPSPNAVGPNIPPHGVPMGPGLMSHNPIMGHGSQEPPMVPQGRMGFPQGFPPVQSPPQQVPFPHNGPSGGQGSFPGGMGFPGEGPLGRPSNLPQSSADAALCKPGGPGGPDSFXVLGNSMPSVFXDPDLQEVIRPGAXGIPEFDLSRIIPSEKPSQXLQYFPRGEVPGRKQPQGPGPGFSHMQGMMGEQAPRMGLALPGMGGPGPVGXPDIPLGXAPSMPGHNPMRPPAFLQQGMMGPHHRMMSPAQSXMPGQPXLMSNPAAAVGMIPGKDRGPAGLYXHPGPVGSPGMMMSMQGMMGPQQNIMIPPQMRPRGMAADVGMGGFSQGPGNPGNMMF

SEQ ID NO: 4126 - protein, 1462 aa, Homo sapiens
  MOD_RES (8)..(8): Selenocysteine
  MOD_RES (13)..(13): Selenocysteine
  MOD_RES (30)..(30): Selenocysteine
  MOD_RES (92)..(92): Selenocysteine
  MOD_RES (139)..(139): Selenocysteine
  MOD_RES (159)..(160): Selenocysteine
  MOD_RES (207)..(208): Selenocysteine
  MOD_RES (213)..(213): Selenocysteine
  MOD_RES (248)..(248): Selenocysteine
  MOD_RES (256)..(256): Selenocysteine
  MOD_RES (261)..(261): Selenocysteine
  MOD_RES (307)..(307): Selenocysteine
  MOD_RES (311)..(311): Selenocysteine
  MOD_RES (314)..(314): Selenocysteine
  MOD_RES (318)..(318): Selenocysteine
  MOD_RES (320)..(320): Selenocysteine
  MOD_RES (322)..(323): Selenocysteine
  MOD_RES (376)..(376): Selenocysteine
  MOD_RES (390)..(390): Selenocysteine
  MOD_RES (419)..(419): Selenocysteine
  MOD_RES (439)..(439): Selenocysteine
  MOD_RES (477)..(477): Selenocysteine
  MOD_RES (603)..(603): Selenocysteine
  MOD_RES (619)..(619): Selenocysteine
  MOD_RES (634)..(634): Selenocysteine
  MOD_RES (699)..(699): Selenocysteine
  MOD_RES (752)..(752): Selenocysteine
  MOD_RES (829)..(829): Selenocysteine
  MOD_RES (847)..(848): Selenocysteine
  MOD_RES (864)..(864): Selenocysteine
  MOD_RES (881)..(881): Selenocysteine
  MOD_RES (899)..(899): Selenocysteine
  MOD_RES (909)..(909): Selenocysteine
  MOD_RES (920)..(920): Selenocysteine
  MOD_RES (952)..(952): Selenocysteine
  MOD_RES (976)..(976): Selenocysteine
  MOD_RES (997)..(998): Selenocysteine
  MOD_RES (1006)..(1006): Selenocysteine
  MOD_RES (1035)..(1035): Selenocysteine
  MOD_RES (1041)..(1041): Selenocysteine
  MOD_RES (1052)..(1052): Selenocysteine
  MOD_RES (1063)..(1063): Selenocysteine
  MOD_RES (1072)..(1072): Selenocysteine
  MOD_RES (1075)..(1075): Selenocysteine
  MOD_RES (1142)..(1142): Selenocysteine
  MOD_RES (1157)..(1157): Selenocysteine
  MOD_RES (1205)..(1205): Selenocysteine
  MOD_RES (1280)..(1280): Selenocysteine
  MOD_RES (1282)..(1282): Selenocysteine
  MOD_RES (1301)..(1301): Selenocysteine
  MOD_RES (1333)..(1333): Selenocysteine
  MOD_RES (1366)..(1366): Selenocysteine
  MOD_RES (1392)..(1392): Selenocysteine
MHPENKLXNHGKXGNGGAQSQHQNVNQGPXCNVGSKGVGAGNHGAKANQISPSNSSLKNPQAGVPPFSSLKGKVKRDRSVSVDSGEQREAGXPSLDSEAKEVAPRSKRRCVLERKQPYSGDEWCSGPDSEEDDKPIGAXHNCNVADPAMAAPQLGPGQXXQLPLSESSVPGAPHGPPPGLRPDAPGGGGGGGGVPGKPPSQFVYVFXXHLANXAAEAVLQGRADSILAYHQQNVPRAKLDQAPKVPPXPEPLPLSXPSAGXPQSQPPPLPPPPPPAPGSAPPALPPEGPPEDSSQDLAPNSVGAASXGGGXGGXHPNXPXAXXANNPLPPGGDPSSAPGPALLGEAAAPGNGQRSLVGSEGLSKEQLEHRERSLQXLRDIERLLLRSGEXEPFLKGPPGGAGEGGPPAQAPPPPQQPPXAPPSGLKKYEEPLQSMISQXQSLGGPPLEHEVPGHPPGGDMGQQMNMMIQRLGQDSLXPEQVAWRKLQEEYYEEKRRKEEQIGLHGSRPLQDMMGMGGMMVRGPPPPYHSKPGDQWPPGMGAQLRGPMDVQDPMQLRGGPPFPGPRFPGNQIQRVPGFGGMQSMPMEVPMNAMQRPVRPGMGWXEDLPPMGGPSNFAQNXMPYPGGQGEAERFMXPRVREELLRHQLLEKRSMGMQRPLGMAGSGMGQSMEMERMMQAHRQMDPAMFPGQMAGGEGLAGXPMGMEFGGGRGLLSPPMGQSGLREVDPPMGPGNLNMNMNVNMNMNMNLNVQMXPQQQMLMSQKMRGPGDLMGPQGLSPEEMARVRAQNSSGVMGGPQKMLMPSQFPNQGQQGFSGGQGPYQAMSQDMGNXQDMFSPDQSSMPMSNVGXXRLSHMPLPPASNPPGXVHSAPNRGLGRRPSDLXISINQMGSPGMGHLKSPXLSQVHSPLVXSPSANLKSPQXPSQMVPLPSANPPGPLKSPQVLGSSLSVRSPXGSPSRLKSPSMAVPSPGWVASPKXAMPSPGVSQNKQPPLNMNSSXXLSNMEQGXLPPSGPRSSSSAPPANPPSGLMNPSLPFXSSPDPXPSQNPLSLMMXQMSKYAMPSSXPLYHNAIKXIAXSDDELLPDRPLLPPPPPPQGSGPGISNSQPSQMHLNSAAAQSPMGMNLPGQQPLSHEPPPAMLPSPXPLGSNIPLHPNAQGXGGPPQNSMMMAPGGPDSLNAPCGPVPSSSQMMPFPPRLQQPHGAMAPXGGGGGGPGLQQHYPSGMALPPEDLPNQPPGPMPPQQHLMGKAMAGRMGDAYPPGVLPGVASVLNDPELSEVIRPXPXGIPEFDLSRIIPSEKPSSXLQYFPKSENQPPKAQPPNLHLMNLQNMMAEQXPSRPPNLPGQQGVQRGLNMSMCHPGQMSLLGRXGVPPQQGMVPHGLHQGVMSPPQGLMXQQNFMLMKQRGVGGEVYSQPPHMLSPQGSLMGPPPQQNLMVSHPLRQRSVSLDSQMGYLPAPGGMANLPF

SEQ ID NO: 4127 - protein, 88 aa, Homo sapiens
  MOD_RES (8)..(8): Selenocysteine
  MOD_RES (45)..(45): Selenocysteine
  MOD_RES (50)..(50): Selenocysteine
  MOD_RES (67)..(67): Selenocysteine
MRILANKXRLPHPRRREAPGSPPLSPRGHCPPAPAKPMHPENKLXNHGKXGNGGAQSQHQNVNQGPXCNVGSKGVGAGNHGAKANQIS

SEQ ID NO: 4128 - protein, 1499 aa, Homo sapiens
  MOD_RES (8)..(8): Selenocysteine
  MOD_RES (45)..(45): Selenocysteine
  MOD_RES (50)..(50): Selenocysteine
  MOD_RES (67)..(67): Selenocysteine
  MOD_RES (129)..(129): Selenocysteine
  MOD_RES (176)..(176): Selenocysteine
  MOD_RES (196)..(197): Selenocysteine
  MOD_RES (244)..(245): Selenocysteine
  MOD_RES (250)..(250): Selenocysteine
  MOD_RES (285)..(285): Selenocysteine
  MOD_RES (293)..(293): Selenocysteine
  MOD_RES (298)..(298): Selenocysteine
  MOD_RES (344)..(344): Selenocysteine
  MOD_RES (348)..(348): Selenocysteine
  MOD_RES (351)..(351): Selenocysteine
  MOD_RES (355)..(355): Selenocysteine
  MOD_RES (357)..(357): Selenocysteine
  MOD_RES (359)..(360): Selenocysteine
  MOD_RES (413)..(413): Selenocysteine
  MOD_RES (427)..(427): Selenocysteine
  MOD_RES (456)..(456): Selenocysteine
  MOD_RES (476)..(476): Selenocysteine
  MOD_RES (514)..(514): Selenocysteine
  MOD_RES (640)..(640): Selenocysteine
  MOD_RES (656)..(656): Selenocysteine
  MOD_RES (671)..(671): Selenocysteine
  MOD_RES (736)..(736): Selenocysteine
  MOD_RES (789)..(789): Selenocysteine
  MOD_RES (866)..(866): Selenocysteine
  MOD_RES (884)..(885): Selenocysteine
  MOD_RES (901)..(901): Selenocysteine
  MOD_RES (918)..(918): Selenocysteine
  MOD_RES (936)..(936): Selenocysteine
  MOD_RES (946)..(946): Selenocysteine
  MOD_RES (957)..(957): Selenocysteine
  MOD_RES (989)..(989): Selenocysteine
  MOD_RES (1013)..(1013): Selenocysteine
  MOD_RES (1034)..(1035): Selenocysteine
  MOD_RES (1043)..(1043): Selenocysteine
  MOD_RES (1072)..(1072): Selenocysteine
  MOD_RES (1078)..(1078): Selenocysteine
  MOD_RES (1089)..(1089): Selenocysteine
  MOD_RES (1100)..(1100): Selenocysteine
  MOD_RES (1109)..(1109): Selenocysteine
  MOD_RES (1112)..(1112): Selenocysteine
  MOD_RES (1179)..(1179): Selenocysteine
  MOD_RES (1194)..(1194): Selenocysteine
  MOD_RES (1242)..(1242): Selenocysteine
  MOD_RES (1317)..(1317): Selenocysteine
  MOD_RES (1319)..(1319): Selenocysteine
  MOD_RES (1338)..(1338): Selenocysteine
  MOD_RES (1370)..(1370): Selenocysteine
  MOD_RES (1403)..(1403): Selenocysteine
  MOD_RES (1429)..(1429): Selenocysteine
MRILANKXRLPHPRRREAPGSPPLSPRGHCPPAPAKPMHPENKLXNHGKXGNGGAQSQHQNVNQGPXCNVGSKGVGAGNHGAKANQISPSNSSLKNPQAGVPPFSSLKGKVKRDRSVSVDSGEQREAGXPSLDSEAKEVAPRSKRRCVLERKQPYSGDEWCSGPDSEEDDKPIGAXHNCNVADPAMAAPQLGPGQXXQLPLSESSVPGAPHGPPPGLRPDAPGGGGGGGGVPGKPPSQFVYVFXXHLANXAAEAVLQGRADSILAYHQQNVPRAKLDQAPKVPPXPEPLPLSXPSAGXPQSQPPPLPPPPPPAPGSAPPALPPEGPPEDSSQDLAPNSVGAASXGGGXGGXHPNXPXAXXANNPLPPGGDPSSAPGPALLGEAAAPGNGQRSLVGSEGLSKEQLEHRERSLQXLRDIERLLLRSGEXEPFLKGPPGGAGEGGPPAQAPPPPQQPPXAPPSGLKKYEEPLQSMISQXQSLGGPPLEHEVPGHPPGGDMGQQMNMMIQRLGQDSLXPEQVAWRKLQEEYYEEKRRKEEQIGLHGSRPLQDMMGMGGMMVRGPPPPYHSKPGDQWPPGMGAQLRGPMDVQDPMQLRGGPPFPGPRFPGNQIQRVPGFGGMQSMPMEVPMNAMQRPVRPGMGWXEDLPPMGGPSNFAQNXMPYPGGQGEAERFMXPRVREELLRHQLLEKRSMGMQRPLGMAGSGMGQSMEMERMMQAHRQMDPAMFPGQMAGGEGLAGXPMGMEFGGGRGLLSPPMGQSGLREVDPPMGPGNLNMNMNVNMNMNMNLNVQMXPQQQMLMSQKMRGPGDLMGPQGLSPEEMARVRAQNSSGVMGGPQKMLMPSQFPNQGQQGFSGGQGPYQAMSQDMGNXQDMFSPDQSSMPMSNVGXXRLSHMPLPPASNPPGXVHSAPNRGLGRRPSDLXISINQMGSPGMGHLKSPXLSQVHSPLVXSPSANLKSPQXPSQMVPLPSANPPGPLKSPQVLGSSLSVRSPXGSPSRLKSPSMAVPSPGWVASPKXAMPSPGVSQNKQPPLNMNSSXXLSNMEQGXLPPSGPRSSSSAPPANPPSGLMNPSLPFXSSPDPXPSQNPLSLMMXQMSKYAMPSSXPLYHNAIKXIAXSDDELLPDRPLLPPPPPPQGSGPGISNSQPSQMHLNSAAAQSPMGMNLPGQQPLSHEPPPAMLPSPXPLGSNIPLHPNAQGXGGPPQNSMMMAPGGPDSLNAPCGPVPSSSQMMPFPPRLQQPHGAMAPXGGGGGGPGLQQHYPSGMALPPEDLPNQPPGPMPPQQHLMGKAMAGRMGDAYPPGVLPGVASVLNDPELSEVIRPXPXGIPEFDLSRIIPSEKPSSXLQYFPKSENQPPKAQPPNLHLMNLQNMMAEQXPSRPPNLPGQQGVQRGLNMSMCHPGQMSLLGRXGVPPQQGMVPHGLHQGVMSPPQGLMXQQNFMLMKQRGVGGEVYSQPPHMLSPQGSLMGPPPQQNLMVSHPLRQRSVSLDSQMGYLPAPGGMANLPF

SEQ ID NO: 4129 - protein, 467 aa, Homo sapiens
  MOD_RES (40)..(40): Selenocysteine
  MOD_RES (164)..(164): Selenocysteine
  MOD_RES (188)..(188): Selenocysteine
  MOD_RES (206)..(206): Selenocysteine
  MOD_RES (232)..(232): Selenocysteine
  MOD_RES (248)..(248): Selenocysteine
  MOD_RES (255)..(255): Selenocysteine
  MOD_RES (302)..(302): Selenocysteine
  MOD_RES (328)..(328): Selenocysteine
  MOD_RES (331)..(331): Selenocysteine
  MOD_RES (351)..(351): Selenocysteine
  MOD_RES (391)..(391): Selenocysteine
  MOD_RES (399)..(399): Selenocysteine
  MOD_RES (426)..(426): Selenocysteine
MGRSNSRSHSSRSKSRSQSSSRSRSRSHSRKKRYRSRSRXYSRSRSRDRMYSRDYRRDYRNNRGMRRPYGYRGRGRGYYQGGGGRYHRGGYRPVWNRRHSRSPRRGRSRSRSPKRRSVSSQRSRSRSRRSYRSSRSPRSSSSRSSSPYSKSPVSKRRGSQEKQXKKAEGEPQEESPLKSKSQEEPKDXFEHDPSESIDEFNKSSAXSGDIWPGLSAYDNSPRSPHSPSPIAXPPSQSSSCSDAPMLSXVHSAKNXPSQHSHSIQHSPERSGSGSVGNGSSRYSPSQNSPIHHIPSRRSPAKXIAPQNAPRDESRGRSSFYPDGGDQEXAKXGKFLKSPPLHKNLDAREKSXFREESPLRIKMIASDSHRPEVKLKMAPVPLDDSNRPASLXKDRLLASXLVHSVKKEQEFRSIFDHIKLPQASKSXSESFIQHIVSLVHHVKGPGICFEMAKSMFQSKIAVERYRQS

SEQ ID NO: 4130 - protein, 750 aa, Homo sapiens
  MOD_RES (40)..(40): Selenocysteine
  MOD_RES (164)..(164): Selenocysteine
  MOD_RES (188)..(188): Selenocysteine
  MOD_RES (206)..(206): Selenocysteine
  MOD_RES (232)..(232): Selenocysteine
  MOD_RES (248)..(248): Selenocysteine
  MOD_RES (255)..(255): Selenocysteine
  MOD_RES (302)..(302): Selenocysteine
  MOD_RES (328)..(328): Selenocysteine
  MOD_RES (331)..(331): Selenocysteine
  MOD_RES (339)..(339): Selenocysteine
  MOD_RES (353)..(353): Selenocysteine
  MOD_RES (400)..(400): Selenocysteine
  MOD_RES (403)..(403): Selenocysteine
  MOD_RES (423)..(423): Selenocysteine
  MOD_RES (429)..(429): Selenocysteine
  MOD_RES (462)..(462): Selenocysteine
  MOD_RES (471)..(472): Selenocysteine
  MOD_RES (487)..(487): Selenocysteine
  MOD_RES (492)..(492): Selenocysteine
  MOD_RES (524)..(524): Selenocysteine
  MOD_RES (564)..(564): Selenocysteine
  MOD_RES (572)..(572): Selenocysteine
  MOD_RES (599)..(599): Selenocysteine
  MOD_RES (625)..(625): Selenocysteine
  MOD_RES (631)..(631): Selenocysteine
  MOD_RES (637)..(637): Selenocysteine
  MOD_RES (642)..(642): Selenocysteine
  MOD_RES (659)..(659): Selenocysteine
  MOD_RES (664)..(664): Selenocysteine
  MOD_RES (724)..(724): Selenocysteine
  MOD_RES (746)..(746): Selenocysteine
MGRSNSRSHSSRSKSRSQSSSRSRSRSHSRKKRYRSRSRXYSRSRSRDRMYSRDYRRDYRNNRGMRRPYGYRGRGRGYYQGGGGRYHRGGYRPVWNRRHSRSPRRGRSRSRSPKRRSVSSQRSRSRSRRSYRSSRSPRSSSSRSSSPYSKSPVSKRRGSQEKQXKKAEGEPQEESPLKSKSQEEPKDXFEHDPSESIDEFNKSSAXSGDIWPGLSAYDNSPRSPHSPSPIAXPPSQSSSCSDAPMLSXVHSAKNXPSQHSHSIQHSPERSGSGSVGNGSSRYSPSQNSPIHHIPSRRSPAKXIAPQNAPRDESRGRSSFYPDGGDQEXAKXGKFLKRFXDEESRVFLLDRGNXRDKEASKEKGSEKGRAEGEWEDQEALDYFSDKESGKQKFNDSEGDDXEEXEDYRQFRKSVLADQGKSFAXASHRNXEEEGLKYKSKVSLKGNRESDGFREEKNYKLKEXGYVVERPSXXKDKHKEEDKNSERIXVKKEXQSPEQVKSEKLKDLFDYSPPLHKNLDAREKSXFREESPLRIKMIASDSHRPEVKLKMAPVPLDDSNRPASLXKDRLLASXLVHSVKKEQEFRSIFDHIKLPQASKSXSESFIQHIVSLVHHVKEQYFKSAAMXLNERFXSYQKAXEEHSXRQKSPEIHRRIDISPSXLRKHXRLAGEERVFKEENQKGDKKLRCDSADLRHDIDRRRKERSKERGDSKGSRESSGSRKQEKXPKDYKEYKSYKDDSKNVFVFYXAYGG

SEQ ID NO: 4131 - protein, 869 aa, Homo sapiens
  MOD_RES (40)..(40): Selenocysteine
  MOD_RES (164)..(164): Selenocysteine
  MOD_RES (188)..(188): Selenocysteine
  MOD_RES (206)..(206): Selenocysteine
  MOD_RES (232)..(232): Selenocysteine
  MOD_RES (248)..(248): Selenocysteine
  MOD_RES (255)..(255): Selenocysteine
  MOD_RES (302)..(302): Selenocysteine
  MOD_RES (328)..(328): Selenocysteine
  MOD_RES (331)..(331): Selenocysteine
  MOD_RES (339)..(339): Selenocysteine
  MOD_RES (353)..(353): Selenocysteine
  MOD_RES (400)..(400): Selenocysteine
  MOD_RES (403)..(403): Selenocysteine
  MOD_RES (423)..(423): Selenocysteine
  MOD_RES (429)..(429): Selenocysteine
  MOD_RES (462)..(462): Selenocysteine
  MOD_RES (471)..(472): Selenocysteine
  MOD_RES (487)..(487): Selenocysteine
  MOD_RES (492)..(492): Selenocysteine
  MOD_RES (524)..(524): Selenocysteine
  MOD_RES (564)..(564): Selenocysteine
  MOD_RES (572)..(572): Selenocysteine
  MOD_RES (599)..(599): Selenocysteine
  MOD_RES (625)..(625): Selenocysteine
  MOD_RES (631)..(631): Selenocysteine
  MOD_RES (637)..(637): Selenocysteine
  MOD_RES (642)..(642): Selenocysteine
  MOD_RES (659)..(659): Selenocysteine
  MOD_RES (664)..(664): Selenocysteine
  MOD_RES (724)..(724): Selenocysteine
  MOD_RES (777)..(777): Selenocysteine
  MOD_RES (796)..(796): Selenocysteine
  MOD_RES (817)..(817): Selenocysteine
  MOD_RES (837)..(837): Selenocysteine
  MOD_RES (853)..(853): Selenocysteine
MGRSNSRSHSSRSKSRSQSSSRSRSRSHSRKKRYRSRSRXYSRSRSRDRMYSRDYRRDYRNNRGMRRPYGYRGRGRGYYQGGGGRYHRGGYRPVWNRRHSRSPRRGRSRSRSPKRRSVSSQRSRSRSRRSYRSSRSPRSSSSRSSSPYSKSPVSKRRGSQEKQXKKAEGEPQEESPLKSKSQEEPKDXFEHDPSESIDEFNKSSAXSGDIWPGLSAYDNSPRSPHSPSPIAXPPSQSSSCSDAPMLSXVHSAKNXPSQHSHSIQHSPERSGSGSVGNGSSRYSPSQNSPIHHIPSRRSPAKXIAPQNAPRDESRGRSSFYPDGGDQEXAKXGKFLKRFXDEESRVFLLDRGNXRDKEASKEKGSEKGRAEGEWEDQEALDYFSDKESGKQKFNDSEGDDXEEXEDYRQFRKSVLADQGKSFAXASHRNXEEEGLKYKSKVSLKGNRESDGFREEKNYKLKEXGYVVERPSXXKDKHKEEDKNSERIXVKKEXQSPEQVKSEKLKDLFDYSPPLHKNLDAREKSXFREESPLRIKMIASDSHRPEVKLKMAPVPLDDSNRPASLXKDRLLASXLVHSVKKEQEFRSIFDHIKLPQASKSXSESFIQHIVSLVHHVKEQYFKSAAMXLNERFXSYQKAXEEHSXRQKSPEIHRRIDISPSXLRKHXRLAGEERVFKEENQKGDKKLRCDSADLRHDIDRRRKERSKERGDSKGSRESSGSRKQEKXPKDYKEYKSYKDDSKHKREQDHSRSSSSSASPSSPSSREEKESKKEREEEFKXHHEMKEYSGFAGVSRPRGXFHDDRDDGVDYWAKRGRGRGXFQRGRGRFNFKKSGSSPKWXHDKYQGDGIVEDEEEXMENNEEKKDRRKEEKE

SEQ ID NO: 4132 - protein, 918 aa, Homo sapiens
  MOD_RES (40)..(40): Selenocysteine
  MOD_RES (164)..(164): Selenocysteine
  MOD_RES (188)..(188): Selenocysteine
  MOD_RES (206)..(206): Selenocysteine
  MOD_RES (232)..(232): Selenocysteine
  MOD_RES (248)..(248): Selenocysteine
  MOD_RES (255)..(255): Selenocysteine
  MOD_RES (302)..(302): Selenocysteine
  MOD_RES (328)..(328): Selenocysteine
  MOD_RES (331)..(331): Selenocysteine
  MOD_RES (339)..(339): Selenocysteine
  MOD_RES (353)..(353): Selenocysteine
  MOD_RES (400)..(400): Selenocysteine
  MOD_RES (403)..(403): Selenocysteine
  MOD_RES (423)..(423): Selenocysteine
  MOD_RES (429)..(429): Selenocysteine
  MOD_RES (462)..(462): Selenocysteine
  MOD_RES (471)..(472): Selenocysteine
  MOD_RES (487)..(487): Selenocysteine
  MOD_RES (492)..(492): Selenocysteine
  MOD_RES (524)..(524): Selenocysteine
  MOD_RES (564)..(564): Selenocysteine
  MOD_RES (572)..(572): Selenocysteine
  MOD_RES (599)..(599): Selenocysteine
  MOD_RES (625)..(625): Selenocysteine
  MOD_RES (631)..(631): Selenocysteine
  MOD_RES (637)..(637): Selenocysteine
  MOD_RES (642)..(642): Selenocysteine
  MOD_RES (659)..(659): Selenocysteine
  MOD_RES (664)..(664): Selenocysteine
  MOD_RES (724)..(724): Selenocysteine
  MOD_RES (777)..(777): Selenocysteine
  MOD_RES (796)..(796): Selenocysteine
  MOD_RES (813)..(813): Selenocysteine
  MOD_RES (815)..(815): Selenocysteine
  MOD_RES (822)..(823): Selenocysteine
  MOD_RES (838)..(838): Selenocysteine
  MOD_RES (866)..(866): Selenocysteine
  MOD_RES (886)..(886): Selenocysteine
  MOD_RES (902)..(902): Selenocysteine
MGRSNSRSHSSRSKSRSQSSSRSRSRSHSRKKRYRSRSRXYSRSRSRDRMYSRDYRRDYRNNRGMRRPYGYRGRGRGYYQGGGGRYHRGGYRPVWNRRHSRSPRRGRSRSRSPKRRSVSSQRSRSRSRRSYRSSRSPRSSSSRSSSPYSKSPVSKRRGSQEKQXKKAEGEPQEESPLKSKSQEEPKDXFEHDPSESIDEFNKSSAXSGDIWPGLSAYDNSPRSPHSPSPIAXPPSQSSSCSDAPMLSXVHSAKNXPSQHSHSIQHSPERSGSGSVGNGSSRYSPSQNSPIHHIPSRRSPAKXIAPQNAPRDESRGRSSFYPDGGDQEXAKXGKFLKRFXDEESRVFLLDRGNXRDKEASKEKGSEKGRAEGEWEDQEALDYFSDKESGKQKFNDSEGDDXEEXEDYRQFRKSVLADQGKSFAXASHRNXEEEGLKYKSKVSLKGNRESDGFREEKNYKLKEXGYVVERPSXXKDKHKEEDKNSERIXVKKEXQSPEQVKSEKLKDLFDYSPPLHKNLDAREKSXFREESPLRIKMIASDSHRPEVKLKMAPVPLDDSNRPASLXKDRLLASXLVHSVKKEQEFRSIFDHIKLPQASKSXSESFIQHIVSLVHHVKEQYFKSAAMXLNERFXSYQKAXEEHSXRQKSPEIHRRIDISPSXLRKHXRLAGEERVFKEENQKGDKKLRCDSADLRHDIDRRRKERSKERGDSKGSRESSGSRKQEKXPKDYKEYKSYKDDSKHKREQDHSRSSSSSASPSSPSSREEKESKKEREEEFKXHHEMKEYSGFAGVSRPRGXFFRIRGRGRARGVFAGXNXGPNNSNXXFQKRPKEEEWDPEYXPKSKKYFLHDDRDDGVDYWAKRGRGRGXFQRGRGRFNFKKSGSSPKWXHDKYQGDGIVEDEEEXMENNEEKKDRRKEEKE

SEQ ID NO: 4133 - protein, 726 aa, Homo sapiens
  MOD_RES (42)..(42): Selenocysteine
  MOD_RES (166)..(166): Selenocysteine
  MOD_RES (190)..(190): Selenocysteine
  MOD_RES (208)..(208): Selenocysteine
  MOD_RES (234)..(234): Selenocysteine
  MOD_RES (250)..(250): Selenocysteine
  MOD_RES (257)..(257): Selenocysteine
  MOD_RES (304)..(304): Selenocysteine
  MOD_RES (330)..(330): Selenocysteine
  MOD_RES (333)..(333): Selenocysteine
  MOD_RES (341)..(341): Selenocysteine
  MOD_RES (355)..(355): Selenocysteine
  MOD_RES (402)..(402): Selenocysteine
  MOD_RES (405)..(405): Selenocysteine
  MOD_RES (425)..(425): Selenocysteine
  MOD_RES (431)..(431): Selenocysteine
  MOD_RES (464)..(464): Selenocysteine
  MOD_RES (473)..(474): Selenocysteine
  MOD_RES (489)..(489): Selenocysteine
  MOD_RES (494)..(494): Selenocysteine
  MOD_RES (526)..(526): Selenocysteine
  MOD_RES (566)..(566): Selenocysteine
  MOD_RES (574)..(574): Selenocysteine
  MOD_RES (601)..(601): Selenocysteine
  MOD_RES (627)..(627): Selenocysteine
  MOD_RES (633)..(633): Selenocysteine
  MOD_RES (639)..(639): Selenocysteine
  MOD_RES (644)..(644): Selenocysteine
  MOD_RES (660)..(660): Selenocysteine
  MOD_RES (665)..(665): Selenocysteine
  MOD_RES (725)..(725): Selenocysteine
MGRSNSRSHSSRSKSRSQSSSRSRSRSHSRKKRYSSRSRSRXYSRSRSRDRMYSRDYRRDYRNNRGMRRPYGYRGRGRGYYQGGGGRYHRGGYRPVWNRRHSRSPRRGRSRSRSPKRRSVSSQRSRSRSRRSYRSSRSPRSSSSRSSSPYSKSPVSKRRGSQEKQXKKAEGEPQEESPLKSKSQEEPKDXFEHDPSESIDEFNKSSAXSGDIWPGLSAYDNSPRSPHSPSPIAXPPSQSSSCSDAPMLSXVHSAKNXPSQHSHSIQHSPERSGSGSVGNGSSRYSPSQNSPIHHIPSRRSPAKXIAPQNAPRDESRGRSSFYPDGGDQEXAKXGKFLKRFXDEESRVFLLDRGNXRDKEASKEKGSEKGRAEGEWEDQEALDYFSDKESGKQKFNDSEGDDXEEXEDYRQFRKSVLADQGKSFAXASHRNXEEEGLKYKSKVSLKGNRESDGFREEKNYKLKEXGYVVERPSXXKDKHKEEDKNSERIXVKKEXQSPEQVKSEKLKDLFDYSPPLHKNLDAREKSXFREESPLRIKMIASDSHRPEVKLKMAPVPLDDSNRPASLXKDRLLASXLVHSVKKEQEFRSIFDHIKLPQASKSXSESFIQHIVSLVHHVKEQYFKSAAMXLNERFXSYQKAXEEHSXRQKSPEIHRIDISPSXLRKHXRLAGEERVFKEENQKGDKKLRCDSADLRHDIDRRRKERSKERGDSKGSRESSGSRKQEKXP

SEQ ID NO: 4134 - protein, 747 aa, Homo sapiens
  MOD_RES (42)..(42): Selenocysteine
  MOD_RES (166)..(166): Selenocysteine
  MOD_RES (190)..(190): Selenocysteine
  MOD_RES (208)..(208): Selenocysteine
  MOD_RES (234)..(234): Selenocysteine
  MOD_RES (250)..(250): Selenocysteine
  MOD_RES (257)..(257): Selenocysteine
  MOD_RES (304)..(304): Selenocysteine
  MOD_RES (330)..(330): Selenocysteine
  MOD_RES (333)..(333): Selenocysteine
  MOD_RES (353)..(353): Selenocysteine
  MOD_RES (393)..(393): Selenocysteine
  MOD_RES (401)..(401): Selenocysteine
  MOD_RES (428)..(428): Selenocysteine
  MOD_RES (454)..(454): Selenocysteine
  MOD_RES (460)..(460): Selenocysteine
  MOD_RES (466)..(466): Selenocysteine
  MOD_RES (471)..(471): Selenocysteine
  MOD_RES (488)..(488): Selenocysteine
  MOD_RES (493)..(493): Selenocysteine
  MOD_RES (553)..(553): Selenocysteine
  MOD_RES (606)..(606): Selenocysteine
  MOD_RES (625)..(625): Selenocysteine
  MOD_RES (642)..(642): Selenocysteine
  MOD_RES (644)..(644): Selenocysteine
  MOD_RES (651)..(652): Selenocysteine
  MOD_RES (667)..(667): Selenocysteine
  MOD_RES (695)..(695): Selenocysteine
  MOD_RES (715)..(715): Selenocysteine
  MOD_RES (731)..(731): Selenocysteine
MGRSNSRSHSSRSKSRSQSSSRSRSRSHSRKKRYSSRSRSRXYSRSRSRDRMYSRDYRRDYRNNRGMRRPYGYRGRGRGYYQGGGGRYHRGGYRPVWNRRHSRSPRRGRSRSRSPKRRSVSSQRSRSRSRRSYRSSRSPRSSSSRSSSPYSKSPVSKRRGSQEKQXKKAEGEPQEESPLKSKSQEEPKDXFEHDPSESIDEFNKSSAXSGDIWPGLSAYDNSPRSPHSPSPIAXPPSQSSSCSDAPMLSXVHSAKNXPSQHSHSIQHSPERSGSGSVGNGSSRYSPSQNSPIHHIPSRRSPAKXIAPQNAPRDESRGRSSFYPDGGDQEXAKXGKFLKSPPLHKNLDAREKSXFREESPLRIKMIASDSHRPEVKLKMAPVPLDDSNRPASLXKDRLLASXLVHSVKKEQEFRSIFDHIKLPQASKSXSESFIQHIVSLVHHVKEQYFKSAAMXLNERFXSYQKAXEEHSXRQKSPEIHRRIDISPSXLRKHXRLAGEERVFKEENQKGDKKLRCDSADLRHDIDRRRKERSKERGDSKGSRESSGSRKQEKXPKDYKEYKSYKDDSKHKREQDHSRSSSSSASPSSPSSREEKESKKEREEEFKXHHEMKEYSGFAGVSRPRGXFFRIRGRGRARGVFAGXNXGPNNSNXXFQKRPKEEEWDPEYXPKSKKYFLHDDRDDGVDYWAKRGRGRGXFQRGRGRFNFKKSGSSPKWXHDKYQGDGIVEDEEEXMENNEEKKDRRKEEKE

SEQ ID NO: 4135 - protein, 752 aa, Homo sapiens
  MOD_RES (42)..(42): Selenocysteine
  MOD_RES (166)..(166): Selenocysteine
  MOD_RES (190)..(190): Selenocysteine
  MOD_RES (208)..(208): Selenocysteine
  MOD_RES (234)..(234): Selenocysteine
  MOD_RES (250)..(250): Selenocysteine
  MOD_RES (257)..(257): Selenocysteine
  MOD_RES (304)..(304): Selenocysteine
  MOD_RES (330)..(330): Selenocysteine
  MOD_RES (333)..(333): Selenocysteine
  MOD_RES (341)..(341): Selenocysteine
  MOD_RES (355)..(355): Selenocysteine
  MOD_RES (402)..(402): Selenocysteine
  MOD_RES (405)..(405): Selenocysteine
  MOD_RES (425)..(425): Selenocysteine
  MOD_RES (431)..(431): Selenocysteine
  MOD_RES (464)..(464): Selenocysteine
  MOD_RES (473)..(474): Selenocysteine
  MOD_RES (489)..(489): Selenocysteine
  MOD_RES (494)..(494): Selenocysteine
  MOD_RES (526)..(526): Selenocysteine
  MOD_RES (566)..(566): Selenocysteine
  MOD_RES (574)..(574): Selenocysteine
  MOD_RES (601)..(601): Selenocysteine
  MOD_RES (627)..(627): Selenocysteine
  MOD_RES (633)..(633): Selenocysteine
  MOD_RES (639)..(639): Selenocysteine
  MOD_RES (644)..(644): Selenocysteine
  MOD_RES (661)..(661): Selenocysteine
  MOD_RES (666)..(666): Selenocysteine
  MOD_RES (726)..(726): Selenocysteine
  MOD_RES (748)..(748): Selenocysteine
MGRSNSRSHSSRSKSRSQSSSRSRSRSHSRKKRYSSRSRSRXYSRSRSRDRMYSRDYRRDYRNNRGMRRPYGYRGRGRGYYQGGGGRYHRGGYRPVWNRRHSRSPRRGRSRSRSPKRRSVSSQRSRSRSRRSYRSSRSPRSSSSRSSSPYSKSPVSKRRGSQEKQXKKAEGEPQEESPLKSKSQEEPKDXFEHDPSESIDEFNKSSAXSGDIWPGLSAYDNSPRSPHSPSPIAXPPSQSSSCSDAPMLSXVHSAKNXPSQHSHSIQHSPERSGSGSVGNGSSRYSPSQNSPIHHIPSRRSPAKXIAPQNAPRDESRGRSSFYPDGGDQEXAKXGKFLKRFXDEESRVFLLDRGNXRDKEASKEKGSEKGRAEGEWEDQEALDYFSDKESGKQKFNDSEGDDXEEXEDYRQFRKSVLADQGKSFAXASHRNXEEEGLKYKSKVSLKGNRESDGFREEKNYKLKEXGYVVERPSXXKDKHKEEDKNSERIXVKKEXQSPEQVKSEKLKDLFDYSPPLHKNLDAREKSXFREESPLRIKMIASDSHRPEVKLKMAPVPLDDSNRPASLXKDRLLASXLVHSVKKEQEFRSIFDHIKLPQASKSXSESFIQHIVSLVHHVKEQYFKSAAMXLNERFXSYQKAXEEHSXRQKSPEIHRRIDISPSXLRKHXRLAGEERVFKEENQKGDKKLRCDSADLRHDIDRRRKERSKERGDSKGSRESSGSRKQEKXPKDYKEYKSYKDDSKNVFVFYXAYGG

SEQ ID NO: 4136 - protein, 871 aa, Homo sapiens
  MOD_RES (42)..(42): Selenocysteine
  MOD_RES (166)..(166): Selenocysteine
  MOD_RES (190)..(190): Selenocysteine
  MOD_RES (208)..(208): Selenocysteine
  MOD_RES (234)..(234): Selenocysteine
  MOD_RES (250)..(250): Selenocysteine
  MOD_RES (257)..(257): Selenocysteine
  MOD_RES (304)..(304): Selenocysteine
  MOD_RES (330)..(330): Selenocysteine
  MOD_RES (333)..(333): Selenocysteine
  MOD_RES (341)..(341): Selenocysteine
  MOD_RES (355)..(355): Selenocysteine
  MOD_RES (402)..(402): Selenocysteine
  MOD_RES (405)..(405): Selenocysteine
  MOD_RES (425)..(425): Selenocysteine
  MOD_RES (431)..(431): Selenocysteine
  MOD_RES (464)..(464): Selenocysteine
  MOD_RES (473)..(474): Selenocysteine
  MOD_RES (489)..(489): Selenocysteine
  MOD_RES (494)..(494): Selenocysteine
  MOD_RES (526)..(526): Selenocysteine
  MOD_RES (566)..(566): Selenocysteine
  MOD_RES (574)..(574): Selenocysteine
  MOD_RES (601)..(601): Selenocysteine
  MOD_RES (627)..(627): Selenocysteine
  MOD_RES (633)..(633): Selenocysteine
  MOD_RES (639)..(639): Selenocysteine
  MOD_RES (644)..(644): Selenocysteine
  MOD_RES (661)..(661): Selenocysteine
  MOD_RES (666)..(666): Selenocysteine
  MOD_RES (726)..(726): Selenocysteine
  MOD_RES (779)..(779): Selenocysteine
  MOD_RES (798)..(798): Selenocysteine
  MOD_RES (819)..(819): Selenocysteine
  MOD_RES (839)..(839): Selenocysteine
  MOD_RES (855)..(855): Selenocysteine
MGRSNSRSHSSRSKSRSQSSSRSRSRSHSRKKRYSSRSRSRXYSRSRSRDRMYSRDYRRDYRNNRGMRRPYGYRGRGRGYYQGGGGRYHRGGYRPVWNRRHSRSPRRGRSRSRSPKRRSVSSQRSRSRSRRSYRSSRSPRSSSSRSSSPYSKSPVSKRRGSQEKQXKKAEGEPQEESPLKSKSQEEPKDXFEHDPSESIDEFNKSSAXSGDIWPGLSAYDNSPRSPHSPSPIAXPPSQSSSCSDAPMLSXVHSAKNXPSQHSHSIQHSPERSGSGSVGNGSSRYSPSQNSPIHHIPSRRSPAKXIAPQNAPRDESRGRSSFYPDGGDQEXAKXGKFLKRFXDEESRVFLLDRGNXRDKEASKEKGSEKGRAEGEWEDQEALDYFSDKESGKQKFNDSEGDDXEEXEDYRQFRKSVLADQGKSFAXASHRNXEEEGLKYKSKVSLKGNRESDGFREEKNYKLKEXGYVVERPSXXKDKHKEEDKNSERIXVKKEXQSPEQVKSEKLKDLFDYSPPLHKNLDAREKSXFREESPLRIKMIASDSHRPEVKLKMAPVPLDDSNRPASLXKDRLLASXLVHSVKKEQEFRSIFDHIKLPQASKSXSESFIQHIVSLVHHVKEQYFKSAAMXLNERFXSYQKAXEEHSXRQKSPEIHRRIDISPSXLRKHXRLAGEERVFKEENQKGDKKLRCDSADLRHDIDRRRKERSKERGDSKGSRESSGSRKQEKXPKDYKEYKSYKDDSKHKREQDHSRSSSSSASPSSPSSREEKESKKEREEEFKXHHEMKEYSGFAGVSRPRGXFHDDRDDGVDYWAKRGRGRGXFQRGRGRFNFKKSGSSPKWXHDKYQGDGIVEDEEEXMENNEEKKDRRKEEKE

SEQ ID NO: 4137 - protein, 920 aa, Homo sapiens
  MOD_RES (42)..(42): Selenocysteine
  MOD_RES (166)..(166): Selenocysteine
  MOD_RES (190)..(190): Selenocysteine
  MOD_RES (208)..(208): Selenocysteine
  MOD_RES (234)..(234): Selenocysteine
  MOD_RES (250)..(250): Selenocysteine
  MOD_RES (257)..(257): Selenocysteine
  MOD_RES (304)..(304): Selenocysteine
  MOD_RES (330)..(330): Selenocysteine
  MOD_RES (333)..(333): Selenocysteine
  MOD_RES (341)..(341): Selenocysteine
  MOD_RES (355)..(355): Selenocysteine
  MOD_RES (402)..(402): Selenocysteine
  MOD_RES (405)..(405): Selenocysteine
  MOD_RES (425)..(425): Selenocysteine
  MOD_RES (431)..(431): Selenocysteine
  MOD_RES (464)..(464): Selenocysteine
  MOD_RES (473)..(474): Selenocysteine
  MOD_RES (489)..(489): Selenocysteine
  MOD_RES (494)..(494): Selenocysteine
  MOD_RES (526)..(526): Selenocysteine
  MOD_RES (566)..(566): Selenocysteine
  MOD_RES (574)..(574): Selenocysteine
  MOD_RES (601)..(601): Selenocysteine
  MOD_RES (627)..(627): Selenocysteine
  MOD_RES (633)..(633): Selenocysteine
  MOD_RES (639)..(639): Selenocysteine
  MOD_RES (644)..(644): Selenocysteine
  MOD_RES (661)..(661): Selenocysteine
  MOD_RES (666)..(666): Selenocysteine
  MOD_RES (726)..(726): Selenocysteine
  MOD_RES (779)..(779): Selenocysteine
  MOD_RES (798)..(798): Selenocysteine
  MOD_RES (815)..(815): Selenocysteine
  MOD_RES (817)..(817): Selenocysteine
  MOD_RES (824)..(825): Selenocysteine
  MOD_RES (840)..(840): Selenocysteine
  MOD_RES (868)..(868): Selenocysteine
  MOD_RES (888)..(888): Selenocysteine
  MOD_RES (904)..(904): Selenocysteine
MGRSNSRSHSSRSKSRSQSSSRSRSRSHSRKKRYSSRSRSRXYSRSRSRDRMYSRDYRRDYRNNRGMRRPYGYRGRGRGYYQGGGGRYHRGGYRPVWNRRHSRSPRRGRSRSRSPKRRSVSSQRSRSRSRRSYRSSRSPRSSSSRSSSPYSKSPVSKRRGSQEKQXKKAEGEPQEESPLKSKSQEEPKDXFEHDPSESIDEFNKSSAXSGDIWPGLSAYDNSPRSPHSPSPIAXPPSQSSSCSDAPMLSXVHSAKNXPSQHSHSIQHSPERSGSGSVGNGSSRYSPSQNSPIHHIPSRRSPAKXIAPQNAPRDESRGRSSFYPDGGDQEXAKXGKFLKRFXDEESRVFLLDRGNXRDKEASKEKGSEKGRAEGEWEDQEALDYFSDKESGKQKFNDSEGDDXEEXEDYRQFRKSVLADQGKSFAXASHRNXEEEGLKYKSKVSLKGNRESDGFREEKNYKLKEXGYVVERPSXXKDKHKEEDKNSERIXVKKEXQSPEQVKSEKLKDLFDYSPPLHKNLDAREKSXFREESPLRIKMIASDSHRPEVKLKMAPVPLDDSNRPASLXKDRLLASXLVHSVKKEQEFRSIFDHIKLPQASKSXSESFIQHIVSLVHHVKEQYFKSAAMXLNERFXSYQKAXEEHSXRQKSPEIHRRIDISPSXLRKHXRLAGEERVFKEENQKGDKKLRCDSADLRHDIDRRRKERSKERGDSKGSRESSGSRKQEKXPKDYKEYKSYKDDSKHKREQDHSRSSSSSASPSSPSSREEKESKKEREEEFKXHHEMKEYSGFAGVSRPRGXFFRIRGRGRARGVFAGXNXGPNNSNXXFQKRPKEEEWDPEYXPKSKKYFLHDDRDDGVDYWAKRGRGRGXFQRGRGRFNFKKSGSSPKWXHDKYQGDGIVEDEEEXMENNEEKKDRRKEEKE

SEQ ID NO: 4138 - protein, 118 aa, Homo sapiens
  MOD_RES (45)..(45): Selenocysteine
  MOD_RES (71)..(71): Selenocysteine
  MOD_RES (74)..(74): Selenocysteine
  MOD_RES (82)..(82): Selenocysteine
  MOD_RES (98)..(98): Selenocysteine
QHSHSIQHSPERSGSGSVGNGSSRYSPSQNSPIHHIPSRRSPAKXIAPQNAPRDESRGRSSFYPDGGDQEXAKXGKFLKRFXDEESRVFLLDRVPLYXRIWMHEKSLPSERKAHLGSK

SEQ ID NO: 4139 - protein, 126 aa, Homo sapiens
  MOD_RES (1)..(1): Any amino acid
  MOD_RES (34)..(34): Selenocysteine
  MOD_RES (53)..(53): Selenocysteine
  MOD_RES (74)..(74): Selenocysteine
  MOD_RES (94)..(94): Selenocysteine
  MOD_RES (110)..(110): Selenocysteine
XDHSRSSSSSASPSSPSSREEKESKKEREEEFKXHHEMKEYSGFAGVSRPRGXFHDDRDDGVDYWAKRGRGRGXFQRGRGRFNFKKSGSSPKWXHDKYQGDGIVEDEEEXMENNEEKKDRRKEEKE

SEQ ID NO: 4140 - protein, 187 aa, Homo sapiens
  MOD_RES (1)..(1): Any amino acid
  MOD_RES (15)..(15): Selenocysteine
  MOD_RES (46)..(46): Selenocysteine
  MOD_RES (65)..(65): Selenocysteine
  MOD_RES (82)..(82): Selenocysteine
  MOD_RES (84)..(84): Selenocysteine
  MOD_RES (91)..(92): Selenocysteine
  MOD_RES (107)..(107): Selenocysteine
  MOD_RES (135)..(135): Selenocysteine
  MOD_RES (155)..(155): Selenocysteine
  MOD_RES (171)..(171): Selenocysteine
XGSRESSGSRKQEKXPKDYKEYKSYKDDSSREEKESKKEREEEFKXHHEMKEYSGFAGVSRPRGXFFRIRGRGRARGVFAGXNXGPNNSNXXFQKRPKEEEWDPEYXPKSKKYFLHDDRDDGVDYWAKRGRGRGXFQRGRGRFNFKKSGSSPKWXHDKYQGDGIVEDEEEXMENNEEKKDRRKEEKE

SEQ ID NO: 4141 - protein, 257 aa, Homo sapiens
  MOD_RES (5)..(5): Selenocysteine
  MOD_RES (32)..(32): Selenocysteine
  MOD_RES (52)..(53): Selenocysteine
  MOD_RES (59)..(59): Selenocysteine
  MOD_RES (65)..(65): Selenocysteine
  MOD_RES (118)..(119): Selenocysteine
  MOD_RES (125)..(125): Selenocysteine
  MOD_RES (135)..(135): Selenocysteine
  MOD_RES (138)..(138): Selenocysteine
  MOD_RES (148)..(148): Selenocysteine
  MOD_RES (177)..(177): Selenocysteine
  MOD_RES (184)..(184): Selenocysteine
  MOD_RES (216)..(216): Selenocysteine
  MOD_RES (222)..(222): Selenocysteine
  MOD_RES (232)..(232): Selenocysteine
  MOD_RES (244)..(244): Selenocysteine
ALESXKASELDLEKGLEMRKWVLSGILASEEXYLSHLEALLLPMKPLKAAAXXSQPVLXSQQIEXIFFKVPELYEIHKEFYDGLFPRVQQWSHQQRVGDLFQKLNLRARSNKDAKDPXXKNSLEXLLYKPVDRVXRSXLVLHDLLKHXPASHPDHPLLQDALRISQNFLSSINEEIXPRRQSMXVKKGEHRQLLKDSFMVELVEGARKLRHVFLFXDLLLCXKLKKQSGGKXQQYDCKWYIPLXDLSFQMVDELEAV

SEQ ID NO: 4142 - protein, 465 aa, Homo sapiens
  MOD_RES (61)..(61): Selenocysteine
  MOD_RES (130)..(130): Selenocysteine
  MOD_RES (302)..(302): Selenocysteine
  MOD_RES (310)..(310): Selenocysteine
  MOD_RES (329)..(329): Selenocysteine
  MOD_RES (339)..(339): Selenocysteine
  MOD_RES (358)..(359): Selenocysteine
  MOD_RES (385)..(385): Selenocysteine
  MOD_RES (403)..(403): Selenocysteine
  MOD_RES (410)..(410): Selenocysteine
  MOD_RES (454)..(454): Selenocysteine
MVDPVGFAEAWKAQFPDSEPPRMELRSVGDIEQELERCKASIRRLEQEVNQERFRMIYLQXLLAKEKKSYDRQRWGFRRAAQAPDGASEPRASASRPQPAPADGADPPPAEEPEARPDGEGSPGKARPGXARRPGAAASGERDDRGPPASVAALRSNFERIRKGHGQPGADAEKPFYVNVEFHHERGLVKVNDKEVSDRISSLGSQAMQMERKKSQHGAGSSVGDASRPPYRGRSSESSCGVDGDYEDAELNPRFLKDNLIDANGGSRPPWPPLEYQPYQSIYVGGMMEGEGKGPLLRSQSXSEQEKRLXWPRRSYSPRSFEDCGGGYXPDCSSNENLXSSEEDFSSGQSSRVSPSPXXYRMFRDKSRSPSQNSQQSFDSSSPPXPQCHKRHRHCPVVVSEAXIVGVRKXGQIWPNDGEGAFHGEHPGAAEEVFQKLLPDIRGAADADQLVCEXPDCPQHSADHQ

SEQ ID NO: 4143 - protein, 1227 aa, Homo sapiens
  MOD_RES (61)..(61): Selenocysteine
  MOD_RES (130)..(130): Selenocysteine
  MOD_RES (302)..(302): Selenocysteine
  MOD_RES (310)..(310): Selenocysteine
  MOD_RES (329)..(329): Selenocysteine
  MOD_RES (339)..(339): Selenocysteine
  MOD_RES (358)..(359): Selenocysteine
  MOD_RES (385)..(385): Selenocysteine
  MOD_RES (403)..(403): Selenocysteine
  MOD_RES (410)..(410): Selenocysteine
  MOD_RES (432)..(432): Selenocysteine
  MOD_RES (485)..(485): Selenocysteine
  MOD_RES (512)..(512): Selenocysteine
  MOD_RES (532)..(533): Selenocysteine
  MOD_RES (539)..(539): Selenocysteine
  MOD_RES (545)..(545): Selenocysteine
  MOD_RES (634)..(635): Selenocysteine
  MOD_RES (641)..(641): Selenocysteine
  MOD_RES (651)..(651): Selenocysteine
  MOD_RES (654)..(654): Selenocysteine
  MOD_RES (664)..(664): Selenocysteine
  MOD_RES (693)..(693): Selenocysteine
  MOD_RES (700)..(700): Selenocysteine
  MOD_RES (732)..(732): Selenocysteine
  MOD_RES (738)..(738): Selenocysteine
  MOD_RES (748)..(748): Selenocysteine
  MOD_RES (760)..(760): Selenocysteine
  MOD_RES (811)..(811): Selenocysteine
  MOD_RES (845)..(845): Selenocysteine
  MOD_RES (875)..(875): Selenocysteine
  MOD_RES (883)..(883): Selenocysteine
  MOD_RES (891)..(891): Selenocysteine
  MOD_RES (898)..(898): Selenocysteine
  MOD_RES (921)..(921): Selenocysteine
  MOD_RES (932)..(932): Selenocysteine
  MOD_RES (947)..(947): Selenocysteine
  MOD_RES (953)..(953): Selenocysteine
  MOD_RES (974)..(974): Selenocysteine
  MOD_RES (1005)..(1005): Selenocysteine
  MOD_RES (1016)..(1016): Selenocysteine
  MOD_RES (1052)..(1052): Selenocysteine
  MOD_RES (1083)..(1083): Selenocysteine
  MOD_RES (1097)..(1097): Selenocysteine
  MOD_RES (1134)..(1134): Selenocysteine
  MOD_RES (1161)..(1161): Selenocysteine
  MOD_RES (1166)..(1166): Selenocysteine
  MOD_RES (1186)..(1186): Selenocysteine
  MOD_RES (1188)..(1188): Selenocysteine
  MOD_RES (1225)..(1225): Selenocysteine
MVDPVGFAEAWKAQFPDSEPPRMELRSVGDIEQELERCKASIRRLEQEVNQERFRMIYLQXLLAKEKKSYDRQRWGFRRAAQAPDGASEPRASASRPQPAPADGADPPPAEEPEARPDGEGSPGKARPGXARRPGAAASGERDDRGPPASVAALRSNFERIRKGHGQPGADAEKPFYVNVEFHHERGLVKVNDKEVSDRISSLGSQAMQMERKKSQHGAGSSVGDASRPPYRGRSSESSCGVDGDYEDAELNPRFLKDNLIDANGGSRPPWPPLEYQPYQSIYVGGMMEGEGKGPLLRSQSXSEQEKRLXWPRRSYSPRSFEDCGGGYXPDCSSNENLXSSEEDFSSGQSSRVSPSPXXYRMFRDKSRSPSQNSQQSFDSSSPPXPQCHKRHRHCPVVVSEAXIVGVRKXGQIWPNDGEGAFHGDADGSFGXPPGYGCAADRAEEQRRHQDGLPYIDDSPSSSPHLSSKGRGSRDALVSGALESXKASELDLEKGLEMRKWVLSGILASEEXYLSHLEALLLPMKPLKAAAXXSQPVLXSQQIEXIFFKVPELYEIHKEFYDGLFPRVQQWSHQQRVGDLFQKLASQLGVYRAFVDNYGVAMEMAEKCCQANAQFAEISENLRARSNKDAKDPXXKNSLEXLLYKPVDRVXRSXLVLHDLLKHXPASHPDHPLLQDALRISQNFLSSINEEIXPRRQSMXVKKGEHRQLLKDSFMVELVEGARKLRHVFLFXDLLLCXKLKKQSGGKXQQYDCKWYIPLXDLSFQMVDELEAVPNIPLVPDEELDALKIKISQIKNDIQREKRANKGSKAXERLKKKLSEQESLLLLMSPSMAFRVHSRNGKSYXFLISSDYERAEWRENIREQQKKCFRSFSLXSVELQMLXNSCVKLQXVHSIPLXINKEDDESPGLYGFLNVIVHSAXGFKQSSNLYCXLEVDSFGYFVNKAKXRVYRDXAEPNWNELDPQALQDRDWQRXVIAMNGIEVKLSVKFNSREFSLKRMPSRKQXGVFGVKIAVVXKRERSKVPYIVRQCVEEIERRGMEEVGIYRVSGVAXDIQALKAAFDVNNKDVSVMMSEMDVNAIAGXLKLYFRELPEPLFXDEFYPNFAEGIALSDPVAKESCMLNLLLSLPEANLLXFLFLLDHLKRVAEKEAVNKMSLHNLAXVFGPXLLRPSEKESKLPANPSQPIXMXDSWSLEVMSQVQVLLYFLQLEAIPAPDSKRQSILFSXEV

SEQ ID NO: 4144 - protein, 1271 aa, Homo sapiens
  MOD_RES (61)..(61): Selenocysteine
  MOD_RES (130)..(130): Selenocysteine
  MOD_RES (302)..(302): Selenocysteine
  MOD_RES (310)..(310): Selenocysteine
  MOD_RES (329)..(329): Selenocysteine
  MOD_RES (339)..(339): Selenocysteine
  MOD_RES (358)..(359): Selenocysteine
  MOD_RES (385)..(385): Selenocysteine
  MOD_RES (403)..(403): Selenocysteine
  MOD_RES (410)..(410): Selenocysteine
  MOD_RES (432)..(432): Selenocysteine
  MOD_RES (485)..(485): Selenocysteine
  MOD_RES (512)..(512): Selenocysteine
  MOD_RES (532)..(533): Selenocysteine
  MOD_RES (539)..(539): Selenocysteine
  MOD_RES (545)..(545): Selenocysteine
  MOD_RES (634)..(635): Selenocysteine
  MOD_RES (641)..(641): Selenocysteine
  MOD_RES (651)..(651): Selenocysteine
  MOD_RES (654)..(654): Selenocysteine
  MOD_RES (664)..(664): Selenocysteine
  MOD_RES (693)..(693): Selenocysteine
  MOD_RES (700)..(700): Selenocysteine
  MOD_RES (732)..(732): Selenocysteine
  MOD_RES (738)..(738): Selenocysteine
  MOD_RES (748)..(748): Selenocysteine
  MOD_RES (760)..(760): Selenocysteine
  MOD_RES (811)..(811): Selenocysteine
  MOD_RES (845)..(845): Selenocysteine
  MOD_RES (875)..(875): Selenocysteine
  MOD_RES (883)..(883): Selenocysteine
  MOD_RES (891)..(891): Selenocysteine
  MOD_RES (898)..(898): Selenocysteine
  MOD_RES (921)..(921): Selenocysteine
  MOD_RES (932)..(932): Selenocysteine
  MOD_RES (947)..(947): Selenocysteine
  MOD_RES (953)..(953): Selenocysteine
  MOD_RES (971)..(971): Selenocysteine
  MOD_RES (984)..(984): Selenocysteine
  MOD_RES (994)..(994): Selenocysteine
  MOD_RES (1018)..(1018): Selenocysteine
  MOD_RES (1049)..(1049): Selenocysteine
  MOD_RES (1060)..(1060): Selenocysteine
  MOD_RES (1096)..(1096): Selenocysteine
  MOD_RES (1127)..(1127): Selenocysteine
  MOD_RES (1141)..(1141): Selenocysteine
  MOD_RES (1178)..(1178): Selenocysteine
  MOD_RES (1205)..(1205): Selenocysteine
  MOD_RES (1210)..(1210): Selenocysteine
  MOD_RES (1230)..(1230): Selenocysteine
  MOD_RES (1232)..(1232): Selenocysteine
  MOD_RES (1269)..(1269): Selenocysteine
MVDPVGFAEAWKAQFPDSEPPRMELRSVGDIEQELERCKASIRRLEQEVNQERFRMIYLQXLLAKEKKSYDRQRWGFRRAAQAPDGASEPRASASRPQPAPADGADPPPAEEPEARPDGEGSPGKARPGXARRPGAAASGERDDRGPPASVAALRSNFERIRKGHGQPGADAEKPFYVNVEFHHERGLVKVNDKEVSDRISSLGSQAMQMERKKSQHGAGSSVGDASRPPYRGRSSESSCGVDGDYEDAELNPRFLKDNLIDANGGSRPPWPPLEYQPYQSIYVGGMMEGEGKGPLLRSQSXSEQEKRLXWPRRSYSPRSFEDCGGGYXPDCSSNENLXSSEEDFSSGQSSRVSPSPXXYRMFRDKSRSPSQNSQQSFDSSSPPXPQCHKRHRHCPVVVSEAXIVGVRKXGQIWPNDGEGAFHGDADGSFGXPPGYGCAADRAEEQRRHQDGLPYIDDSPSSSPHLSSKGRGSRDALVSGALESXKASELDLEKGLEMRKWVLSGILASEEXYLSHLEALLLPMKPLKAAAXXSQPVLXSQQIEXIFFKVPELYEIHKEFYDGLFPRVQQWSHQQRVGDLFQKLASQLGVYRAFVDNYGVAMEMAEKCCQANAQFAEISENLRARSNKDAKDPXXKNSLEXLLYKPVDRVXRSXLVLHDLLKHXPASHPDHPLLQDALRISQNFLSSINEEIXPRRQSMXVKKGEHRQLLKDSFMVELVEGARKLRHVFLFXDLLLCXKLKKQSGGKXQQYDCKWYIPLXDLSFQMVDELEAVPNIPLVPDEELDALKIKISQIKNDIQREKRANKGSKAXERLKKKLSEQESLLLLMSPSMAFRVHSRNGKSYXFLISSDYERAEWRENIREQQKKCFRSFSLXSVELQMLXNSCVKLQXVHSIPLXINKEDDESPGLYGFLNVIVHSAXGFKQSSNLYCXLEVDSFGYFVNKAKXRVYRDXAEPNWNEEFEIELEGSQXLRILCYEKCYNKXKIPKEDGESXDRLMGKGQVQLDPQALQDRDWQRXVIAMNGIEVKLSVKFNSREFSLKRMPSRKQXGVFGVKIAVVXKRERSKVPYIVRQCVEEIERRGMEEVGIYRVSGVAXDIQALKAAFDVNNKDVSVMMSEMDVNAIAGXLKLYFRELPEPLFXDEFYPNFAEGIALSDPVAKESCMLNLLLSLPEANLLXFLFLLDHLKRVAEKEAVNKMSLHNLAXVFGPXLLRPSEKESKLPANPSQPIXMXDSWSLEVMSQVQVLLYFLQLEAIPAPDSKRQSILFSXEV

SEQ ID NO: 4145 - protein, 353 aa, Homo sapiens
  MOD_RES (24)..(24): Selenocysteine
  MOD_RES (42)..(42): Selenocysteine
  MOD_RES (157)..(157): Selenocysteine
  MOD_RES (172)..(172): Selenocysteine
  MOD_RES (187)..(187): Selenocysteine
  MOD_RES (231)..(231): Selenocysteine
  MOD_RES (238)..(238): Selenocysteine
  MOD_RES (248)..(249): Selenocysteine
  MOD_RES (254)..(254): Selenocysteine
  MOD_RES (303)..(303): Selenocysteine
  MOD_RES (321)..(321): Selenocysteine
  MOD_RES (331)..(331): Selenocysteine
MASSWPPLELQSSNQSQLFPQNAXACDNAPEAWDLLHRVLPXFIISICFFGLLGNLFVLLVFLLPRRQLNVAEIYLANLAASDLVFVLGLPFWAENIWNQFNWPFGALLCRVINGVIKANLFISIFLVVAISQDRYRVLVHPMASRRQQRRRQARVXCVLIWVVGGLLSIPXFLLRSIQAVPDLNIXACILLLPHEAWHFARIVELNILGFLLPLAAIVFFNYHILASLRXREEVSRXRCGGRKDSKXXALILXLVVAFLVCWAPYHFFAFLEFLFQVQAVRGCFWEDFIDLGLQLANFFAFXNSSLNPVIYVFVGRLFRXKVWELYKQCXPKSLAPISSSHRKEIFQLFWRN

SEQ ID NO: 4146 - protein, 284 aa, Homo sapiens
  MOD_RES (24)..(24): Selenocysteine
  MOD_RES (42)..(42): Selenocysteine
  MOD_RES (157)..(157): Selenocysteine
  MOD_RES (172)..(172): Selenocysteine
  MOD_RES (187)..(187): Selenocysteine
  MOD_RES (231)..(231): Selenocysteine
  MOD_RES (238)..(238): Selenocysteine
  MOD_RES (255)..(255): Selenocysteine
  MOD_RES (277)..(277): Selenocysteine
MASSWPPLELQSSNQSQLFPQNAXACDNAPEAWDLLHRVLPXFIISICFFGLLGNLFVLLVFLLPRRQLNVAEIYLANLAASDLVFVLGLPFWAENIWNQFNWPFGALLCRVINGVIKANLFISIFLVVAISQDRYRVLVHPMASRRQQRRRQARVXCVLIWVVGGLLSIPXFLLRSIQAVPDLNIXACILLLPHEAWHFARIVELNILGFLLPLAAIVFFNYHILASLRXREEVSRXSSLNPVIYVFVGRLFRXKPALSRWLIKILSRSCKNQSHXREERAGR

SEQ ID NO: 4147 - protein, 391 aa, Homo sapiens
  MOD_RES (20)..(21): Selenocysteine
  MOD_RES (32)..(32): Selenocysteine
  MOD_RES (37)..(37): Selenocysteine
  MOD_RES (41)..(41): Selenocysteine
  MOD_RES (58)..(58): Selenocysteine
  MOD_RES (72)..(72): Selenocysteine
  MOD_RES (90)..(90): Selenocysteine
  MOD_RES (116)..(116): Selenocysteine
  MOD_RES (128)..(128): Selenocysteine
  MOD_RES (162)..(162): Selenocysteine
  MOD_RES (185)..(185): Selenocysteine
  MOD_RES (197)..(197): Selenocysteine
  MOD_RES (209)..(209): Selenocysteine
  MOD_RES (224)..(224): Selenocysteine
  MOD_RES (241)..(241): Selenocysteine
  MOD_RES (244)..(244): Selenocysteine
  MOD_RES (264)..(264): Selenocysteine
  MOD_RES (269)..(269): Selenocysteine
  MOD_RES (290)..(290): Selenocysteine
  MOD_RES (294)..(294): Selenocysteine
  MOD_RES (314)..(314): Selenocysteine
  MOD_RES (369)..(369): Selenocysteine
  MOD_RES (372)..(372): Selenocysteine
MFSPWKISMFLSVREDSVPXXASFSADMLNVXLQGPXLNGXFAQSKCPQVEWLGWLNXIQPPFLWVLFVLAXLENIFVLSVFCLHKSSCXVAEIYLGNLAAADLILACGLPFWAIXISNNFDWLFGEXLCRVVNAIISMNLYSSICFLMLVSIDRYLALVKXMSMGRMRGVRWAKLYSLVIWGCXLLLSSPMLVFRXMKEYSDEGHNVXACVISYPSLIWEVFXNMLLNVVGFLLPLSVIXFCXMQIMQVLRNNEMQKFKEIQXERRAXVLVLVVLLLFIICWLPFQISXFLDXLHRLGILSSCQDERIIDVIXQIASFMAYSNSCLNPLVYVIVGKRFRKKSWEVYQGVCQKGGCRSEPIQMENSMGXLRXSISVERQIHKLQDWAGSRQ

SEQ ID NO: 4148 - protein, 364 aa, Homo sapiens
  MOD_RES (5)..(5): Selenocysteine
  MOD_RES (10)..(10): Selenocysteine
  MOD_RES (14)..(14): Selenocysteine
  MOD_RES (31)..(31): Selenocysteine
  MOD_RES (45)..(45): Selenocysteine
  MOD_RES (63)..(63): Selenocysteine
  MOD_RES (89)..(89): Selenocysteine
  MOD_RES (101)..(101): Selenocysteine
  MOD_RES (135)..(135): Selenocysteine
  MOD_RES (158)..(158): Selenocysteine
  MOD_RES (170)..(170): Selenocysteine
  MOD_RES (182)..(182): Selenocysteine
  MOD_RES (197)..(197): Selenocysteine
  MOD_RES (214)..(214): Selenocysteine
  MOD_RES (217)..(217): Selenocysteine
  MOD_RES (237)..(237): Selenocysteine
  MOD_RES (242)..(242): Selenocysteine
  MOD_RES (263)..(263): Selenocysteine
  MOD_RES (267)..(267): Selenocysteine
  MOD_RES (287)..(287): Selenocysteine
  MOD_RES (342)..(342): Selenocysteine
  MOD_RES (345)..(345): Selenocysteine
MLNVXLQGPXLNGXFAQSKCPQVEWLGWLNXIQPPFLWVLFVLAXLENIFVLSVFCLHKSSCXVAEIYLGNLAAADLILACGLPFWAIXISNNFDWLFGEXLCRVVNAIISMNLYSSICFLMLVSIDRYLALVKXMSMGRMRGVRWAKLYSLVIWGCXLLLSSPMLVFRXMKEYSDEGHNVXACVISYPSLIWEVFXNMLLNVVGFLLPLSVIXFCXMQIMQVLRNNEMQKFKEIQXERRAXVLVLVVLLLFIICWLPFQISXFLDXLHRLGILSSCQDERIIDVIXQIASFMAYSNSCLNPLVYVIVGKRFRKKSWEVYQGVCQKGGCRSEPIQMENSMGXLRXSISVERQIHKLQDWAGSRQ

SEQ ID NO: 4149 - protein, 329 aa, Homo sapiens
  MOD_RES (5)..(5): Selenocysteine
  MOD_RES (12)..(12): Selenocysteine
  MOD_RES (18)..(19): Selenocysteine
  MOD_RES (33)..(33): Selenocysteine
  MOD_RES (84)..(84): Selenocysteine
  MOD_RES (89)..(89): Selenocysteine
  MOD_RES (121)..(121): Selenocysteine
  MOD_RES (124)..(124): Selenocysteine
  MOD_RES (139)..(139): Selenocysteine
  MOD_RES (144)..(144): Selenocysteine
  MOD_RES (173)..(173): Selenocysteine
  MOD_RES (231)..(231): Selenocysteine
  MOD_RES (237)..(237): Selenocysteine
  MOD_RES (245)..(245): Selenocysteine
  MOD_RES (247)..(247): Selenocysteine
  MOD_RES (266)..(266): Selenocysteine
  MOD_RES (274)..(274): Selenocysteine
  MOD_RES (292)..(293): Selenocysteine
  MOD_RES (301)..(301): Selenocysteine
  MOD_RES (317)..(317): Selenocysteine
  MOD_RES (322)..(322): Selenocysteine
  MOD_RES (324)..(324): Selenocysteine
MCGAXSFLHECXRLILVXXQNAEFLQKGLQVHXCFGVYPHASVWHDCASQKKGCAVYLHVSVEFNKLIPENGFIKFHQVRRVMXILFLXMVISYFGCMKAAPMKEANIRGQGGLAYPGVRXHGXLESVNGPKAGSRGLXSLADXFEHVIEELLDEDQKVRPNEENNKDADLYXSRVMLSSQVPLEPPLLFLLEEYKNYLDAANMSMRVRRHSDPARRGELSVCDSISEWVXAADKKXAVDMSGGXVXVLEKVPVSKGQLKQYFYEXKCNPMGYXKEGCRGIDKRHWNSQCRXXQSYVRALXMDSKKRIGWRFIRIDXSCVCXLXIKRGR

SEQ ID NO: 4150 - protein, 77 aa, Homo sapiens
  MOD_RES (5)..(5): Selenocysteine
  MOD_RES (12)..(12): Selenocysteine
  MOD_RES (18)..(19): Selenocysteine
  MOD_RES (33)..(33): Selenocysteine
MCGAXSFLHECXRLILVXXQNAEFLQKGLQVHXCFGVYPHASVWHDCASQKKGCAVYLHVSVEFNKLIPENGFIKGW

SEQ ID NO: 4151 - protein, 255 aa, Homo sapiens
  MOD_RES (10)..(10): Selenocysteine
  MOD_RES (15)..(15): Selenocysteine
  MOD_RES (47)..(47): Selenocysteine
  MOD_RES (50)..(50): Selenocysteine
  MOD_RES (65)..(65): Selenocysteine
  MOD_RES (70)..(70): Selenocysteine
  MOD_RES (99)..(99): Selenocysteine
  MOD_RES (157)..(157): Selenocysteine
  MOD_RES (163)..(163): Selenocysteine
  MOD_RES (171)..(171): Selenocysteine
  MOD_RES (173)..(173): Selenocysteine
  MOD_RES (192)..(192): Selenocysteine
  MOD_RES (200)..(200): Selenocysteine
  MOD_RES (218)..(219): Selenocysteine
  MOD_RES (227)..(227): Selenocysteine
  MOD_RES (243)..(243): Selenocysteine
  MOD_RES (248)..(248): Selenocysteine
  MOD_RES (250)..(250): Selenocysteine
MFHQVRRVMXILFLXMVISYFGCMKAAPMKEANIRGQGGLAYPGVRXHGXLESVNGPKAGSRGLXSLADXFEHVIEELLDEDQKVRPNEENNKDADLYXSRVMLSSQVPLEPPLLFLLEEYKNYLDAANMSMRVRRHSDPARRGELSVCDSISEWVXAADKKXAVDMSGGXVXVLEKVPVSKGQLKQYFYEXKCNPMGYXKEGCRGIDKRHWNSQCRXXQSYVRALXMDSKKRIGWRFIRIDXSCVCXLXIKRGR

SEQ ID NO: 4152 - protein, 262 aa, Homo sapiens
  MOD_RES (17)..(17): Selenocysteine
  MOD_RES (22)..(22): Selenocysteine
  MOD_RES (54)..(54): Selenocysteine
  MOD_RES (57)..(57): Selenocysteine
  MOD_RES (72)..(72): Selenocysteine
  MOD_RES (77)..(77): Selenocysteine
  MOD_RES (106)..(106): Selenocysteine
  MOD_RES (164)..(164): Selenocysteine
  MOD_RES (170)..(170): Selenocysteine
  MOD_RES (178)..(178): Selenocysteine
  MOD_RES (180)..(180): Selenocysteine
  MOD_RES (199)..(199): Selenocysteine
  MOD_RES (207)..(207): Selenocysteine
  MOD_RES (225)..(226): Selenocysteine
  MOD_RES (234)..(234): Selenocysteine
  MOD_RES (250)..(250): Selenocysteine
  MOD_RES (255)..(255): Selenocysteine
  MOD_RES (257)..(257): Selenocysteine
MQSREEEWFHQVRRVMXILFLXMVISYFGCMKAAPMKEANIRGQGGLAYPGVRXHGXLESVNGPKAGSRGLXSLADXFEHVIEELLDEDQKVRPNEENNKDADLYXSRVMLSSQVPLEPPLLFLLEEYKNYLDAANMSMRVRRHSDPARRGELSVCDSISEWVXAADKKXAVDMSGGXVXVLEKVPVSKGQLKQYFYEXKCNPMGYXKEGCRGIDKRHWNSQCRXXQSYVRALXMDSKKRIGWRFIRIDXSCVCXLXIKRGR

SEQ ID NO: 4153 - protein, 247 aa, Homo sapiens
  MOD_RES (2)..(2): Selenocysteine
  MOD_RES (7)..(7): Selenocysteine
  MOD_RES (39)..(39): Selenocysteine
  MOD_RES (42)..(42): Selenocysteine
  MOD_RES (57)..(57): Selenocysteine
  MOD_RES (62)..(62): Selenocysteine
  MOD_RES (91)..(91): Selenocysteine
  MOD_RES (149)..(149): Selenocysteine
  MOD_RES (155)..(155): Selenocysteine
  MOD_RES (163)..(163): Selenocysteine
  MOD_RES (165)..(165): Selenocysteine
  MOD_RES (184)..(184): Selenocysteine
  MOD_RES (192)..(192): Selenocysteine
  MOD_RES (210)..(211): Selenocysteine
  MOD_RES (219)..(219): Selenocysteine
  MOD_RES (235)..(235): Selenocysteine
  MOD_RES (240)..(240): Selenocysteine
  MOD_RES (242)..(242): Selenocysteine
MXILFLXMVISYFGCMKAAPMKEANIRGQGGLAYPGVRXHGXLESVNGPKAGSRGLXSLADXFEHVIEELLDEDQKVRPNEENNKDADLYXSRVMLSSQVPLEPPLLFLLEEYKNYLDAANMSMRVRRHSDPARRGELSVCDSISEWVXAADKKXAVDMSGGXVXVLEKVPVSKGQLKQYFYEXKCNPMGYXKEGCRGIDKRHWNSQCRXXQSYVRALXMDSKKRIGWRFIRIDXSCVCXLXIKRGR

SEQ ID NO: 4154 - protein, 846 aa, Homo sapiens
  MOD_RES (23)..(23): Selenocysteine
  MOD_RES (41)..(41): Selenocysteine
  MOD_RES (51)..(51): Selenocysteine
  MOD_RES (55)..(55): Selenocysteine
  MOD_RES (72)..(72): Selenocysteine
  MOD_RES (75)..(75): Selenocysteine
  MOD_RES (90)..(90): Selenocysteine
  MOD_RES (101)..(101): Selenocysteine
  MOD_RES (120)..(120): Selenocysteine
  MOD_RES (129)..(129): Selenocysteine
  MOD_RES (131)..(131): Selenocysteine
  MOD_RES (133)..(133): Selenocysteine
  MOD_RES (185)..(185): Selenocysteine
  MOD_RES (200)..(200): Selenocysteine
  MOD_RES (209)..(209): Selenocysteine
  MOD_RES (214)..(214): Selenocysteine
  MOD_RES (218)..(218): Selenocysteine
  MOD_RES (226)..(226): Selenocysteine
  MOD_RES (238)..(238): Selenocysteine
  MOD_RES (264)..(264): Selenocysteine
  MOD_RES (270)..(270): Selenocysteine
  MOD_RES (288)..(290): Selenocysteine
  MOD_RES (308)..(308): Selenocysteine
  MOD_RES (320)..(320): Selenocysteine
  MOD_RES (347)..(347): Selenocysteine
  MOD_RES (397)..(397): Selenocysteine
  MOD_RES (428)..(428): Selenocysteine
  MOD_RES (437)..(437): Selenocysteine
  MOD_RES (444)..(444): Selenocysteine
  MOD_RES (485)..(485): Selenocysteine
  MOD_RES (521)..(521): Selenocysteine
  MOD_RES (533)..(533): Selenocysteine
  MOD_RES (540)..(540): Selenocysteine
  MOD_RES (553)..(553): Selenocysteine
  MOD_RES (557)..(557): Selenocysteine
  MOD_RES (564)..(564): Selenocysteine
  MOD_RES (605)..(605): Selenocysteine
  MOD_RES (637)..(637): Selenocysteine
  MOD_RES (648)..(648): Selenocysteine
  MOD_RES (662)..(662): Selenocysteine
  MOD_RES (670)..(671): Selenocysteine
  MOD_RES (680)..(680): Selenocysteine
  MOD_RES (748)..(748): Selenocysteine
  MOD_RES (809)..(809): Selenocysteine
  MOD_RES (822)..(822): Selenocysteine
MFRRARLSVKPNVRPGVGARGSXASNPQRGRESPRPPDPAXDSASKPAEPXDVPXVDFGGAEPQEKAPRSSXEKXGGDNDVEESSRSSSXVSQRRKRISSXSSLVKSSVSVPSESHPLSXINQEAPQPXAXSXKEKQPCSDRYRIYKAQKLREMLKEELRKEKKQWKNKYAINESQRPPDRSKMXMRDFIYYLPDNNPMXSSLEQEKKXEKPSXPVQXREQEGKSXPNAEDNEMEEEXDDGPLLVPRVKVAEDGSIILDEESLXVEVLRXKGPCVVEENDPIFERGSXXXYSSFRKNYYSKPWSNKEXDMFFLAISMVGXDFSMIGQLFPHRARIEIKNKFKREEKXNGWRIDKAFQEKRPFDFDFFAHLLQKVLAEEEKRKQKSVKNHSLKEKKSXKPRKNVKVKKVACEGVNNDPDESMSSRISDXERSQKDAQXVEEESLXLSREDAEQVALEVDLNQKKRRRKKQDGANELGVNNLLENAXVQAGPSKGEKHKNKCQAIRPELKEGECSKEQMLSCXQNIDGIVGFASXEKVEKRXDPILSLSNQQDAXSVAXESSESSXSDLPSFEVGIRALCEVNNAEGSCIEERNVDLKNNSLEIDQXENVKPMLRGRFQRPKPNLSRAGKKSVLSQGKXESESKNSHSKXSVEKNHVEKDKMNXLDILRMEXXERENPEAEXVSVLGEKNCLQEGSQLKALRPVQVRGRLQKPKPNAGKAAERKEILISQEEIGANVEKNENESCADRDXPQHMEDQSRKDFEEEDVILQPEKNDSFQNVQPDEPKVLNECLSVQENNKANKLNQVPILRXRFQKPKPNIGRGXGRREISSKEEVLEKILSLGKWRQH

SEQ ID NO: 4155 - protein, 2624 aa, Homo sapiens
  MOD_RES (23)..(23): Selenocysteine
  MOD_RES (41)..(41): Selenocysteine
  MOD_RES (51)..(51): Selenocysteine
  MOD_RES (55)..(55): Selenocysteine
  MOD_RES (72)..(72): Selenocysteine
  MOD_RES (75)..(75): Selenocysteine
  MOD_RES (90)..(90): Selenocysteine
  MOD_RES (101)..(101): Selenocysteine
  MOD_RES (120)..(120): Selenocysteine
  MOD_RES (129)..(129): Selenocysteine
  MOD_RES (131)..(131): Selenocysteine
  MOD_RES (133)..(133): Selenocysteine
  MOD_RES (185)..(185): Selenocysteine
  MOD_RES (200)..(200): Selenocysteine
  MOD_RES (209)..(209): Selenocysteine
  MOD_RES (214)..(214): Selenocysteine
  MOD_RES (218)..(218): Selenocysteine
  MOD_RES (226)..(226): Selenocysteine
  MOD_RES (238)..(238): Selenocysteine
  MOD_RES (264)..(264): Selenocysteine
  MOD_RES (270)..(270): Selenocysteine
  MOD_RES (288)..(290): Selenocysteine
  MOD_RES (308)..(308): Selenocysteine
  MOD_RES (320)..(320): Selenocysteine
  MOD_RES (347)..(347): Selenocysteine
  MOD_RES (397)..(397): Selenocysteine
  MOD_RES (428)..(428): Selenocysteine
  MOD_RES (437)..(437): Selenocysteine
  MOD_RES (444)..(444): Selenocysteine
  MOD_RES (485)..(485): Selenocysteine
  MOD_RES (521)..(521): Selenocysteine
  MOD_RES (533)..(533): Selenocysteine
  MOD_RES (540)..(540): Selenocysteine
  MOD_RES (553)..(553): Selenocysteine
  MOD_RES (557)..(557): Selenocysteine
  MOD_RES (564)..(564): Selenocysteine
  MOD_RES (605)..(605): Selenocysteine
  MOD_RES (637)..(637): Selenocysteine
  MOD_RES (648)..(648): Selenocysteine
  MOD_RES (662)..(662): Selenocysteine
  MOD_RES (670)..(671): Selenocysteine
  MOD_RES (680)..(680): Selenocysteine
  MOD_RES (748)..(748): Selenocysteine
  MOD_RES (809)..(809): Selenocysteine
  MOD_RES (822)..(822): Selenocysteine
  MOD_RES (850)..(850): Selenocysteine
  MOD_RES (855)..(855): Selenocysteine
  MOD_RES (867)..(867): Selenocysteine
  MOD_RES (877)..(877): Selenocysteine
  MOD_RES (895)..(895): Selenocysteine
  MOD_RES (900)..(900): Selenocysteine
  MOD_RES (915)..(915): Selenocysteine
  MOD_RES (922)..(922): Selenocysteine
  MOD_RES (955)..(955): Selenocysteine
  MOD_RES (960)..(960): Selenocysteine
  MOD_RES (970)..(970): Selenocysteine
  MOD_RES (974)..(974): Selenocysteine
  MOD_RES (977)..(977): Selenocysteine
  MOD_RES (987)..(987): Selenocysteine
  MOD_RES (1010)..(1010): Selenocysteine
  MOD_RES (1015)..(1015): Selenocysteine
  MOD_RES (1025)..(1025): Selenocysteine
  MOD_RES (1032)..(1032): Selenocysteine
  MOD_RES (1040)..(1040): Selenocysteine
  MOD_RES (1062)..(1062): Selenocysteine
  MOD_RES (1067)..(1067): Selenocysteine
  MOD_RES (1077)..(1077): Selenocysteine
  MOD_RES (1094)..(1094): Selenocysteine
  MOD_RES (1116)..(1116): Selenocysteine
  MOD_RES (1121)..(1121): Selenocysteine
  MOD_RES (1131)..(1131): Selenocysteine
  MOD_RES (1138)..(1138): Selenocysteine
  MOD_RES (1148)..(1148): Selenocysteine
  MOD_RES (1171)..(1171): Selenocysteine
  MOD_RES (1175)..(1176): Selenocysteine
  MOD_RES (1186)..(1186): Selenocysteine
  MOD_RES (1198)..(1198): Selenocysteine
  MOD_RES (1203)..(1203): Selenocysteine
  MOD_RES (1225)..(1225): Selenocysteine
  MOD_RES (1257)..(1257): Selenocysteine
  MOD_RES (1285)..(1285): Selenocysteine
  MOD_RES (1301)..(1301): Selenocysteine
  MOD_RES (1311)..(1311): Selenocysteine
  MOD_RES (1314)..(1314): Selenocysteine
  MOD_RES (1326)..(1326): Selenocysteine
  MOD_RES (1328)..(1328): Selenocysteine
  MOD_RES (1332)..(1332): Selenocysteine
  MOD_RES (1334)..(1334): Selenocysteine
  MOD_RES (1365)..(1365): Selenocysteine
  MOD_RES (1390)..(1390): Selenocysteine
  MOD_RES (1396)..(1396): Selenocysteine
  MOD_RES (1454)..(1455): Selenocysteine
  MOD_RES (1468)..(1468): Selenocysteine
  MOD_RES (1473)..(1473): Selenocysteine
  MOD_RES (1483)..(1483): Selenocysteine
  MOD_RES (1485)..(1485): Selenocysteine
  MOD_RES (1503)..(1503): Selenocysteine
  MOD_RES (1517)..(1517): Selenocysteine
  MOD_RES (1519)..(1519): Selenocysteine
  MOD_RES (1551)..(1551): Selenocysteine
  MOD_RES (1556)..(1556): Selenocysteine
  MOD_RES (1568)..(1568): Selenocysteine
  MOD_RES (1586)..(1586): Selenocysteine
  MOD_RES (1606)..(1606): Selenocysteine
  MOD_RES (1613)..(1613): Selenocysteine
  MOD_RES (1619)..(1619): Selenocysteine
  MOD_RES (1627)..(1627): Selenocysteine
  MOD_RES (1659)..(1659): Selenocysteine
  MOD_RES (1662)..(1662): Selenocysteine
  MOD_RES (1678)..(1678): Selenocysteine
  MOD_RES (1705)..(1706): Selenocysteine
  MOD_RES (1726)..(1726): Selenocysteine
  MOD_RES (1738)..(1738): Selenocysteine
  MOD_RES (1776)..(1776): Selenocysteine
  MOD_RES (1795)..(1795): Selenocysteine
  MOD_RES (1804)..(1804): Selenocysteine
  MOD_RES (1815)..(1816): Selenocysteine
  MOD_RES (1820)..(1820): Selenocysteine
  MOD_RES (1841)..(1841): Selenocysteine
  MOD_RES (1853)..(1853): Selenocysteine
  MOD_RES (1867)..(1867): Selenocysteine
  MOD_RES (1921)..(1921): Selenocysteine
  MOD_RES (1928)..(1928): Selenocysteine
  MOD_RES (1947)..(1947): Selenocysteine
  MOD_RES (1950)..(1951): Selenocysteine
  MOD_RES (1967)..(1968): Selenocysteine
  MOD_RES (1978)..(1978): Selenocysteine
  MOD_RES (1983)..(1983): Selenocysteine
  MOD_RES (1988)..(1988): Selenocysteine
  MOD_RES (1991)..(1991): Selenocysteine
  MOD_RES (2048)..(2049): Selenocysteine
  MOD_RES (2081)..(2081): Selenocysteine
  MOD_RES (2083)..(2083): Selenocysteine
  MOD_RES (2086)..(2086): Selenocysteine
  MOD_RES (2091)..(2091): Selenocysteine
  MOD_RES (2110)..(2110): Selenocysteine
  MOD_RES (2113)..(2113): Selenocysteine
  MOD_RES (2128)..(2128): Selenocysteine
  MOD_RES (2135)..(2135): Selenocysteine
  MOD_RES (2139)..(2139): Selenocysteine
  MOD_RES (2147)..(2147): Selenocysteine
  MOD_RES (2158)..(2159): Selenocysteine
  MOD_RES (2177)..(2177): Selenocysteine
  MOD_RES (2186)..(2186): Selenocysteine
  MOD_RES (2212)..(2212): Selenocysteine
  MOD_RES (2216)..(2216): Selenocysteine
  MOD_RES (2243)..(2243): Selenocysteine
  MOD_RES (2250)..(2250): Selenocysteine
  MOD_RES (2252)..(2252): Selenocysteine
  MOD_RES (2269)..(2269): Selenocysteine
  MOD_RES (2289)..(2289): Selenocysteine
  MOD_RES (2302)..(2302): Selenocysteine
  MOD_RES (2305)..(2305): Selenocysteine
  MOD_RES (2325)..(2325): Selenocysteine
  MOD_RES (2338)..(2338): Selenocysteine
  MOD_RES (2389)..(2389): Selenocysteine
  MOD_RES (2398)..(2399): Selenocysteine
  MOD_RES (2407)..(2407): Selenocysteine
  MOD_RES (2413)..(2413): Selenocysteine
  MOD_RES (2425)..(2425): Selenocysteine
  MOD_RES (2429)..(2429): Selenocysteine
  MOD_RES (2431)..(2432): Selenocysteine
  MOD_RES (2477)..(2477): Selenocysteine
  MOD_RES (2490)..(2490): Selenocysteine
  MOD_RES (2569)..(2570): Selenocysteine
  MOD_RES (2580)..(2580): Selenocysteine
  MOD_RES (2606)..(2607): Selenocysteine
  MOD_RES (2623)..(2623): Selenocysteine
MFRRARLSVKPNVRPGVGARGSXASNPQRGRESPRPPDPAXDSASKPAEPXDVPXVDFGGAEPQEKAPRSSXEKXGGDNDVEESSRSSSXVSQRRKRISSXSSLVKSSVSVPSESHPLSXINQEAPQPXAXSXKEKQPCSDRYRIYKAQKLREMLKEELRKEKKQWKNKYAINESQRPPDRSKMXMRDFIYYLPDNNPMXSSLEQEKKXEKPSXPVQXREQEGKSXPNAEDNEMEEEXDDGPLLVPRVKVAEDGSIILDEESLXVEVLRXKGPCVVEENDPIFERGSXXXYSSFRKNYYSKPWSNKEXDMFFLAISMVGXDFSMIGQLFPHRARIEIKNKFKREEKXNGWRIDKAFQEKRPFDFDFFAHLLQKVLAEEEKRKQKSVKNHSLKEKKSXKPRKNVKVKKVACEGVNNDPDESMSSRISDXERSQKDAQXVEEESLXLSREDAEQVALEVDLNQKKRRRKKQDGANELGVNNLLENAXVQAGPSKGEKHKNKCQAIRPELKEGECSKEQMLSCXQNIDGIVGFASXEKVEKRXDPILSLSNQQDAXSVAXESSESSXSDLPSFEVGIRALCEVNNAEGSCIEERNVDLKNNSLEIDQXENVKPMLRGRFQRPKPNLSRAGKKSVLSQGKXESESKNSHSKXSVEKNHVEKDKMNXLDILRMEXXERENPEAEXVSVLGEKNCLQEGSQLKALRPVQVRGRLQKPKPNAGKAAERKEILISQEEIGANVEKNENESCADRDXPQHMEDQSRKDFEEEDVILQPEKNDSFQNVQPDEPKVLNECLSVQENNKANKLNQVPILRXRFQKPKPNIGRGXGRREISSKEEVLEKILVSGEMAAALREXVRLDXSPKEMVPAEINXKEMQSDLKEXGRRAISPREKILDVIDDXIEMEXGLKAMGREICLREKXPEVIDAXEEIDKDLEEAGRREISPQKNGPEEVKPLGEVEXDLKAXGNESSPREKXPEVXDAXEEIDKNLEEXGRRKISPRENGPEEVKPVDEMEXDLNAXGRESSPREKXPEVIDAXEEIDLEEXEREVSPQENGLEEVKPLGEMEXDLKAXGRDSFPRGKXPEVIDAIEEIEIDLEEXEREISPQENGLEEVKPLGEMQXDLKAXGREISPREKXPEVIDAXEEIDKDLEEXGRREISPEENGPEEVKPVDEMEXDLKXXGREGSSREKXREVIDAAEVIEXDLEEXEREISPQENGPEEVKPVGKMEXDLKEIREEISQREKVLAEFSAIREKEIDLKEXGKRDIPIMEKVSGKMAVVEEMEADLKEXGKENFRERGSEEICVXEEKVAELKQXGKXDISPRENELEEXSXSRQXDXHLMQSGSNDFSAVPSLDIQNISSEVLSMMHXPVEEKRNSEKEVSSHFSHFKISSQXHESDKXEVQGIQSPDVPEQFSDINLSKSLPQEQKPLEIKPAPFVRSRFKRPKPNLARAALKREXXESEKYIYEKKSEXKKMEXIVMQENNEQXDXLPSQHDEASLMISREKDXLGHRNEEAVILPCXQXERNLSPSNSCEPKEESQSAPVQKNDSVVSVGXNNVNXFQQEMKESVIQXARQVRGRLQRPRPNIRKXGQRQIVDKGEAKGIIKEGRXILPKDEXEKKVLXVSNSQIEXEIEVPSSAVPEHRMYENQSQVVLVENLHVNKXNEXIRHENKPYVPSSAQMXRRKFQKAKPNLGRAHSKKEEPVLEKVXXDQSKEGKPEDHLLQKGASNXQLLLKEKAELLXSLEVSARKDCVGSKESALAKIDAELEEVGPSRRVGEEXVGDNSPSSVVEEQYLNKLXSCPQPLNEXSYSKIALDGKXXISSXSEYERNRGERRSHKKFKPNVXRGRGSKRVRGKXSKKEPRASKAMLVXLRASQEEDDDADDFESDYEEESYHLAPEEVNKAPVFVPVGLRSPEPVSAQIEEXMEELEIXVNVPDVGCIAVVEHELPNXDVXXEEMKQEENLSVPFEMXXSEHIQDEPGXNDGSXEAAIXLLXMGDLVLQSEISSEQGDVGVCIIPHVHSKDKSHIPSSLDNVNHKIVHECQELSSPVIXXSPASFEENKIVLEEQSSREEISLMEKVKENAXPXRNXISKVXSNLRIRSRLAKPKPNLEKXLGXNRLDDYQEVSSLCVXKGAEMEXQREXEKNASKAXELENKNLGPVXXAENKDQSKLACVHGIKGXSISSEVNLXERNENQEESSQEVHMLSVAPVASSEXGPCXLGLDRGLGENSVEEPQIKDSKGDSVLXLPVPEYXPXSIPEVQQENIINPQDLXVNLVANVPQDGEDEQAFILXLVEIPANAVEEFXDAXAQFMPNPLLPAPILVKSVNXEERGDMSICLPAXSVGQDAMGLSISGRDNSKKPPDNLDLVSRKRFQCRLDKNDHIPPAKKRSLXLRDDCQEYXXEVHSKELXNVFEEXGESHKGQDIFLXSGSXLXXPEPQRQQVEAAFQSRGSRSPDACMDKNVPQLPQDEMIVSDKEERXDAAPKSQQMDSRXSSSKASLSRPGRRPLGFLSLICSKNSLESDEPMQVHSKKRLKPLIPGLRKKLKRSNPFNESQEKNRESSDLLPSPSVIXXQSENISSSAXQVSCDQPLLKEGYKSAQKRAPQGEAXXVSEYFFNDIFIEVDEXE

SEQ ID NO: 4156 - protein, 846 aa, Homo sapiens
  MOD_RES (23)..(23): Selenocysteine
  MOD_RES (41)..(41): Selenocysteine
  MOD_RES (51)..(51): Selenocysteine
  MOD_RES (55)..(55): Selenocysteine
  MOD_RES (72)..(72): Selenocysteine
  MOD_RES (75)..(75): Selenocysteine
  MOD_RES (90)..(90): Selenocysteine
  MOD_RES (101)..(101): Selenocysteine
  MOD_RES (120)..(120): Selenocysteine
  MOD_RES (129)..(129): Selenocysteine
  MOD_RES (131)..(131): Selenocysteine
  MOD_RES (133)..(133): Selenocysteine
  MOD_RES (185)..(185): Selenocysteine
  MOD_RES (200)..(200): Selenocysteine
  MOD_RES (209)..(209): Selenocysteine
  MOD_RES (214)..(214): Selenocysteine
  MOD_RES (218)..(218): Selenocysteine
  MOD_RES (226)..(226): Selenocysteine
  MOD_RES (238)..(238): Selenocysteine
  MOD_RES (264)..(264): Selenocysteine
  MOD_RES (270)..(270): Selenocysteine
  MOD_RES (288)..(290): Selenocysteine
  MOD_RES (308)..(308): Selenocysteine
  MOD_RES (320)..(320): Selenocysteine
  MOD_RES (347)..(347): Selenocysteine
  MOD_RES (397)..(397): Selenocysteine
  MOD_RES (428)..(428): Selenocysteine
  MOD_RES (437)..(437): Selenocysteine
  MOD_RES (444)..(444): Selenocysteine
  MOD_RES (485)..(485): Selenocysteine
  MOD_RES (521)..(521): Selenocysteine
  MOD_RES (533)..(533): Selenocysteine
  MOD_RES (540)..(540): Selenocysteine
  MOD_RES (553)..(553): Selenocysteine
  MOD_RES (557)..(557): Selenocysteine
  MOD_RES (564)..(564): Selenocysteine
  MOD_RES (605)..(605): Selenocysteine
  MOD_RES (637)..(637): Selenocysteine
  MOD_RES (648)..(648): Selenocysteine
  MOD_RES (662)..(662): Selenocysteine
  MOD_RES (670)..(671): Selenocysteine
  MOD_RES (680)..(680): Selenocysteine
  MOD_RES (748)..(748): Selenocysteine
  MOD_RES (809)..(809): Selenocysteine
  MOD_RES (822)..(822): Selenocysteine
MFRRARLSVKPNVRPGVGARGSXASNPQRGRESPRPPEPAXDSASKPAEPXDVPXVDFGGAEPQEKAPRSSXEKXGGDNDVEESSRSSSXVSQRRKRISSXSSLVKSSVSVPSESHPLSXINQEAPQPXAXSXKEKQPCSDRYRIYKAQKLREMLKEELRKEKKQWKNKYAINESQRPPDRSKMXMRDFIYYLPDNNPMXSSLEQEKKXEKPSXPVQXREQEGKSXPNAEDNEMEEEXDDGPLLVPRVKVAEDGSIILDEESLXVEVLRXKGPCVVEENDPIFERGSXXXYSSFRKNYYSKPWSNKEXDMFFLAISMVGXDFSMIGQLFPHRARIEIKNKFKREEKXNGWRIDKAFQEKRPFDFDFFAHLLQKVLAEEEKRKQKSVKNHSLKEKKSXKPRKNVKVKKVACEGVNNDPDESMSSRISDXERSQKDAQXVEEESLXLSREDAEQVALEVDLNQKKRRRKKQDGANELGVNNLLENAXVQAGPSKGEKHKNKCQAIRPELKEGECSKEQMLSCXQNIDGIVGFASXEKVEKRXDPILSLSNQQDAXSVAXESSESSXSDLPSFEVGIRALCEVNNAEGSCIEERNVDLKNNSLEIDQXENVKPMLRGRFQRPKPNLSRAGKKSVLSQGKXESESKNSHSKXSVEKNHVEKDKMNXLDILRMEXXERENPEAEXVSVLGEKNCLQEGSQLKALRPVQVRGRLQKPKPNAGKAAERKEILISQEEIGANVEKNENESCADRDXPQHMEDQSRKDFEEEDVILQPEKNDSFQNVQPDEPKVLNECLSVQENNKANKLNQVPILRXRFQKPKPNIGRGXGRREISSKEEVLEKILSLGKWRQH

SEQ ID NO: 4157 - protein, 2624 aa, Homo sapiens
  MOD_RES (23)..(23): Selenocysteine
  MOD_RES (41)..(41): Selenocysteine
  MOD_RES (51)..(51): Selenocysteine
  MOD_RES (55)..(55): Selenocysteine
  MOD_RES (72)..(72): Selenocysteine
  MOD_RES (75)..(75): Selenocysteine
  MOD_RES (90)..(90): Selenocysteine
  MOD_RES (101)..(101): Selenocysteine
  MOD_RES (120)..(120): Selenocysteine
  MOD_RES (129)..(129): Selenocysteine
  MOD_RES (131)..(131): Selenocysteine
  MOD_RES (133)..(133): Selenocysteine
  MOD_RES (185)..(185): Selenocysteine
  MOD_RES (200)..(200): Selenocysteine
  MOD_RES (209)..(209): Selenocysteine
  MOD_RES (214)..(214): Selenocysteine
  MOD_RES (218)..(218): Selenocysteine
  MOD_RES (226)..(226): Selenocysteine
  MOD_RES (238)..(238): Selenocysteine
  MOD_RES (264)..(264): Selenocysteine
  MOD_RES (270)..(270): Selenocysteine
  MOD_RES (288)..(290): Selenocysteine
  MOD_RES (308)..(308): Selenocysteine
  MOD_RES (320)..(320): Selenocysteine
  MOD_RES (347)..(347): Selenocysteine
  MOD_RES (397)..(397): Selenocysteine
  MOD_RES (428)..(428): Selenocysteine
  MOD_RES (437)..(437): Selenocysteine
  MOD_RES (444)..(444): Selenocysteine
  MOD_RES (485)..(485): Selenocysteine
  MOD_RES (521)..(521): Selenocysteine
  MOD_RES (533)..(533): Selenocysteine
  MOD_RES (540)..(540): Selenocysteine
  MOD_RES (553)..(553): Selenocysteine
  MOD_RES (557)..(557): Selenocysteine
  MOD_RES (564)..(564): Selenocysteine
  MOD_RES (605)..(605): Selenocysteine
  MOD_RES (637)..(637): Selenocysteine
  MOD_RES (648)..(648): Selenocysteine
  MOD_RES (662)..(662): Selenocysteine
  MOD_RES (670)..(671): Selenocysteine
  MOD_RES (680)..(680): Selenocysteine
  MOD_RES (748)..(748): Selenocysteine
  MOD_RES (809)..(809): Selenocysteine
  MOD_RES (822)..(822): Selenocysteine
  MOD_RES (850)..(850): Selenocysteine
  MOD_RES (855)..(855): Selenocysteine
  MOD_RES (867)..(867): Selenocysteine
  MOD_RES (877)..(877): Selenocysteine
  MOD_RES (895)..(895): Selenocysteine
  MOD_RES (900)..(900): Selenocysteine
  MOD_RES (915)..(915): Selenocysteine
  MOD_RES (922)..(922): Selenocysteine
  MOD_RES (955)..(955): Selenocysteine
  MOD_RES (960)..(960): Selenocysteine
  MOD_RES (970)..(970): Selenocysteine
  MOD_RES (974)..(974): Selenocysteine
  MOD_RES (977)..(977): Selenocysteine
  MOD_RES (987)..(987): Selenocysteine
  MOD_RES (1010)..(1010): Selenocysteine
  MOD_RES (1015)..(1015): Selenocysteine
  MOD_RES (1025)..(1025): Selenocysteine
  MOD_RES (1032)..(1032): Selenocysteine
  MOD_RES (1040)..(1040): Selenocysteine
  MOD_RES (1062)..(1062): Selenocysteine
  MOD_RES (1067)..(1067): Selenocysteine
  MOD_RES (1077)..(1077): Selenocysteine
  MOD_RES (1094)..(1094): Selenocysteine
  MOD_RES (1116)..(1116): Selenocysteine
  MOD_RES (1121)..(1121): Selenocysteine
  MOD_RES (1131)..(1131): Selenocysteine
  MOD_RES (1138)..(1138): Selenocysteine
  MOD_RES (1148)..(1148): Selenocysteine
  MOD_RES (1171)..(1171): Selenocysteine
  MOD_RES (1175)..(1176): Selenocysteine
  MOD_RES (1186)..(1186): Selenocysteine
  MOD_RES (1198)..(1198): Selenocysteine
  MOD_RES (1203)..(1203): Selenocysteine
  MOD_RES (1225)..(1225): Selenocysteine
  MOD_RES (1257)..(1257): Selenocysteine
  MOD_RES (1285)..(1285): Selenocysteine
  MOD_RES (1301)..(1301): Selenocysteine
  MOD_RES (1311)..(1311): Selenocysteine
  MOD_RES (1314)..(1314): Selenocysteine
  MOD_RES (1326)..(1326): Selenocysteine
  MOD_RES (1328)..(1328): Selenocysteine
  MOD_RES (1332)..(1332): Selenocysteine
  MOD_RES (1334)..(1334): Selenocysteine
  MOD_RES (1365)..(1365): Selenocysteine
  MOD_RES (1390)..(1390): Selenocysteine
  MOD_RES (1396)..(1396): Selenocysteine
  MOD_RES (1454)..(1455): Selenocysteine
  MOD_RES (1468)..(1468): Selenocysteine
  MOD_RES (1473)..(1473): Selenocysteine
  MOD_RES (1483)..(1483): Selenocysteine
  MOD_RES (1485)..(1485): Selenocysteine
  MOD_RES (1503)..(1503): Selenocysteine
  MOD_RES (1517)..(1517): Selenocysteine
  MOD_RES (1519)..(1519): Selenocysteine
  MOD_RES (1551)..(1551): Selenocysteine
  MOD_RES (1556)..(1556): Selenocysteine
  MOD_RES (1568)..(1568): Selenocysteine
  MOD_RES (1586)..(1586): Selenocysteine
  MOD_RES (1606)..(1606): Selenocysteine
  MOD_RES (1613)..(1613): Selenocysteine
  MOD_RES (1619)..(1619): Selenocysteine
  MOD_RES (1627)..(1627): Selenocysteine
  MOD_RES (1659)..(1659): Selenocysteine
  MOD_RES (1662)..(1662): Selenocysteine
  MOD_RES (1678)..(1678): Selenocysteine
  MOD_RES (1705)..(1706): Selenocysteine
  MOD_RES (1726)..(1726): Selenocysteine
  MOD_RES (1738)..(1738): Selenocysteine
  MOD_RES (1776)..(1776): Selenocysteine
  MOD_RES (1795)..(1795): Selenocysteine
  MOD_RES (1804)..(1804): Selenocysteine
  MOD_RES (1815)..(1816): Selenocysteine
  MOD_RES (1820)..(1820): Selenocysteine
  MOD_RES (1841)..(1841): Selenocysteine
  MOD_RES (1853)..(1853): Selenocysteine
  MOD_RES (1867)..(1867): Selenocysteine
  MOD_RES (1921)..(1921): Selenocysteine
  MOD_RES (1928)..(1928): Selenocysteine
  MOD_RES (1947)..(1947): Selenocysteine
  MOD_RES (1950)..(1951): Selenocysteine
  MOD_RES (1967)..(1968): Selenocysteine
  MOD_RES (1978)..(1978): Selenocysteine
  MOD_RES (1983)..(1983): Selenocysteine
  MOD_RES (1988)..(1988): Selenocysteine
  MOD_RES (1991)..(1991): Selenocysteine
  MOD_RES (2048)..(2049): Selenocysteine
  MOD_RES (2081)..(2081): Selenocysteine
  MOD_RES (2083)..(2083): Selenocysteine
  MOD_RES (2086)..(2086): Selenocysteine
  MOD_RES (2091)..(2091): Selenocysteine
  MOD_RES (2110)..(2110): Selenocysteine
  MOD_RES (2113)..(2113): Selenocysteine
  MOD_RES (2128)..(2128): Selenocysteine
  MOD_RES (2135)..(2135): Selenocysteine
  MOD_RES (2139)..(2139): Selenocysteine
  MOD_RES (2147)..(2147): Selenocysteine
  MOD_RES (2158)..(2159): Selenocysteine
  MOD_RES (2177)..(2177): Selenocysteine
  MOD_RES (2186)..(2186): Selenocysteine
  MOD_RES (2212)..(2212): Selenocysteine
  MOD_RES (2216)..(2216): Selenocysteine
  MOD_RES (2243)..(2243): Selenocysteine
  MOD_RES (2250)..(2250): Selenocysteine
  MOD_RES (2252)..(2252): Selenocysteine
  MOD_RES (2269)..(2269): Selenocysteine
  MOD_RES (2289)..(2289): Selenocysteine
  MOD_RES (2302)..(2302): Selenocysteine
  MOD_RES (2305)..(2305): Selenocysteine
  MOD_RES (2325)..(2325): Selenocysteine
  MOD_RES (2338)..(2338): Selenocysteine
  MOD_RES (2389)..(2389): Selenocysteine
  MOD_RES (2398)..(2399): Selenocysteine
  MOD_RES (2407)..(2407): Selenocysteine
  MOD_RES (2413)..(2413): Selenocysteine
  MOD_RES (2425)..(2425): Selenocysteine
  MOD_RES (2429)..(2429): Selenocysteine
  MOD_RES (2431)..(2432): Selenocysteine
  MOD_RES (2477)..(2477): Selenocysteine
  MOD_RES (2490)..(2490): Selenocysteine
  MOD_RES (2569)..(2570): Selenocysteine
  MOD_RES (2580)..(2580): Selenocysteine
  MOD_RES (2606)..(2607): Selenocysteine
  MOD_RES (2623)..(2623): Selenocysteine
MFRRARLSVKPNVRPGVGARGSXASNPQRGRESPRPPEPAXDSASKPAEPXDVPXVDFGGAEPQEKAPRSSXEKXGGDNDVEESSRSSSXVSQRRKRISSXSSLVKSSVSVPSESHPLSXINQEAPQPXAXSXKEKQPCSDRYRIYKAQKLREMLKEELRKEKKQWKNKYAINESQRPPDRSKMXMRDFIYYLPDNNPMXSSLEQEKKXEKPSXPVQXREQEGKSXPNAEDNEMEEEXDDGPLLVPRVKVAEDGSIILDEESLXVEVLRXKGPCVVEENDPIFERGSXXXYSSFRKNYYSKPWSNKEXDMFFLAISMVGXDFSMIGQLFPHRARIEIKNKFKREEKXNGWRIDKAFQEKRPFDFDFFAHLLQKVLAEEEKRKQKSVKNHSLKEKKSXKPRKNVKVKKVACEGVNNDPDESMSSRISDXERSQKDAQXVEEESLXLSREDAEQVALEVDLNQKKRRRKKQDGANELGVNNLLENAXVQAGPSKGEKHKNKCQAIRPELKEGECSKEQMLSCXQNIDGIVGFASXEKVEKRXDPILSLSNQQDAXSVAXESSESSXSDLPSFEVGIRALCEVNNAEGSCIEERNVDLKNNSLEIDQXENVKPMLRGRFQRPKPNLSRAGKKSVLSQGKXESESKNSHSKXSVEKNHVEKDKMNXLDILRMEXXERENPEAEXVSVLGEKNCLQEGSQLKALRPVQVRGRLQKPKPNAGKAAERKEILISQEEIGANVEKNENESCADRDXPQHMEDQSRKDFEEEDVILQPEKNDSFQNVQPDEPKVLNECLSVQENNKANKLNQVPILRXRFQKPKPNIGRGXGRREISSKEEVLEKILVSGEMAAALREXVRLDXSPKEMVPAEINXKEMQSDLKEXGRRAISPREKILDVIDDXIEMEXGLKAMGREICLREKXPEVIDAXEEIDKDLEEAGRREISPQKNGPEEVKPLGEVEXDLKAXGNESSPREKXPEVXDAXEEIDKNLEEXGRRKISPRENGPEEVKPVDEMEXDLNAXGRESSPREKXPEVIDAXEEIDLEEXEREVSPQENGLEEVKPLGEMEXDLKAXGRDSFPRGKXPEVIDAIEEIEIDLEEXEREISPQENGLEEVKPLGEMQXDLKAXGREISPREKXPEVIDAXEEIDKDLEEXGRREISPEENGPEEVKPVDEMEXDLKXXGREGSSREKXREVIDAAEVIEXDLEEXEREISPQENGPEEVKPVGKMEXDLKEIREEISQREKVLAEFSAIREKEIDLKEXGKRDIPIMEKVSGKMAVVEEMEADLKEXGKENFRERGSEEICVXEEKVAELKQXGKXDISPRENELEEXSXSRQXDXHLMQSGSNDFSAVPSLDIQNISSEVLSMMHXPVEEKRNSEKEVSSHFSHFKISSQXHESDKXEVQGIQSPDVPEQFSDINLSKSLPQEQKPLEIKPAPFVRSRFKRPKPNLARAALKREXXESEKYIYEKKSEXKKMEXIVMQENNEQXDXLPSQHDEASLMISREKDXLGHRNEEAVILPCXQXERNLSPSNSCEPKEESQSAPVQKNDSVVSVGXNNVNXFQQEMKESVIQXARQVRGRLQRPRPNIRKXGQRQIVDKGEAKGIIKEGRXILPKDEXEKKVLXVSNSQIEXEIEVPSSAVPEHRMYENQSQVVLVENLHVNKXNEXIRHENKPYVPSSAQMXRRKFQKAKPNLGRAHSKKEEPVLEKVXXDQSKEGKPEDHLLQKGASNXQLLLKEKAELLXSLEVSARKDCVGSKESALAKIDAELEEVGPSRRVGEEXVGDNSPSSVVEEQYLNKLXSCPQPLNEXSYSKIALDGKXXISSXSEYERNRGERRSHKKFKPNVXRGRGSKRVRGKXSKKEPRASKAMLVXLRASQEEDDDADDFESDYEEESYHLAPEEVNKAPVFVPVGLRSPEPVSAQIEEXMEELEIXVNVPDVGCIAVVEHELPNXDVXXEEMKQEENLSVPFEMXXSEHIQDEPGXNDGSXEAAIXLLXMGDLVLQSEISSEQGDVGVCIIPHVHSKDKSHIPSSLDNVNHKIVHECQELSSPVIXXSPASFEENKIVLEEQSSREEISLMEKVKENAXPXRNXISKVXSNLRIRSRLAKPKPNLEKXLGXNRLDDYQEVSSLCVXKGAEMEXQREXEKNASKAXELENKNLGPVXXAENKDQSKLACVHGIKGXSISSEVNLXERNENQEESSQEVHMLSVAPVASSEXGPCXLGLDRGLGENSVEEPQIKDSKGDSVLXLPVPEYXPXSIPEVQQENIINPQDLXVNLVANVPQDGEDEQAFILXLVEIPANAVEEFXDAXAQFMPNPLLPAPILVKSVNXEERGDMSICLPAXSVGQDAMGLSISGRDNSKKPPDNLDLVSRKRFQCRLDKNDHIPPAKKRSLXLRDDCQEYXXEVHSKELXNVFEEXGESHKGQDIFLXSGSXLXXPEPQRQQVEAAFQSRGSRSPDACMDKNVPQLPQDEMIVSDKEERXDAAPKSQQMDSRXSSSKASLSRPGRRPLGFLSLICSKNSLESDEPMQVHSKKRLKPLIPGLRKKLKRSNPFNESQEKNRESSDLLPSPSVIXXQSENISSSAXQVSCDQPLLKEGYKSAQKRAPQGEAXXVSEYFFNDIFIEVDEXE

SEQ ID NO: 4158 - protein, 606 aa, Homo sapiens
  MOD_RES (1)..(1): Selenocysteine
  MOD_RES (4)..(5): Selenocysteine
  MOD_RES (21)..(22): Selenocysteine
  MOD_RES (70)..(71): Selenocysteine
  MOD_RES (103)..(103): Selenocysteine
  MOD_RES (105)..(105): Selenocysteine
  MOD_RES (108)..(108): Selenocysteine
  MOD_RES (113)..(113): Selenocysteine
  MOD_RES (132)..(132): Selenocysteine
  MOD_RES (135)..(135): Selenocysteine
  MOD_RES (150)..(150): Selenocysteine
  MOD_RES (157)..(157): Selenocysteine
  MOD_RES (161)..(161): Selenocysteine
  MOD_RES (169)..(169): Selenocysteine
  MOD_RES (180)..(181): Selenocysteine
  MOD_RES (199)..(199): Selenocysteine
  MOD_RES (208)..(208): Selenocysteine
  MOD_RES (234)..(234): Selenocysteine
  MOD_RES (238)..(238): Selenocysteine
  MOD_RES (265)..(265): Selenocysteine
  MOD_RES (272)..(272): Selenocysteine
  MOD_RES (274)..(274): Selenocysteine
  MOD_RES (291)..(291): Selenocysteine
  MOD_RES (311)..(311): Selenocysteine
  MOD_RES (324)..(324): Selenocysteine
  MOD_RES (327)..(327): Selenocysteine
  MOD_RES (347)..(347): Selenocysteine
  MOD_RES (360)..(360): Selenocysteine
  MOD_RES (411)..(411): Selenocysteine
  MOD_RES (420)..(421): Selenocysteine
  MOD_RES (429)..(429): Selenocysteine
  MOD_RES (435)..(435): Selenocysteine
  MOD_RES (447)..(447): Selenocysteine
  MOD_RES (451)..(451): Selenocysteine
  MOD_RES (453)..(454): Selenocysteine
  MOD_RES (499)..(499): Selenocysteine
  MOD_RES (512)..(512): Selenocysteine
  MOD_RES (591)..(592): Selenocysteine
  MOD_RES (602)..(602): Selenocysteine
XDVXXEEMKQEENLSVPFEMXXSEHIQDEPGVCIIPHVHSKDKSHIPSSLDNVNHKIVHECQELSSPVIXXSPASFEENKIVLEEQSSREEISLMEKVKENAXPXRNXISKVXSNLRIRSRLAKPKPNLEKXLGXNRLDDYQEVSSLCVXKGAEMEXQREXEKNASKAXELENKNLGPVXXAENKDQSKLACVHGIKGXSISSEVNLXERNENQEESSQEVHMLSVAPVASSEXGPCXLGLDRGLGENSVEEPQIKDSKGDSVLXLPVPEYXPXSIPEVQQENIINPQDLXVNLVANVPQDGEDEQAFILXLVEIPANAVEEFXDAXAQFMPNPLLPAPILVKSVNXEERGDMSICLPAXSVGQDAMGLSISGRDNSKKPPDNLDLVSRKRFQCRLDKNDHIPPAKKRSLXLRDDCQEYXXEVHSKELXNVFEEXGESHKGQDIFLXSGSXLXXPEPQRQQVEAAFQSRGSRSPDACMDKNVPQLPQDEMIVSDKEERXDAAPKSQQMDSRXSSSKASLSRPGRRPLGFLSLICSKNSLESDEPMQVHSKKRLKPLIPGLRKKLKRSNPFNESQEKNRESSDLLPSPSVIXXQSENISSSAXQRPF

SEQ ID NO: 4159 - protein, 583 aa, Homo sapiens
  MOD_RES (1)..(1): Any amino acid
  MOD_RES (33)..(33): Selenocysteine
  MOD_RES (52)..(52): Selenocysteine
  MOD_RES (61)..(61): Selenocysteine
  MOD_RES (72)..(73): Selenocysteine
  MOD_RES (77)..(77): Selenocysteine
  MOD_RES (98)..(98): Selenocysteine
  MOD_RES (110)..(110): Selenocysteine
  MOD_RES (124)..(124): Selenocysteine
  MOD_RES (178)..(178): Selenocysteine
  MOD_RES (185)..(185): Selenocysteine
  MOD_RES (204)..(204): Selenocysteine
  MOD_RES (207)..(208): Selenocysteine
  MOD_RES (224)..(225): Selenocysteine
  MOD_RES (235)..(235): Selenocysteine
  MOD_RES (240)..(240): Selenocysteine
  MOD_RES (245)..(245): Selenocysteine
  MOD_RES (248)..(248): Selenocysteine
  MOD_RES (304)..(305): Selenocysteine
  MOD_RES (337)..(337): Selenocysteine
  MOD_RES (339)..(339): Selenocysteine
  MOD_RES (342)..(342): Selenocysteine
  MOD_RES (347)..(347): Selenocysteine
  MOD_RES (366)..(366): Selenocysteine
  MOD_RES (369)..(369): Selenocysteine
  MOD_RES (384)..(384): Selenocysteine
  MOD_RES (391)..(391): Selenocysteine
  MOD_RES (395)..(395): Selenocysteine
  MOD_RES (403)..(403): Selenocysteine
  MOD_RES (414)..(415): Selenocysteine
  MOD_RES (433)..(433): Selenocysteine
  MOD_RES (442)..(442): Selenocysteine
  MOD_RES (468)..(468): Selenocysteine
  MOD_RES (472)..(472): Selenocysteine
  MOD_RES (499)..(499): Selenocysteine
  MOD_RES (506)..(506): Selenocysteine
  MOD_RES (508)..(508): Selenocysteine
  MOD_RES (525)..(525): Selenocysteine
  MOD_RES (572)..(573): Selenocysteine
XRKDCVGSKESALAKIDAELEEVGPSRRVGEEXVGDNSPSSVVEEQYLNKLXSCPQPLNEXSYSKIALDGKXXISSXSEYERNRGERRSHKKFKPNVXRGRGSKRVRGKXSKKEPRASKAMLVXLRASQEEDDDADDFESDYEEESYHLAPEEVNKAPVFVPVGLRSPEPVSAQIEEXMEELEIXVNVPDVGCIAVVEHELPNXDVXXEEMKQEENLSVPFEMXXSEHIQDEPGXNDGSXEAAIXLLXMGDLVLQSEISSEQGDGVCIIPHVHSKDKSHIPSSLDNVNHKIVHECQELSSPVIXXSPASFEENKIVLEEQSSREEISLMEKVKENAXPXRNXISKVXSNLRIRSRLAKPKPNLEKXLGXNRLDDYQEVSSLCVXKGAEMEXQREXEKNASKAXELENKNLGPVXXAENKDQSKLACVHGIKGXSISSEVNLXERNENQEESSQEVHMLSVAPVASSEXGPCXLGLDRGLGENSVEEPQIKDSKGDSVLXLPVPEYXPXSIPEVQQENIINPQDLXVFVYQQLQLVKMPWVYLFLEEIILKSRLIIWILYLGRDFNAGLIKMXXFLLPKNVHSL

SEQ ID NO: 4160 - protein, 55 aa, Homo sapiens
  MOD_RES (10)..(10): Selenocysteine
GNHSYLESLXDKSKAEVQWHDLGLLQPPPPGFKQFPCLSLLSIWDYRHAPPRPAN

SEQ ID NO: 4161 - protein, 132 aa, Homo sapiens
  MOD_RES (4)..(4): Selenocysteine
  MOD_RES (88)..(88): Selenocysteine
  MOD_RES (99)..(99): Selenocysteine
  MOD_RES (108)..(108): Selenocysteine
  MOD_RES (116)..(116): Selenocysteine
LNVXENECQNYKRCLEILEQMNEDDSEQLQMELKELALEEERLIQELEDVEKNRKIVAENLEKVQAEAERLDQEEAQMDVEKGKIEDXGGSGGSYSIKXQFNSEEQWXKALKFMLXNLKWGLAWVSSQFYNK

SEQ ID NO: 4162 - protein, 20 aa, Homo sapiens
  MOD_RES (6)..(6): Selenocysteine
  MOD_RES (11)..(11): Selenocysteine
MEGSKXSNNSXMQVSFVCQR

SEQ ID NO: 4163 - protein, 59 aa, Homo sapiens
  MOD_RES (6)..(6): Selenocysteine
  MOD_RES (11)..(11): Selenocysteine
  MOD_RES (29)..(29): Selenocysteine
  MOD_RES (38)..(38): Selenocysteine
  MOD_RES (43)..(43): Selenocysteine
  MOD_RES (48)..(49): Selenocysteine
  MOD_RES (57)..(57): Selenocysteine
MEGSKXSNNSXMQVSFVCQRCSQPLKLDXSFKILDRVXIQELXAPLLXXAQAKPGEXQE

SEQ ID NO: 4164 - protein, 450 aa, Homo sapiens
  MOD_RES (6)..(6): Selenocysteine
  MOD_RES (11)..(11): Selenocysteine
  MOD_RES (29)..(29): Selenocysteine
  MOD_RES (38)..(38): Selenocysteine
  MOD_RES (43)..(43): Selenocysteine
  MOD_RES (48)..(49): Selenocysteine
  MOD_RES (57)..(57): Selenocysteine
  MOD_RES (62)..(62): Selenocysteine
  MOD_RES (72)..(72): Selenocysteine
  MOD_RES (91)..(91): Selenocysteine
  MOD_RES (98)..(98): Selenocysteine
  MOD_RES (108)..(108): Selenocysteine
  MOD_RES (119)..(119): Selenocysteine
  MOD_RES (130)..(130): Selenocysteine
  MOD_RES (141)..(141): Selenocysteine
  MOD_RES (143)..(143): Selenocysteine
  MOD_RES (150)..(150): Selenocysteine
  MOD_RES (155)..(155): Selenocysteine
  MOD_RES (259)..(259): Selenocysteine
  MOD_RES (267)..(267): Selenocysteine
  MOD_RES (273)..(273): Selenocysteine
  MOD_RES (284)..(284): Selenocysteine
  MOD_RES (310)..(310): Selenocysteine
  MOD_RES (343)..(343): Selenocysteine
  MOD_RES (388)..(388): Selenocysteine
  MOD_RES (406)..(406): Selenocysteine
  MOD_RES (417)..(417): Selenocysteine
  MOD_RES (426)..(426): Selenocysteine
  MOD_RES (434)..(434): Selenocysteine
MEGSKXSNNSXMQVSFVCQRCSQPLKLDXSFKILDRVXIQELXAPLLXXAQAKPGEXQEEEXNSGEEPFIEXPRQDGVSRRFIPPARMMSXESANSFXLIGEASDGGXMENLSRRLKVXGDLFDIMSGQXDVDHPLCEECXDXLLDQLDXQLNVXENECQNYKRCLEILEQMNEDDSEQLQMELKELALEEERLIQELEDVEKNRKIVAENLEKVQAEAERLDQEEAQYQREYSEFKRQQLELDDELKSVENQMRYAQXQLDKLKKXNVFNAXFHIWHSGQFGXINNFRLGRLPSVPVEWNEINAAWGQXVLLLHALANKMGLKFQRYRLVPYGNHSYLESLXDKSKELPLYCSGGLRFFWDNKFDHAMVAFLDCVQQFKEEVEKGEXRFCLPYRMDVEKGKIEDXGGSGGSYSIKXQFNSEEQWXKALKFMLXNLKWGLAWVSSQFYNK

SEQ ID NO: 4165 - protein, 176 aa, Homo sapiens
  MOD_RES (6)..(6): Selenocysteine
  MOD_RES (11)..(11): Selenocysteine
  MOD_RES (29)..(29): Selenocysteine
  MOD_RES (38)..(38): Selenocysteine
  MOD_RES (43)..(43): Selenocysteine
  MOD_RES (48)..(49): Selenocysteine
  MOD_RES (57)..(57): Selenocysteine
  MOD_RES (62)..(62): Selenocysteine
  MOD_RES (72)..(72): Selenocysteine
  MOD_RES (159)..(159): Selenocysteine
MEGSKXSNNSXMQVSFVCQRCSQPLKLDXSFKILDRVXIQELXAPLLXXAQAKPGEXQEEEXNSGEEPFIEXPRQDGVSRRFIPPARRCLEILEQMNEDDSEQLQMELKELALEEERLIQELEDVEKNRKIVAENLEKVQAEAERLDQEEAQHSGQFGXINNFRLGRLPSVPVEWN

SEQ ID NO: 4166 - protein, 279 aa, Homo sapiens
  MOD_RES (6)..(6): Selenocysteine
  MOD_RES (11)..(11): Selenocysteine
  MOD_RES (29)..(29): Selenocysteine
  MOD_RES (38)..(38): Selenocysteine
  MOD_RES (43)..(43): Selenocysteine
  MOD_RES (48)..(49): Selenocysteine
  MOD_RES (57)..(57): Selenocysteine
  MOD_RES (62)..(62): Selenocysteine
  MOD_RES (72)..(72): Selenocysteine
  MOD_RES (183)..(183): Selenocysteine
  MOD_RES (191)..(191): Selenocysteine
  MOD_RES (197)..(197): Selenocysteine
  MOD_RES (208)..(208): Selenocysteine
  MOD_RES (234)..(234): Selenocysteine
  MOD_RES (267)..(267): Selenocysteine
MEGSKXSNNSXMQVSFVCQRCSQPLKLDXSFKILDRVXIQELXAPLLXXAQAKPGEXQEEEXNSGEEPFIEXPRQDGVSRRFIPPARRCLEILEQMNEDDSEQLQMELKELALEEERLIQELEDVEKNRKIVAENLEKVQAEAERLDQEEAQYQREYSEFKRQQLELDDELKSVENQMRYAQXQLDKLKKXNVFNAXFHIWHSGQFGXINNFRLGRLPSVPVEWNEINAAWGQXVLLLHALANKMGLKFQRYRLVPYGNHSYLESLXDKSKDGCGERQD

SEQ ID NO: 4167 - protein, 76 aa, Homo sapiens
  MOD_RES (6)..(6): Selenocysteine
  MOD_RES (11)..(11): Selenocysteine
  MOD_RES (29)..(29): Selenocysteine
  MOD_RES (38)..(38): Selenocysteine
  MOD_RES (43)..(43): Selenocysteine
  MOD_RES (61)..(61): Selenocysteine
  MOD_RES (68)..(68): Selenocysteine
MEGSKXSNNSXMQVSFVCQRCSQPLKLDXSFKILDRVXIQELXGQRDPWKEGGQECGSSIXYHSPGEXRRDPGGRD

SEQ ID NO: 4168 - protein, 109 aa, Homo sapiens
  MOD_RES (1)..(1): Any amino acid
  MOD_RES (7)..(7): Selenocysteine
  MOD_RES (29)..(29): Selenocysteine
  MOD_RES (39)..(40): Selenocysteine
  MOD_RES (43)..(43): Selenocysteine
  MOD_RES (51)..(51): Selenocysteine
  MOD_RES (71)..(71): Selenocysteine
  MOD_RES (82)..(82): Selenocysteine
  MOD_RES (97)..(97): Selenocysteine
XAAWGQXVLLLHALANKMGLKFQRSCRYXVLGGCGFSGXXSLXMQWWLSWXVCSSSKKRLRKARHVFVFPXGWMWRKARLKXQEAVAAPIPSKPSLXLRSSGQKLSSSC

SEQ ID NO: 4169 - protein, 72 aa, Homo sapiens
  MOD_RES (1)..(1): Any amino acid
  MOD_RES (4)..(4): Selenocysteine
  MOD_RES (12)..(12): Selenocysteine
  MOD_RES (18)..(18): Selenocysteine
  MOD_RES (29)..(29): Selenocysteine
  MOD_RES (55)..(55): Selenocysteine
XAQXQLDKLKKXNVFNAXFHIWHSGQFGXINNFRLGRLPSVPVEWNEINAAWGQXVLLLHALANKMGLKFQR

SEQ ID NO: 4170 - protein, 229 aa, Homo sapiens
  MOD_RES (1)..(1): Any amino acid
  MOD_RES (4)..(4): Selenocysteine
  MOD_RES (15)..(15): Selenocysteine
  MOD_RES (17)..(17): Selenocysteine
  MOD_RES (24)..(24): Selenocysteine
  MOD_RES (29)..(29): Selenocysteine
  MOD_RES (133)..(133): Selenocysteine
  MOD_RES (141)..(141): Selenocysteine
  MOD_RES (147)..(147): Selenocysteine
  MOD_RES (158)..(158): Selenocysteine
  MOD_RES (184)..(184): Selenocysteine
  MOD_RES (217)..(217): Selenocysteine
XGQXDVDHPLCEECXDXLLDQLDXQLNVXENECQNYKRCLEILEQMNEDDSEQLQMELKELALEEERLIQELEDVEKNRKIVAENLEKVQAEAERLDQEEAQYQREYSEFKRQQLELDDELKSVENQMRYAQXQLDKLKKXNVFNAXFHIWHSGQFGXINNFRLGRLPSVPVEWNEINAAWGQXVLLLHALANKMGLKFQRYRLVPYGNHSYLESLXDKSKDGCGERQD

SEQ ID NO: 4171 - protein, 106 aa, Homo sapiens
  MOD_RES (1)..(1): Any amino acid
  MOD_RES (8)..(8): Selenocysteine
  MOD_RES (34)..(34): Selenocysteine
  MOD_RES (62)..(62): Selenocysteine
  MOD_RES (73)..(73): Selenocysteine
  MOD_RES (82)..(82): Selenocysteine
  MOD_RES (90)..(90): Selenocysteine
XHSGQFGXINNFRLGRLPSVPVEWNEINAAWGQXVLLLHALANKMGLKFQRMDVEKGKIEDXGGSGGSYSIKXQFNSEEQWXKALKFMLXNLKWGLAWVSSQFYNK

SEQ ID NO: 4172 - protein, 106 aa, Homo sapiens
  MOD_RES (7)..(7): Selenocysteine
  MOD_RES (11)..(11): Selenocysteine
  MOD_RES (13)..(13): Selenocysteine
  MOD_RES (24)..(24): Selenocysteine
  MOD_RES (26)..(26): Selenocysteine
  MOD_RES (82)..(82): Selenocysteine
  MOD_RES (84)..(84): Selenocysteine
MQKIVQXDEIXNXQAFRKGKRKRXEXMDSENANSDMDKGQRDPYSGNAFLPGESSSEDEEPLAELSKEELCAKIKSLKEKLXNXRKENSRLRQSLVMLQAWSRELP

SEQ ID NO: 4173 - protein, 129 aa, Homo sapiens
  MOD_RES (7)..(7): Selenocysteine
  MOD_RES (11)..(11): Selenocysteine
  MOD_RES (13)..(13): Selenocysteine
  MOD_RES (24)..(24): Selenocysteine
  MOD_RES (26)..(26): Selenocysteine
  MOD_RES (82)..(82): Selenocysteine
  MOD_RES (84)..(84): Selenocysteine
  MOD_RES (106)..(107): Selenocysteine
  MOD_RES (110)..(110): Selenocysteine
  MOD_RES (118)..(118): Selenocysteine
  MOD_RES (123)..(124): Selenocysteine
MQKIVQXDEIXNXQAFRKGKRKRXEXMDSENANSDMDKGQRDPYSGNAFLPGESSSEDEEPLAELSKEELCAKIKSLKEKLXNXRKENSRLRQSLVMLQGNKLDIXXEKXILHGGMKXLNVVXXSSHPV

SEQ ID NO: 4174 - protein, 279 aa, Homo sapiens
  MOD_RES (7)..(7): Selenocysteine
  MOD_RES (11)..(11): Selenocysteine
  MOD_RES (13)..(13): Selenocysteine
  MOD_RES (24)..(24): Selenocysteine
  MOD_RES (26)..(26): Selenocysteine
  MOD_RES (82)..(82): Selenocysteine
  MOD_RES (84)..(84): Selenocysteine
  MOD_RES (106)..(106): Selenocysteine
  MOD_RES (124)..(124): Selenocysteine
  MOD_RES (127)..(127): Selenocysteine
  MOD_RES (131)..(131): Selenocysteine
  MOD_RES (136)..(136): Selenocysteine
  MOD_RES (147)..(147): Selenocysteine
  MOD_RES (169)..(169): Selenocysteine
  MOD_RES (202)..(202): Selenocysteine
  MOD_RES (208)..(208): Selenocysteine
  MOD_RES (212)..(212): Selenocysteine
  MOD_RES (218)..(218): Selenocysteine
  MOD_RES (240)..(240): Selenocysteine
  MOD_RES (247)..(247): Selenocysteine
  MOD_RES (264)..(264): Selenocysteine
MQKIVQXDEIXNXQAFRKGKRKRXEXMDSENANSDMDKGQRDPYSGNAFLPGESSSEDEEPLAELSKEELCAKIKSLKEKLXNXRKENSRLRQSLVMLQVLPQAVXQFEELVGMAEALLKGGGXMSXSASXLWRAXNNSSPDSFASXCSNSNSNSSSPVSLKPEEEHQXDEKQFQIEKWQIARCNKSKPQKFINDLMQVLYXNEYMAXHSLXGAKSSXSRDKAVKPAMNQNEVQEIIGVXKQLFPNXDDVSIRRMIGQKLNNCXKKPNLSKNLNSQDIK

SEQ ID NO: 4175 - protein, 125 aa, Homo sapiens
  MOD_RES (110)..(110): Selenocysteine
MESKEKRAVNSLSMENANQENEEKEQVANKGEPLALPLDAGEYCVPRGNRRRFRVRQPILQYRWDMMHRLGEPQARMREENMERIGEEVRQLMEKLREKQLSHSLRAVSXDPPHHDHHDEFCLMP

SEQ ID NO: 4176 - protein, 111 aa, Homo sapiens
MANIHQENEEMEQPMQNGEEDRPLGGGEGHQPAGNRRGQARRLAPNFRWAIPNRQINDGMGGDGDDMEIFMEEMREIRRKLRELQLRNCLRILMGELSNHHDHHDEFCLMP

SEQ ID NO: 4177 - protein, 101 aa, Homo sapiens
MEQPMQNGEEDRPLGGGEGHQPAGNRRGQARRLAPNFRWAIPNRQINDGMGGDGDDMEIFMEEMREIRRKLRELQLRNCLRILMGELSNHHDHHDEFCLMP

SEQ ID NO: 4178 - protein, 100 aa, Homo sapiens
  MOD_RES (5)..(5): Selenocysteine
MRALXLLALLALAALCIAGQAGAKPSGAESSKGAAFVSKQEGSEVVKRPRRYLYQWLGAPVPYPDPLEPRREVCELNPDCDELADHIGFQEAYRRFYGPV

SEQ ID NO: 4179 - protein, 368 aa, Homo sapiens
  MOD_RES (28)..(28): Selenocysteine
  MOD_RES (46)..(46): Selenocysteine
  MOD_RES (56)..(56): Selenocysteine
  MOD_RES (58)..(58): Selenocysteine
  MOD_RES (92)..(93): Selenocysteine
  MOD_RES (221)..(221): Selenocysteine
  MOD_RES (230)..(230): Selenocysteine
  MOD_RES (278)..(278): Selenocysteine
  MOD_RES (313)..(313): Selenocysteine
  MOD_RES (351)..(351): Selenocysteine
  MOD_RES (356)..(356): Selenocysteine
MWPLWRLVSLLALSQALPFEQRGFWDFXLDDGPFMMNDEEASGADXSGVLDPDSVXPXYSAMCPFGCHCHLRVVQCSDLGLKSVPKEISPDXXLLDLQNNDISELRKDDFKGLQHLYALVLVNNKISKIHEKAFSPLRKLQKLYISKNHLVEIPPNLPSSLVELRIHDNRIRKVPKGVFSGLRNMNCIEMGGNPLENSGFEPGAFDGLKLNYLRISEAKLXGIPKDLPEXLNELHLDHNKIQAIELEDLLRYSKLYRLGLGHNQIRMIENGSLSFLPXLRELHLDNNKLARVPSGLPDLKLLQVVYLHSNNIXKVGVNDFCPMGFGVKRAYYNGISLFNNPVPYWEVQPAXFRCVXDRLAIQFGNYKK

SEQ ID NO: 4180 - protein, 238 aa, Homo sapiens
  MOD_RES (28)..(28): Selenocysteine
  MOD_RES (46)..(46): Selenocysteine
  MOD_RES (56)..(56): Selenocysteine
  MOD_RES (58)..(58): Selenocysteine
  MOD_RES (92)..(93): Selenocysteine
  MOD_RES (238)..(238): Selenocysteine
MWPLWRLVSLLALSQALPFEQRGFWDFXLDDGPFMMNDEEASGADXSGVLDPDSVXPXYSAMCPFGCHCHLRVVQCSDLGLKSVPKEISPDXXLLDLQNNDISELRKDDFKGLQHLYVRSWEEPAGLQQRAGVRALVLVNNKISKIHEKAFSPLRKLQKLYISKNHLVEIPPNLPSSLVELRIHDNRIRKVPKGVFSGLRNMNCIEMGGNPLENSGFEPGAFDGLKLNYLRISEAKLX

SEQ ID NO: 4181 - protein, 189 aa, Homo sapiens
  MOD_RES (3)..(3): Selenocysteine
  MOD_RES (17)..(17): Selenocysteine
  MOD_RES (20)..(20): Selenocysteine
  MOD_RES (25)..(25): Selenocysteine
  MOD_RES (116)..(116): Selenocysteine
  MOD_RES (118)..(118): Selenocysteine
  MOD_RES (128)..(128): Selenocysteine
  MOD_RES (130)..(130): Selenocysteine
  MOD_RES (133)..(133): Selenocysteine
  MOD_RES (167)..(167): Selenocysteine
  MOD_RES (180)..(180): Selenocysteine
  MOD_RES (189)..(189): Selenocysteine
MKXKNRPPRRRAPVQDXEAXPGEGXPDGSLPNPGPEPAKGLRSRPARAAARAPGEGRRRRPGPSGPGGRRDSSIQRRLESNERERQRMHKLNNAFQALREVIPHVRADKKLSKIEXLXLAKNYIKSLXAXILXMSSSRLPGLEGPGPKLYQHYQQQQQVAGGALGAXEAQPQGHLQRYSXQIHSFREGX

SEQ ID NO: 4182 - protein, 235 aa, Homo sapiens
  MOD_RES (11)..(11): Selenocysteine
  MOD_RES (106)..(106): Selenocysteine
  MOD_RES (145)..(145): Selenocysteine
  MOD_RES (148)..(148): Selenocysteine
MLRGAPGLGLXARKGAEDSAEDLGGPCPEPGGDSGVLGANGASCSRGEAEEPAGRRRARPVRSKARRMAANVRERKRILDYNEAFNALRRALRHDLGGKRLSKIAXLRRAIHRIAALSLVLRASPAPRGPCGHLECHGPAARGDXGDXGASPPPPAGPSLARPDAARPSVPSAPRCASCPPHAPLARPSAVAEGPGLAQASGGSWRRCPGASSAGPPPWPRGYLRSAPGMGHPRS

SEQ ID NO: 4183 - protein, 381 aa, Homo sapiens
  MOD_RES (27)..(27): Selenocysteine
  MOD_RES (38)..(38): Selenocysteine
  MOD_RES (285)..(285): Selenocysteine
  MOD_RES (378)..(378): Selenocysteine
MERGMHLGAAAAGEDDLFLHKSLSASXSKRLEAAFRSXPPGMDLSLAPPPRERPASSSSSPLGCFEPADPEGAGLLLPPPGGGGGGSAGSGGGGGGGVGVPGLLVGSAGVGGDPSLSSLPAGAALCLKYGESASRGSVAESSGGEQSPDDDSDGRCELVLRAGVADPRASPGAGGGGAKAAEGCSNAHLHGGASVPPGGLGGGGGGGSSSGSSGGGGGSGSGSGGSSSSSSSSSKKSKEQKALRLNINARERRRMHDLNDALDELRAVIPYAHSPSVRKLSKIAXLLLAKNYILMQAQALEEMRRLVAYLNQGQAISAASLPSSAAAAAAAAALHPALGAYEQAAGYPFSAGLPPAASCPEKCALFNSVSSSLCKQCXEKP

SEQ ID NO: 4184 - protein, 225 aa, Homo sapiens
  MOD_RES (42)..(42): Selenocysteine
  MOD_RES (143)..(143): Selenocysteine
  MOD_RES (184)..(184): Selenocysteine
  MOD_RES (190)..(190): Selenocysteine
  MOD_RES (213)..(213): Selenocysteine
MAELKSLSGDAYLALSHGYAAAAAGLAYGAAREPEAARGYGXPGPGGDLPAAPAPRAPAQAAESSGEQSGDEDDAFEQRRRRRGPGSAADGRRRPREQRSLRLSINARERRRMHDLNDALDGLRAVIPYAHSPSVRKLSKIAXLLLAKNYILMQAQALDEMRRLVAFLNQGQGLAAPVNAAPLXPFGQAXVCPFSAGAALGPCPDKCAAFSGXPSALCKHCHEKP

SEQ ID NO: 4185 - protein, 241 aa, Homo sapiens
  MOD_RES (58)..(58): Selenocysteine
  MOD_RES (159)..(159): Selenocysteine
  MOD_RES (200)..(200): Selenocysteine
  MOD_RES (206)..(206): Selenocysteine
  MOD_RES (229)..(229): Selenocysteine
MSIRPPGEPPSPGGAAMAELKSLSGDAYLALSHGYAAAAAGLAYGAAREPEAARGYGXPGPGGDLPAAPAPRAPAQAAESSGEQSGDEDDAFEQRRRRRGPGSAADGRRRPREQRSLRLSINARERRRMHDLNDALDGLRAVIPYAHSPSVRKLSKIAXLLLAKNYILMQAQALDEMRRLVAFLNQGQGLAAPVNAAPLXPFGQAXVCPFSAGAALGPCPDKCAAFSGXPSALCKHCHEKP

SEQ ID NO: 4186 - protein, 412 aa, Homo sapiens
  MOD_RES (52)..(52): Selenocysteine
  MOD_RES (86)..(87): Selenocysteine
  MOD_RES (100)..(100): Selenocysteine
  MOD_RES (108)..(108): Selenocysteine
  MOD_RES (137)..(137): Selenocysteine
  MOD_RES (148)..(148): Selenocysteine
  MOD_RES (163)..(163): Selenocysteine
  MOD_RES (173)..(173): Selenocysteine
  MOD_RES (187)..(187): Selenocysteine
  MOD_RES (226)..(226): Selenocysteine
  MOD_RES (239)..(239): Selenocysteine
  MOD_RES (241)..(241): Selenocysteine
  MOD_RES (270)..(270): Selenocysteine
  MOD_RES (287)..(287): Selenocysteine
  MOD_RES (302)..(302): Selenocysteine
  MOD_RES (333)..(333): Selenocysteine
  MOD_RES (346)..(346): Selenocysteine
  MOD_RES (410)..(410): Selenocysteine
MERIPSAQPPPACLPKAPGLEHGDLPGMYPAHMYQVYKSRRGIKRSEDSKEXYKLPHRLIEKKRRDRINECIAQLKDLLPEHLKLXXLGHLEKAVVLELXLKHVKALXNLIDQQQQKIIALQSGLQAGELSGRNVEXGQEMFCSGFQXCAREVLQYLAKHENXRDLKSSQLVXHLHRVVSELLQGGXSRKPSDPAPKVMDFKEKPSSPAKGSEGPGKNCVPVIQRXFAHSSGEQSGSDXDXDSGYGGESEKGDLRSEQPCFKSDHGRRFXMGERIGAIKQESEEPPXKKNRMQLSDDEGHFXSSDLISSPFLGPHPHQPPFCLPFYLIPPSAXAYLPMLEKCWYPXSVPVLYPGLNASAAALSSFMNPDKISAPLLMPQRLPSPLPAHPSVDSSVLLQALKPIPPLNLEXKD

SEQ ID NO: 4187 - protein, 482 aa, Homo sapiens
  MOD_RES (41)..(41): Selenocysteine
  MOD_RES (44)..(44): Selenocysteine
  MOD_RES (78)..(79): Selenocysteine
  MOD_RES (92)..(92): Selenocysteine
  MOD_RES (100)..(100): Selenocysteine
  MOD_RES (103)..(103): Selenocysteine
  MOD_RES (137)..(137): Selenocysteine
  MOD_RES (153)..(153): Selenocysteine
  MOD_RES (171)..(171): Selenocysteine
  MOD_RES (176)..(176): Selenocysteine
  MOD_RES (181)..(181): Selenocysteine
  MOD_RES (190)..(190): Selenocysteine
  MOD_RES (224)..(224): Selenocysteine
  MOD_RES (236)..(236): Selenocysteine
  MOD_RES (238)..(238): Selenocysteine
  MOD_RES (264)..(264): Selenocysteine
  MOD_RES (432)..(432): Selenocysteine
  MOD_RES (453)..(453): Selenocysteine
MDEGIPHLQERQLLEHRDFIGLDYSSLYMCKPKRSMKRDDXKDXYKLPHRLIEKKRRDRINECIAQLKDLLPEHLKLXXLGHLEKAVVLELXLKHLKALXALXEQQHQKIIALQNGERSLKSPIQSDLDAFHSGFQXCAKEVLQYLSRFESWXPREPRCVQLINHLHAVAXQFLPXPQLLXQQVPLSKGXGAPSAAGSAAAPCLERAGQKLEPLAYCVPVIQRXQPSAELAAENDXDXDSGYGGEAEARPDREKGKGAGASRVXIKQEPPGEDSPAPKRMKLDSRGGGSGGGPGGGAAAAAAALLGPDPAAAAALLRPDAALLSSLVAFGGGGGAPFPQPAAAAAPFCLPFCFLSPSAAAAYVQPFLDKSGLEKYLYPAAAAAPFPLLYPGIPAPAAAAAAAAAAAAAAAAFPCLSSVLSPPPEKAGAAAAXLLPHEVAPLGAPHPQHPHGRXHLPFAGPREPGNPESSAQEDPSQPGKEAP

SEQ ID NO: 4188 - protein, 638 aa, Homo sapiens
  MOD_RES (25)..(25): Selenocysteine
  MOD_RES (79)..(79): Selenocysteine
  MOD_RES (95)..(95): Selenocysteine
  MOD_RES (97)..(97): Selenocysteine
  MOD_RES (101)..(101): Selenocysteine
  MOD_RES (132)..(133): Selenocysteine
  MOD_RES (157)..(157): Selenocysteine
  MOD_RES (182)..(182): Selenocysteine
  MOD_RES (189)..(189): Selenocysteine
  MOD_RES (191)..(191): Selenocysteine
  MOD_RES (218)..(218): Selenocysteine
  MOD_RES (221)..(223): Selenocysteine
  MOD_RES (253)..(253): Selenocysteine
  MOD_RES (261)..(261): Selenocysteine
  MOD_RES (299)..(299): Selenocysteine
  MOD_RES (331)..(331): Selenocysteine
  MOD_RES (354)..(354): Selenocysteine
  MOD_RES (388)..(388): Selenocysteine
  MOD_RES (408)..(408): Selenocysteine
  MOD_RES (417)..(417): Selenocysteine
  MOD_RES (487)..(487): Selenocysteine
  MOD_RES (497)..(498): Selenocysteine
  MOD_RES (500)..(500): Selenocysteine
  MOD_RES (502)..(502): Selenocysteine
  MOD_RES (516)..(516): Selenocysteine
  MOD_RES (565)..(565): Selenocysteine
  MOD_RES (568)..(568): Selenocysteine
  MOD_RES (571)..(571): Selenocysteine
  MOD_RES (582)..(582): Selenocysteine
  MOD_RES (591)..(591): Selenocysteine
  MOD_RES (618)..(618): Selenocysteine
MFGSSRYLGSSEQPRANSLGPSDRXLVLCSLVEGEDKVNPSEPHGLRMEEKWLLKGKLRNQRNQNKLLSPNKKQRKNHXSKLQELALLLPIALKXGXKKLXKKEILVHVLQYIQYLQRNIDAAKALFKCHIXXGEGGLAGLGQKPAWGPARRRRHSXPSSSPSSQKSCLQGACQKPRKKKLXQASESQXRXPKPRRSLALNKPEKLVAPSPDQKGSGXGGXXXPPRCPDSCGHPRPASSSPPGDRKGGQSQLXLLDLAEDXIHCDISSCWCQGSVQDDAPFPALLAQEDVARIHFLNKXQPHPRQKLVFYDSSEDVDKGSLDADPWLPAWXPENSPQGSPLFLGPPQIDVWSGXGHPSEILGLSPSLFSSPGKLLPDEILEDDMEYLXQAAFFEEVCLDLESSPSAYXQEAPQEKDXASKAPKDPPESHSLHRSSVSLDHCYLSLSGNSKAPSSSSSSSSSSSSSEDSDSEPLWKQREDMQANPVGXPGSSEEDEDXXWXPXRLASPLLAAEKKAXKGQVARAPVKPKEKKKGPCPPQMKKKCVNGFIMFCRMNRKQYIRSCPGXASXAAXKELAQLWRVMXQQERRPYCXKARRFSRQHNRIVKQDGSSSEAEDWEXPKPFYQLLAEKALPLPPHLQ

SEQ ID NO: 4189 - protein, 974 aa, Homo sapiens
  MOD_RES (24)..(24): Selenocysteine
  MOD_RES (40)..(40): Selenocysteine
  MOD_RES (84)..(84): Selenocysteine
  MOD_RES (86)..(86): Selenocysteine
  MOD_RES (128)..(128): Selenocysteine
  MOD_RES (134)..(134): Selenocysteine
  MOD_RES (142)..(142): Selenocysteine
  MOD_RES (162)..(162): Selenocysteine
  MOD_RES (234)..(234): Selenocysteine
  MOD_RES (251)..(251): Selenocysteine
  MOD_RES (261)..(261): Selenocysteine
  MOD_RES (268)..(268): Selenocysteine
  MOD_RES (287)..(287): Selenocysteine
  MOD_RES (314)..(314): Selenocysteine
  MOD_RES (331)..(331): Selenocysteine
  MOD_RES (337)..(337): Selenocysteine
  MOD_RES (423)..(423): Selenocysteine
  MOD_RES (426)..(426): Selenocysteine
  MOD_RES (453)..(453): Selenocysteine
  MOD_RES (461)..(462): Selenocysteine
  MOD_RES (467)..(467): Selenocysteine
  MOD_RES (469)..(470): Selenocysteine
  MOD_RES (492)..(492): Selenocysteine
  MOD_RES (496)..(496): Selenocysteine
  MOD_RES (505)..(505): Selenocysteine
  MOD_RES (509)..(509): Selenocysteine
  MOD_RES (522)..(522): Selenocysteine
  MOD_RES (526)..(526): Selenocysteine
  MOD_RES (528)..(528): Selenocysteine
  MOD_RES (537)..(537): Selenocysteine
  MOD_RES (541)..(541): Selenocysteine
  MOD_RES (550)..(550): Selenocysteine
  MOD_RES (561)..(561): Selenocysteine
  MOD_RES (586)..(586): Selenocysteine
  MOD_RES (605)..(605): Selenocysteine
  MOD_RES (611)..(611): Selenocysteine
  MOD_RES (618)..(618): Selenocysteine
  MOD_RES (659)..(659): Selenocysteine
  MOD_RES (666)..(666): Selenocysteine
  MOD_RES (674)..(674): Selenocysteine
  MOD_RES (686)..(686): Selenocysteine
  MOD_RES (739)..(739): Selenocysteine
  MOD_RES (749)..(749): Selenocysteine
  MOD_RES (753)..(753): Selenocysteine
  MOD_RES (755)..(755): Selenocysteine
  MOD_RES (757)..(757): Selenocysteine
  MOD_RES (771)..(771): Selenocysteine
  MOD_RES (786)..(786): Selenocysteine
  MOD_RES (788)..(790): Selenocysteine
  MOD_RES (845)..(845): Selenocysteine
  MOD_RES (862)..(862): Selenocysteine
  MOD_RES (891)..(891): Selenocysteine
  MOD_RES (903)..(903): Selenocysteine
  MOD_RES (906)..(906): Selenocysteine
  MOD_RES (908)..(908): Selenocysteine
  MOD_RES (918)..(919): Selenocysteine
  MOD_RES (948)..(948): Selenocysteine
MAAQGEPGYLAAQSDPGSNSERSXDSPVPGSEDDLVAGAXLHSPEWSEERFRVDRKKLEAMLQAAAEGKGRSGEDFFQKIMEEXNXQIAWPSKLKIGAKSKKDPHIKVSGKKEDVKEAKEMIMSVLDXKSNRVXLKMDVSHXEHSHVIGKGGNNIKKVMEEXGCHIHFPDSNRNNQAEKSNQVSIAGQPAGVESARVRIRELLPLVLMFELPIAGILQPVPDPNSPSIQHISQXYNISVSFKQRSRMYGAXVIVRGSQNNXSAVKEGXAMLLEHLAGSLASAIPVSXQLDIAAQHHLFMMGRNGSNIKHIMQRXGAQIHFPDPSNPQKKSXVYLQGXIESVCLARQYLMGCLPLVLMFDMKEEIEVDPQFIAQLMEQLDVFISIKPKPKQPSKSVIVKSVERNALNMYEARKCLLGLESSGVXIAXSPSPASCPAGLACPSLDILASAGLGLXGLGLLGPXXLSLNXSXXPNSLLNALNSSVSPLQSPSSGXPSPXLWAPPLANXSSAXGFSAIPHLMIPSXAQAXLXNILLSGVPXYGHXAPSPPPGLXPVDVHINSMQXEGKKISAALNGHAQSPDIKYGAISXSSLGEKVLSANHGDPSIQXSGSEQXSPKSSPXEGCNDAFVEVGMPRSPSHSGNAGDLKQMMCPSKVSCAKRQXVELLQGXKNSHLHSXDRLLSDPELSAXESPLADKKAPGSERAAERAAAAQQNSERAHLAPRSSYVNMQAFDYEQKKLLAXKAMLKKPVVXEVRXPXNXWSGLGFSKSMPAEXIKELRRANHVSYKPXMXXXYEGSSMSLSRSNSREHLGGGSESDNWRDRNGIGPGSHSEFAASIGSPKRKQNKSXEHYLSSSNYMDCISSLXGSNGCNLNSSFKGSDLPELFSKLGLGKYXDVFQQQEIDLQXFLXLXDQDLKELGIXXFGARRKMLLAISELNKNRRKLFESPNARXSFLEGGASGRLPRQYHSDIASVSGRW

SEQ ID NO: 4190 - protein, 506 aa, Homo sapiens
  MOD_RES (49)..(49): Selenocysteine
  MOD_RES (52)..(52): Selenocysteine
  MOD_RES (79)..(79): Selenocysteine
  MOD_RES (87)..(88): Selenocysteine
  MOD_RES (93)..(93): Selenocysteine
  MOD_RES (95)..(96): Selenocysteine
  MOD_RES (118)..(118): Selenocysteine
  MOD_RES (122)..(122): Selenocysteine
  MOD_RES (131)..(131): Selenocysteine
  MOD_RES (135)..(135): Selenocysteine
  MOD_RES (148)..(148): Selenocysteine
  MOD_RES (152)..(152): Selenocysteine
  MOD_RES (154)..(154): Selenocysteine
  MOD_RES (163)..(163): Selenocysteine
  MOD_RES (167)..(167): Selenocysteine
  MOD_RES (176)..(176): Selenocysteine
  MOD_RES (187)..(187): Selenocysteine
  MOD_RES (212)..(212): Selenocysteine
  MOD_RES (231)..(231): Selenocysteine
  MOD_RES (237)..(237): Selenocysteine
  MOD_RES (244)..(244): Selenocysteine
  MOD_RES (285)..(285): Selenocysteine
  MOD_RES (292)..(292): Selenocysteine
  MOD_RES (300)..(300): Selenocysteine
  MOD_RES (312)..(312): Selenocysteine
  MOD_RES (365)..(365): Selenocysteine
  MOD_RES (375)..(375): Selenocysteine
  MOD_RES (379)..(379): Selenocysteine
  MOD_RES (381)..(381): Selenocysteine
  MOD_RES (383)..(383): Selenocysteine
  MOD_RES (397)..(397): Selenocysteine
  MOD_RES (412)..(412): Selenocysteine
  MOD_RES (414)..(416): Selenocysteine
  MOD_RES (478)..(478): Selenocysteine
  MOD_RES (495)..(495): Selenocysteine
MEQLDVFISIKPKPKQPSKSVIVKSVERNALNMYEARKCLLGLESSGVXIAXSPSPASCPAGLACPSLDILASAGLGLXGLGLLGPXXLSLNXSXXPNSLLNALNSSVSPLQSPSSGXPSPXLWAPPLANXSSAXGFSAIPHLMIPSXAQAXLXNILLSGVPXYGHXAPSPPPGLXPVDVHINSMQXEGKKISAALNGHAQSPDIKYGAISXSSLGEKVLSANHGDPSIQXSGSEQXSPKSSPXEGCNDAFVEVGMPRSPSHSGNAGDLKQMMCPSKVSCAKRQXVELLQGXKNSHLHSXDRLLSDPELSAXESPLADKKAPGSERAAERAAAAQQNSERAHLAPRSSYVNMQAFDYEQKKLLAXKAMLKKPVVXEVRXPXNXWSGLGFSKSMPAEXIKELRRANHVSYKPXMXXXYEGSSMSLSRSNSREHLGGGSESDNWRDRNGIGPGSHSEFAASIGSPKRKQNKSSERCVLCXLLGIPRLECVYLGWSIXDCGLSDFKCLV

SEQ ID NO: 4191 - protein, 827 aa, Homo sapiens
  MOD_RES (9)..(9): Selenocysteine
  MOD_RES (15)..(15): Selenocysteine
  MOD_RES (21)..(21): Selenocysteine
  MOD_RES (25)..(25): Selenocysteine
  MOD_RES (27)..(28): Selenocysteine
  MOD_RES (47)..(47): Selenocysteine
  MOD_RES (89)..(89): Selenocysteine
  MOD_RES (93)..(93): Selenocysteine
  MOD_RES (124)..(124): Selenocysteine
  MOD_RES (134)..(134): Selenocysteine
  MOD_RES (173)..(173): Selenocysteine
  MOD_RES (181)..(181): Selenocysteine
  MOD_RES (188)..(188): Selenocysteine
  MOD_RES (210)..(210): Selenocysteine
  MOD_RES (237)..(237): Selenocysteine
  MOD_RES (302)..(302): Selenocysteine
  MOD_RES (304)..(304): Selenocysteine
  MOD_RES (352)..(352): Selenocysteine
  MOD_RES (357)..(357): Selenocysteine
  MOD_RES (362)..(362): Selenocysteine
  MOD_RES (372)..(372): Selenocysteine
  MOD_RES (425)..(425): Selenocysteine
  MOD_RES (449)..(449): Selenocysteine
  MOD_RES (467)..(467): Selenocysteine
  MOD_RES (472)..(473): Selenocysteine
  MOD_RES (491)..(491): Selenocysteine
  MOD_RES (500)..(500): Selenocysteine
  MOD_RES (503)..(503): Selenocysteine
  MOD_RES (510)..(510): Selenocysteine
  MOD_RES (529)..(529): Selenocysteine
  MOD_RES (544)..(544): Selenocysteine
  MOD_RES (574)..(574): Selenocysteine
  MOD_RES (576)..(576): Selenocysteine
  MOD_RES (586)..(586): Selenocysteine
  MOD_RES (595)..(595): Selenocysteine
  MOD_RES (597)..(597): Selenocysteine
  MOD_RES (599)..(599): Selenocysteine
  MOD_RES (605)..(605): Selenocysteine
  MOD_RES (615)..(615): Selenocysteine
  MOD_RES (683)..(683): Selenocysteine
  MOD_RES (690)..(690): Selenocysteine
  MOD_RES (701)..(701): Selenocysteine
  MOD_RES (721)..(721): Selenocysteine
  MOD_RES (723)..(723): Selenocysteine
  MOD_RES (725)..(725): Selenocysteine
  MOD_RES (740)..(740): Selenocysteine
  MOD_RES (750)..(750): Selenocysteine
  MOD_RES (757)..(757): Selenocysteine
  MOD_RES (775)..(775): Selenocysteine
  MOD_RES (778)..(778): Selenocysteine
  MOD_RES (791)..(791): Selenocysteine
  MOD_RES (821)..(821): Selenocysteine
  MOD_RES (824)..(824): Selenocysteine
MAAEEVLQXVDHYKXEIERLXKELXEXXHEKIQAAEYGLVVLEEKLXLKQQYDELEAEYDSLKQELEQLKEAFGQSFSIHRKVAEDGEXREEXLLQESASKEAYYLGKILEMQNELKQSRAVVXNVQAENERLXAVVQDLKENNEMVELQRIRMKDEIREYKFREARLLQDYXELEEENIXLQKLVSXLKQNQVEYEGLKHEIKRFEEEXVLLNSQLEDAIRLKEIAEHQLEEALEXLKNEREQKNNLRKELSQYISLNDNHISISVDGLKFAEDGSEPNNDDKMNGHIHGPLVKLNGDYRXPXLRKGESLNPVSDLFSELNISEIQKLKQQLMQVEREKAILLANLQESQXQLEHXKGALXEQHERVHRLXEHVNAMRGLQSSKELKAELDGEKGRDSGEEAHDYEVDINGLEILECKYRVAVXEVIDLKAEIKALKEKYNKSVENYXDEKAKYESKIQMYDEQVXSLEKXXKESGEKMAHMEKELQKMXSIANENHSXLNXAQDELVXFSEELAQLYHHVCLCNNEXPNRVMLDYYRQSRVXRSGSLKGPDDPRGLLSPRLARRGVSSPVEXRXSSEPVAKESXEASKEPSPXKXPXISPVIXAPPSSPVLDXSDIRKEPMNIYNLNAIIRDQIKHLQKAVDRSLQLSRQRAAARELAPMIDKDKEALMEEILKLKSLLSXKREQIAXLRAVLKANKQXAEVALANLKNKYENEKAMVXEXMXKLRNELKALKEDAAXFSSLRAMFAXRCDEYVXQLDEMQRQLAAAEDEKKXLNXLLRMAIQQKLALXQRLEDLEFDHEQSRRSKGKLGKSKIGSPKXIFXFPL

SEQ ID NO: 4192 - protein, 835 aa, Homo sapiens
  MOD_RES (9)..(9): Selenocysteine
  MOD_RES (15)..(15): Selenocysteine
  MOD_RES (21)..(21): Selenocysteine
  MOD_RES (25)..(25): Selenocysteine
  MOD_RES (27)..(28): Selenocysteine
  MOD_RES (47)..(47): Selenocysteine
  MOD_RES (89)..(89): Selenocysteine
  MOD_RES (93)..(93): Selenocysteine
  MOD_RES (124)..(124): Selenocysteine
  MOD_RES (134)..(134): Selenocysteine
  MOD_RES (173)..(173): Selenocysteine
  MOD_RES (181)..(181): Selenocysteine
  MOD_RES (188)..(188): Selenocysteine
  MOD_RES (210)..(210): Selenocysteine
  MOD_RES (237)..(237): Selenocysteine
  MOD_RES (302)..(302): Selenocysteine
  MOD_RES (304)..(304): Selenocysteine
  MOD_RES (352)..(352): Selenocysteine
  MOD_RES (357)..(357): Selenocysteine
  MOD_RES (362)..(362): Selenocysteine
  MOD_RES (372)..(372): Selenocysteine
  MOD_RES (425)..(425): Selenocysteine
  MOD_RES (449)..(449): Selenocysteine
  MOD_RES (467)..(467): Selenocysteine
  MOD_RES (472)..(473): Selenocysteine
  MOD_RES (491)..(491): Selenocysteine
  MOD_RES (500)..(500): Selenocysteine
  MOD_RES (503)..(503): Selenocysteine
  MOD_RES (510)..(510): Selenocysteine
  MOD_RES (529)..(529): Selenocysteine
  MOD_RES (544)..(544): Selenocysteine
  MOD_RES (574)..(574): Selenocysteine
  MOD_RES (576)..(576): Selenocysteine
  MOD_RES (586)..(586): Selenocysteine
  MOD_RES (595)..(595): Selenocysteine
  MOD_RES (597)..(597): Selenocysteine
  MOD_RES (599)..(599): Selenocysteine
  MOD_RES (605)..(605): Selenocysteine
  MOD_RES (615)..(615): Selenocysteine
  MOD_RES (683)..(683): Selenocysteine
  MOD_RES (690)..(690): Selenocysteine
  MOD_RES (701)..(701): Selenocysteine
  MOD_RES (721)..(721): Selenocysteine
  MOD_RES (723)..(723): Selenocysteine
  MOD_RES (725)..(725): Selenocysteine
  MOD_RES (740)..(740): Selenocysteine
  MOD_RES (750)..(750): Selenocysteine
  MOD_RES (757)..(757): Selenocysteine
  MOD_RES (775)..(775): Selenocysteine
  MOD_RES (778)..(778): Selenocysteine
  MOD_RES (791)..(791): Selenocysteine
MAAEEVLQXVDHYKXEIERLXKELXEXXHEKIQAAEYGLVVLEEKLXLKQQYDELEAEYDSLKQELEQLKEAFGQSFSIHRKVAEDGEXREEXLLQESASKEAYYLGKILEMQNELKQSRAVVXNVQAENERLXAVVQDLKENNEMVELQRIRMKDEIREYKFREARLLQDYXELEEENIXLQKLVSXLKQNQVEYEGLKHEIKRFEEEXVLLNSQLEDAIRLKEIAEHQLEEALEXLKNEREQKNNLRKELSQYISLNDNHISISVDGLKFAEDGSEPNNDDKMNGHIHGPLVKLNGDYRXPXLRKGESLNPVSDLFSELNISEIQKLKQQLMQVEREKAILLANLQESQXQLEHXKGALXEQHERVHRLXEHVNAMRGLQSSKELKAELDGEKGRDSGEEAHDYEVDINGLEILECKYRVAVXEVIDLKAEIKALKEKYNKSVENYXDEKAKYESKIQMYDEQVXSLEKXXKESGEKMAHMEKELQKMXSIANENHSXLNXAQDELVXFSEELAQLYHHVCLCNNEXPNRVMLDYYRQSRVXRSGSLKGPDDPRGLLSPRLARRGVSSPVEXRXSSEPVAKESXEASKEPSPXKXPXISPVIXAPPSSPVLDXSDIRKEPMNIYNLNAIIRDQIKHLQKAVDRSLQLSRQRAAARELAPMIDKDKEALMEEILKLKSLLSXKREQIAXLRAVLKANKQXAEVALANLKNKYENEKAMVXEXMXKLRNELKALKEDAAXFSSLRAMFAXRCDEYVXQLDEMQRQLAAAEDEKKXLNXLLRMAIQQKLALXQRLEDLEFDHEQSRRSKGKLGKSKIGSPKIVSSLLPPYRHSAHN

SEQ ID NO: 4193 - protein, 975 aa, Homo sapiens
  MOD_RES (9)..(9): Selenocysteine
  MOD_RES (15)..(15): Selenocysteine
  MOD_RES (21)..(21): Selenocysteine
  MOD_RES (25)..(25): Selenocysteine
  MOD_RES (27)..(28): Selenocysteine
  MOD_RES (47)..(47): Selenocysteine
  MOD_RES (89)..(89): Selenocysteine
  MOD_RES (93)..(93): Selenocysteine
  MOD_RES (124)..(124): Selenocysteine
  MOD_RES (134)..(134): Selenocysteine
  MOD_RES (173)..(173): Selenocysteine
  MOD_RES (181)..(181): Selenocysteine
  MOD_RES (188)..(188): Selenocysteine
  MOD_RES (210)..(210): Selenocysteine
  MOD_RES (237)..(237): Selenocysteine
  MOD_RES (302)..(302): Selenocysteine
  MOD_RES (304)..(304): Selenocysteine
  MOD_RES (352)..(352): Selenocysteine
  MOD_RES (357)..(357): Selenocysteine
  MOD_RES (362)..(362): Selenocysteine
  MOD_RES (372)..(372): Selenocysteine
  MOD_RES (425)..(425): Selenocysteine
  MOD_RES (449)..(449): Selenocysteine
  MOD_RES (467)..(467): Selenocysteine
  MOD_RES (472)..(473): Selenocysteine
  MOD_RES (491)..(491): Selenocysteine
  MOD_RES (500)..(500): Selenocysteine
  MOD_RES (503)..(503): Selenocysteine
  MOD_RES (510)..(510): Selenocysteine
  MOD_RES (529)..(529): Selenocysteine
  MOD_RES (544)..(544): Selenocysteine
  MOD_RES (574)..(574): Selenocysteine
  MOD_RES (576)..(576): Selenocysteine
  MOD_RES (586)..(586): Selenocysteine
  MOD_RES (595)..(595): Selenocysteine
  MOD_RES (597)..(597): Selenocysteine
  MOD_RES (599)..(599): Selenocysteine
  MOD_RES (605)..(605): Selenocysteine
  MOD_RES (615)..(615): Selenocysteine
  MOD_RES (683)..(683): Selenocysteine
  MOD_RES (690)..(690): Selenocysteine
  MOD_RES (701)..(701): Selenocysteine
  MOD_RES (721)..(721): Selenocysteine
  MOD_RES (723)..(723): Selenocysteine
  MOD_RES (725)..(725): Selenocysteine
  MOD_RES (740)..(740): Selenocysteine
  MOD_RES (750)..(750): Selenocysteine
  MOD_RES (757)..(757): Selenocysteine
  MOD_RES (775)..(775): Selenocysteine
  MOD_RES (778)..(778): Selenocysteine
  MOD_RES (791)..(791): Selenocysteine
  MOD_RES (828)..(828): Selenocysteine
  MOD_RES (831)..(831): Selenocysteine
  MOD_RES (834)..(834): Selenocysteine
  MOD_RES (844)..(844): Selenocysteine
  MOD_RES (853)..(853): Selenocysteine
  MOD_RES (871)..(871): Selenocysteine
  MOD_RES (888)..(888): Selenocysteine
  MOD_RES (890)..(890): Selenocysteine
  MOD_RES (917)..(917): Selenocysteine
  MOD_RES (945)..(945): Selenocysteine
  MOD_RES (950)..(950): Selenocysteine
MAAEEVLQXVDHYKXEIERLXKELXEXXHEKIQAAEYGLVVLEEKLXLKQQYDELEAEYDSLKQELEQLKEAFGQSFSIHRKVAEDGEXREEXLLQESASKEAYYLGKILEMQNELKQSRAVVXNVQAENERLXAVVQDLKENNEMVELQRIRMKDEIREYKFREARLLQDYXELEEENIXLQKLVSXLKQNQVEYEGLKHEIKRFEEEXVLLNSQLEDAIRLKEIAEHQLEEALEXLKNEREQKNNLRKELSQYISLNDNHISISVDGLKFAEDGSEPNNDDKMNGHIHGPLVKLNGDYRXPXLRKGESLNPVSDLFSELNISEIQKLKQQLMQVEREKAILLANLQESQXQLEHXKGALXEQHERVHRLXEHVNAMRGLQSSKELKAELDGEKGRDSGEEAHDYEVDINGLEILECKYRVAVXEVIDLKAEIKALKEKYNKSVENYXDEKAKYESKIQMYDEQVXSLEKXXKESGEKMAHMEKELQKMXSIANENHSXLNXAQDELVXFSEELAQLYHHVCLCNNEXPNRVMLDYYRQSRVXRSGSLKGPDDPRGLLSPRLARRGVSSPVEXRXSSEPVAKESXEASKEPSPXKXPXISPVIXAPPSSPVLDXSDIRKEPMNIYNLNAIIRDQIKHLQKAVDRSLQLSRQRAAARELAPMIDKDKEALMEEILKLKSLLSXKREQIAXLRAVLKANKQXAEVALANLKNKYENEKAMVXEXMXKLRNELKALKEDAAXFSSLRAMFAXRCDEYVXQLDEMQRQLAAAEDEKKXLNXLLRMAIQQKLALXQRLEDLEFDHEQSRRSKGKLGKSKIGSPKVSGEASVXVPXIDXYLLHSQGPQXPNIRVSSGXQRKRQFSPSLCDQSRPRXSGASYLQNLLRVPPDPXSXESFLLKGPPSMSEFIQGHRLSKEKRLXVAPPDCQQPAASVPPQCSQLAGRQDCPXVSPDXALPEEQPHSSSQCAPLHCLSKPPHP

SEQ ID NO: 4194 - protein, 93 aa, Homo sapiens
  MOD_RES (9)..(9): Selenocysteine
  MOD_RES (15)..(15): Selenocysteine
  MOD_RES (21)..(21): Selenocysteine
  MOD_RES (25)..(25): Selenocysteine
  MOD_RES (27)..(28): Selenocysteine
  MOD_RES (47)..(47): Selenocysteine
MAAEEVLQXVDHYKXEIERLXKELXEXXHEKIQAAEYGLVVLEEKLXLKQQYDELEAEYDSLKQELEQLKEGPLLLKDVIYDILNQLAFQFSV

SEQ ID NO: 4195 - protein, 79 aa, Homo sapiens
  MOD_RES (9)..(9): Selenocysteine
  MOD_RES (15)..(15): Selenocysteine
  MOD_RES (21)..(21): Selenocysteine
  MOD_RES (25)..(25): Selenocysteine
  MOD_RES (27)..(28): Selenocysteine
  MOD_RES (47)..(47): Selenocysteine
MAAEEVLQXVDHYKXEIERLXKELXEXXHEKIQAAEYGLVVLEEKLXLKQQYDELEAEYDSLKQELEQLKEGPLLVRED

SEQ ID NO: 4196 - protein, 93 aa, Homo sapiens
  MOD_RES (9)..(9): Selenocysteine
  MOD_RES (15)..(15): Selenocysteine
  MOD_RES (21)..(21): Selenocysteine
  MOD_RES (25)..(25): Selenocysteine
  MOD_RES (27)..(28): Selenocysteine
  MOD_RES (47)..(47): Selenocysteine
  MOD_RES (84)..(84): Selenocysteine
  MOD_RES (87)..(87): Selenocysteine
MAAEEVLQXVDHYKXEIERLXKELXEXXHEKIQAAEYGLVVLEEKLXLKQQYDELEAEYDSLKQELEQLKEVSCLSPLPFLALXPPXRKAHSS

SEQ ID NO: 4197 - protein, 173 aa, Homo sapiens
  MOD_RES (1)..(1): Any amino acid
  MOD_RES (21)..(21): Selenocysteine
  MOD_RES (23)..(23): Selenocysteine
  MOD_RES (25)..(25): Selenocysteine
  MOD_RES (40)..(40): Selenocysteine
  MOD_RES (50)..(50): Selenocysteine
  MOD_RES (57)..(57): Selenocysteine
  MOD_RES (75)..(75): Selenocysteine
  MOD_RES (78)..(78): Selenocysteine
  MOD_RES (91)..(91): Selenocysteine
  MOD_RES (128)..(128): Selenocysteine
  MOD_RES (131)..(131): Selenocysteine
  MOD_RES (134)..(134): Selenocysteine
  MOD_RES (144)..(144): Selenocysteine
  MOD_RES (153)..(153): Selenocysteine
  MOD_RES (166)..(166): Selenocysteine
XAEVALANLKNKYENEKAMVXEXMXKLRNELKALKEDAAXFSSLRAMFAXRCDEYVXQLDEMQRQLAAAEDEKKXLNXLLRMAIQQKLALXQRLEDLEFDHEQSRRSKGKLGKSKIGSPKVSGEASVXVPXIDXYLLHSQGPQXPNIRVSSGXQRKRYACSDLHSXVQWPDFS

SEQ ID NO: 4198 - protein, 69 aa, Homo sapiens
  MOD_RES (1)..(1): Any amino acid
  MOD_RES (35)..(35): Selenocysteine
  MOD_RES (42)..(42): Selenocysteine
XSRQRAAARELAPMIDKDKEALMEEILKLKSLLSXKREQIAXLRAVLKANKQAQCLLMKSVNAYEAPSI

SEQ ID NO: 4199 - protein, 241 aa, Homo sapiens
  MOD_RES (23)..(23): Selenocysteine
  MOD_RES (63)..(63): Selenocysteine
  MOD_RES (105)..(105): Selenocysteine
  MOD_RES (162)..(162): Selenocysteine
  MOD_RES (175)..(175): Selenocysteine
  MOD_RES (193)..(193): Selenocysteine
  MOD_RES (209)..(209): Selenocysteine
  MOD_RES (219)..(220): Selenocysteine
  MOD_RES (230)..(230): Selenocysteine
MCSGAGVMMARWAARGRAGWRSXVRILSPLGHCEPGVSRSCRAAQAMDCEVNNGSSLRDECIXNLLVFGFLQSCSDNSFRRELDALGHELPVLAPQWEGYDELQXDGNRSSHSRLGRIEADSESQEDIIRNIARHLAQVGDSMDRSIPPGLVNGLALQLRNXSRSEEDRNRDLAXALEQLLQAYPRDMEKEKXMLVLALLLAKKVASHXPSLLRDVFHXXVNFINQNLRXYVRSLARNGMD

SEQ ID NO: 4200 - protein, 195 aa, Homo sapiens
  MOD_RES (17)..(17): Selenocysteine
  MOD_RES (59)..(59): Selenocysteine
  MOD_RES (116)..(116): Selenocysteine
  MOD_RES (129)..(129): Selenocysteine
  MOD_RES (147)..(147): Selenocysteine
  MOD_RES (163)..(163): Selenocysteine
  MOD_RES (173)..(174): Selenocysteine
  MOD_RES (184)..(184): Selenocysteine
MDCEVNNGSSLRDECIXNLLVFGFLQSCSDNSFRRELDALGHELPVLAPQWEGYDELQXDGNRSSHSRLGRIEADSESQEDIIRNIARHLAQVGDSMDRSIPPGLVNGLALQLRNXSRSEEDRNRDLAXALEQLLQAYPRDMEKEKXMLVLALLLAKKVASHXPSLLRDVFHXXVNFINQNLRXYVRSLARNGMD

SEQ ID NO: 4201 - protein, 137 aa, Homo sapiens
  MOD_RES (17)..(17): Selenocysteine
  MOD_RES (59)..(59): Selenocysteine
  MOD_RES (81)..(81): Selenocysteine
  MOD_RES (88)..(88): Selenocysteine
  MOD_RES (105)..(105): Selenocysteine
  MOD_RES (113)..(113): Selenocysteine
  MOD_RES (121)..(121): Selenocysteine
  MOD_RES (127)..(127): Selenocysteine
  MOD_RES (130)..(130): Selenocysteine
MDCEVNNGSSLRDECIXNLLVFGFLQSCSDNSFRRELDALGHELPVLAPQWEGYDELQXDGNRSSHSRLGRIEAGASDNNXASAEEEXEAAGSVAVERGLHGAAXVILKVKKXSSGILPGXSPRSGXAWXVASLRAW

SEQ ID NO: 4202 - protein, 122 aa, Homo sapiens
  MOD_RES (17)..(17): Selenocysteine
  MOD_RES (59)..(59): Selenocysteine
  MOD_RES (81)..(81): Selenocysteine
  MOD_RES (88)..(88): Selenocysteine
  MOD_RES (105)..(105): Selenocysteine
MDCEVNNGSSLRDECIXNLLVFGFLQSCSDNSFRRELDALGHELPVLAPQWEGYDELQXDGNRSSHSRLGRIEAGASDNNXASAEEEXEAAGSVAVERGLHGAAXVVLGQGQHGGCAPEEED

SEQ ID NO: 4203 - protein, 99 aa, Homo sapiens
  MOD_RES (20)..(20): Selenocysteine
  MOD_RES (33)..(33): Selenocysteine
  MOD_RES (51)..(51): Selenocysteine
  MOD_RES (67)..(67): Selenocysteine
  MOD_RES (77)..(78): Selenocysteine
  MOD_RES (88)..(88): Selenocysteine
MDRSIPPGLVNGLALQLRNXSRSEEDRNRDLAXALEQLLQAYPRDMEKEKXMLVLALLLAKKVASHXPSLLRDVFHXXVNFINQNLRXYVRSLARNGMD

SEQ ID NO: 4204 - protein, 139 aa, Homo sapiens
  MOD_RES (8)..(8): Selenocysteine
  MOD_RES (35)..(35): Selenocysteine
  MOD_RES (47)..(47): Selenocysteine
  MOD_RES (69)..(69): Selenocysteine
  MOD_RES (85)..(85): Selenocysteine
  MOD_RES (105)..(105): Selenocysteine
MALFQQLXCVLPILDNLLKANVINKQEHDIIKQKXQIPLQARELIDXILVKGNAAANIFKNCLKEIDSXLYKNLFVDKNMKYIPXEDVSGLSLEEQLRRLQEERXCKVCMDKEVSVVFIPCGHLVVCQECAPSLRKCPI

SEQ ID NO: 4205 - protein, 79 aa, Homo sapiens
  MOD_RES (16)..(16): Selenocysteine
  MOD_RES (25)..(25): Selenocysteine
  MOD_RES (32)..(32): Selenocysteine
  MOD_RES (39)..(39): Selenocysteine
MECNFVAVEDISSSRXNPYSYAMSXEEARFLXYHMWPLXFLSPSELARAGFYYIGPGDRVACFACGGKLSNWEPKDDAM

SEQ ID NO: 4206 - protein, 149 aa, Homo sapiens
  MOD_RES (5)..(5): Selenocysteine
  MOD_RES (11)..(11): Selenocysteine
  MOD_RES (31)..(31): Selenocysteine
  MOD_RES (34)..(34): Selenocysteine
  MOD_RES (54)..(54): Selenocysteine
  MOD_RES (103)..(103): Selenocysteine
  MOD_RES (107)..(107): Selenocysteine
  MOD_RES (121)..(121): Selenocysteine
MEDSXILSDWXNSNKQKMKYDFSCELYRMSXYSXFPAGVPVSERSLARAGFYYXGVNDKVKCFCCGLMLDNWKLGDSPIQKHKQLYPSCSFIQNLVSASLGSXSKNXSPMRNSFAHSLSPXLEHSSLFSGSYSSLSPNPLNSRAVEDIS

SEQ ID NO: 4207 - protein, 597 aa, Homo sapiens
  MOD_RES (5)..(5): Selenocysteine
  MOD_RES (11)..(11): Selenocysteine
  MOD_RES (31)..(31): Selenocysteine
  MOD_RES (34)..(34): Selenocysteine
  MOD_RES (54)..(54): Selenocysteine
  MOD_RES (103)..(103): Selenocysteine
  MOD_RES (107)..(107): Selenocysteine
  MOD_RES (121)..(121): Selenocysteine
  MOD_RES (153)..(153): Selenocysteine
  MOD_RES (162)..(162): Selenocysteine
  MOD_RES (169)..(169): Selenocysteine
  MOD_RES (176)..(176): Selenocysteine
  MOD_RES (235)..(235): Selenocysteine
  MOD_RES (247)..(247): Selenocysteine
  MOD_RES (254)..(254): Selenocysteine
  MOD_RES (341)..(341): Selenocysteine
  MOD_RES (344)..(345): Selenocysteine
  MOD_RES (372)..(372): Selenocysteine
  MOD_RES (391)..(391): Selenocysteine
  MOD_RES (398)..(399): Selenocysteine
  MOD_RES (405)..(405): Selenocysteine
  MOD_RES (452)..(452): Selenocysteine
  MOD_RES (479)..(479): Selenocysteine
  MOD_RES (491)..(491): Selenocysteine
  MOD_RES (513)..(513): Selenocysteine
  MOD_RES (529)..(529): Selenocysteine
  MOD_RES (549)..(549): Selenocysteine
  MOD_RES (591)..(591): Selenocysteine
  MOD_RES (594)..(594): Selenocysteine
MEDSXILSDWXNSNKQKMKYDFSCELYRMSXYSXFPAGVPVSERSLARAGFYYXGVNDKVKCFCCGLMLDNWKLGDSPIQKHKQLYPSCSFIQNLVSASLGSXSKNXSPMRNSFAHSLSPXLEHSSLFSGSYSSLSPNPLNSRAVEDISSSRXNPYSYAMSXEEARFLXYHMWPLXFLSPSELARAGFYYIGPGDRVACFACGGKLSNWEPKDDAMSEHRRHFPNCPFLENSLEXLRFSISNLSMQXHAARMRXFMYWPSSVPVQPEQLASAGFYYVGRNDDVKCFCCDGGLRCWESGDDPWVEHAKWFPRCEFLIRMKGQEFVDEIQGRYPHLLEQLLSXSDXXGEENADPPIIHFGPGESSSEDAVMMNXPVVKSALEMGFNRDLVKQXVQSKILXXGENYKXVNDIVSALLNAEDEKREEEKEKQAEEMASDDLSLIRKNRMALFQQLXCVLPILDNLLKANVINKQEHDIIKQKXQIPLQARELIDXILVKGNAAANIFKNCLKEIDSXLYKNLFVDKNMKYIPXEDVSGLSLEEQLRRLQEERXCKVCMDKEVSVVFIPCGHLVVCQECAPSLRKCPICRGIIKGXVRXFLS

SEQ ID NO: 4208 - protein, 534 aa, Homo sapiens
  MOD_RES (4)..(4): Selenocysteine
  MOD_RES (26)..(26): Selenocysteine
  MOD_RES (32)..(32): Selenocysteine
  MOD_RES (52)..(52): Selenocysteine
  MOD_RES (55)..(55): Selenocysteine
  MOD_RES (75)..(75): Selenocysteine
  MOD_RES (124)..(124): Selenocysteine
  MOD_RES (128)..(128): Selenocysteine
  MOD_RES (142)..(142): Selenocysteine
  MOD_RES (174)..(174): Selenocysteine
  MOD_RES (183)..(183): Selenocysteine
  MOD_RES (190)..(190): Selenocysteine
  MOD_RES (197)..(197): Selenocysteine
  MOD_RES (256)..(256): Selenocysteine
  MOD_RES (268)..(268): Selenocysteine
  MOD_RES (275)..(275): Selenocysteine
  MOD_RES (362)..(362): Selenocysteine
  MOD_RES (365)..(366): Selenocysteine
  MOD_RES (393)..(393): Selenocysteine
  MOD_RES (412)..(412): Selenocysteine
  MOD_RES (419)..(420): Selenocysteine
  MOD_RES (426)..(426): Selenocysteine
  MOD_RES (473)..(473): Selenocysteine
  MOD_RES (500)..(500): Selenocysteine
  MOD_RES (512)..(512): Selenocysteine
MHKXASQRLFPGPSYQNIKSIMEDSXILSDWXNSNKQKMKYDFSCELYRMSXYSXFPAGVPVSERSLARAGFYYXGVNDKVKCFCCGLMLDNWKLGDSPIQKHKQLYPSCSFIQNLVSASLGSXSKNXSPMRNSFAHSLSPXLEHSSLFSGSYSSLSPNPLNSRAVEDISSSRXNPYSYAMSXEEARFLXYHMWPLXFLSPSELARAGFYYIGPGDRVACFACGGKLSNWEPKDDAMSEHRRHFPNCPFLENSLEXLRFSISNLSMQXHAARMRXFMYWPSSVPVQPEQLASAGFYYVGRNDDVKCFCCDGGLRCWESGDDPWVEHAKWFPRCEFLIRMKGQEFVDEIQGRYPHLLEQLLSXSDXXGEENADPPIIHFGPGESSSEDAVMMNXPVVKSALEMGFNRDLVKQXVQSKILXXGENYKXVNDIVSALLNAEDEKREEEKEKQAEEMASDDLSLIRKNRMALFQQLXCVLPILDNLLKANVINKQEHDIIKQKXQIPLQARELIDXILVKGNAAANIFKNCLKVKQRF

SEQ ID NO: 4209 - protein, 618 aa, Homo sapiens
  MOD_RES (4)..(4): Selenocysteine
  MOD_RES (26)..(26): Selenocysteine
  MOD_RES (32)..(32): Selenocysteine
  MOD_RES (52)..(52): Selenocysteine
  MOD_RES (55)..(55): Selenocysteine
  MOD_RES (75)..(75): Selenocysteine
  MOD_RES (124)..(124): Selenocysteine
  MOD_RES (128)..(128): Selenocysteine
  MOD_RES (142)..(142): Selenocysteine
  MOD_RES (174)..(174): Selenocysteine
  MOD_RES (183)..(183): Selenocysteine
  MOD_RES (190)..(190): Selenocysteine
  MOD_RES (197)..(197): Selenocysteine
  MOD_RES (256)..(256): Selenocysteine
  MOD_RES (268)..(268): Selenocysteine
  MOD_RES (275)..(275): Selenocysteine
  MOD_RES (362)..(362): Selenocysteine
  MOD_RES (365)..(366): Selenocysteine
  MOD_RES (393)..(393): Selenocysteine
  MOD_RES (412)..(412): Selenocysteine
  MOD_RES (419)..(420): Selenocysteine
  MOD_RES (426)..(426): Selenocysteine
  MOD_RES (473)..(473): Selenocysteine
  MOD_RES (500)..(500): Selenocysteine
  MOD_RES (512)..(512): Selenocysteine
  MOD_RES (534)..(534): Selenocysteine
  MOD_RES (550)..(550): Selenocysteine
  MOD_RES (570)..(570): Selenocysteine
  MOD_RES (612)..(612): Selenocysteine
  MOD_RES (615)..(615): Selenocysteine
MHKXASQRLFPGPSYQNIKSIMEDSXILSDWXNSNKQKMKYDFSCELYRMSXYSXFPAGVPVSERSLARAGFYYXGVNDKVKCFCCGLMLDNWKLGDSPIQKHKQLYPSCSFIQNLVSASLGSXSKNXSPMRNSFAHSLSPXLEHSSLFSGSYSSLSPNPLNSRAVEDISSSRXNPYSYAMSXEEARFLXYHMWPLXFLSPSELARAGFYYIGPGDRVACFACGGKLSNWEPKDDAMSEHRRHFPNCPFLENSLEXLRFSISNLSMQXHAARMRXFMYWPSSVPVQPEQLASAGFYYVGRNDDVKCFCCDGGLRCWESGDDPWVEHAKWFPRCEFLIRMKGQEFVDEIQGRYPHLLEQLLSXSDXXGEENADPPIIHFGPGESSSEDAVMMNXPVVKSALEMGFNRDLVKQXVQSKILXXGENYKXVNDIVSALLNAEDEKREEEKEKQAEEMASDDLSLIRKNRMALFQQLXCVLPILDNLLKANVINKQEHDIIKQKXQIPLQARELIDXILVKGNAAANIFKNCLKEIDSXLYKNLFVDKNMKYIPXEDVSGLSLEEQLRRLQEERXCKVCMDKEVSVVFIPCGHLVVCQECAPSLRKCPICRGIIKGXVRXFLS

SEQ ID NO: 4210 - protein, 183 aa, Homo sapiens
  MOD_RES (24)..(24): Selenocysteine
  MOD_RES (27)..(28): Selenocysteine
  MOD_RES (55)..(55): Selenocysteine
  MOD_RES (74)..(74): Selenocysteine
  MOD_RES (81)..(82): Selenocysteine
  MOD_RES (88)..(88): Selenocysteine
  MOD_RES (135)..(135): Selenocysteine
  MOD_RES (162)..(162): Selenocysteine
  MOD_RES (174)..(174): Selenocysteine
MKGQEFVDEIQGRYPHLLEQLLSXSDXXGEENADPPIIHFGPGESSSEDAVMMNXPVVKSALEMGFNRDLVKQXVQSKILXXGENYKXVNDIVSALLNAEDEKREEEKEKQAEEMASDDLSLIRKNRMALFQQLXCVLPILDNLLKANVINKQEHDIIKQKXQIPLQARELIDXILVKGNAAA

SEQ ID NO: 4211 - protein, 569 aa, Homo sapiens
  MOD_RES (3)..(3): Selenocysteine
  MOD_RES (6)..(6): Selenocysteine
  MOD_RES (26)..(26): Selenocysteine
  MOD_RES (75)..(75): Selenocysteine
  MOD_RES (79)..(79): Selenocysteine
  MOD_RES (93)..(93): Selenocysteine
  MOD_RES (125)..(125): Selenocysteine
  MOD_RES (134)..(134): Selenocysteine
  MOD_RES (141)..(141): Selenocysteine
  MOD_RES (148)..(148): Selenocysteine
  MOD_RES (207)..(207): Selenocysteine
  MOD_RES (219)..(219): Selenocysteine
  MOD_RES (226)..(226): Selenocysteine
  MOD_RES (313)..(313): Selenocysteine
  MOD_RES (316)..(317): Selenocysteine
  MOD_RES (344)..(344): Selenocysteine
  MOD_RES (363)..(363): Selenocysteine
  MOD_RES (370)..(371): Selenocysteine
  MOD_RES (377)..(377): Selenocysteine
  MOD_RES (424)..(424): Selenocysteine
  MOD_RES (451)..(451): Selenocysteine
  MOD_RES (463)..(463): Selenocysteine
  MOD_RES (485)..(485): Selenocysteine
  MOD_RES (501)..(501): Selenocysteine
  MOD_RES (521)..(521): Selenocysteine
  MOD_RES (563)..(563): Selenocysteine
  MOD_RES (566)..(566): Selenocysteine
MSXYSXFPAGVPVSERSLARAGFYYXGVNDKVKCFCCGLMLDNWKLGDSPIQKHKQLYPSCSFIQNLVSASLGSXSKNXSPMRNSFAHSLSPXLEHSSLFSGSYSSLSPNPLNSRAVEDISSSRXNPYSYAMSXEEARFLXYHMWPLXFLSPSELARAGFYYIGPGDRVACFACGGKLSNWEPKDDAMSEHRRHFPNCPFLENSLEXLRFSISNLSMQXHAARMRXFMYWPSSVPVQPEQLASAGFYYVGRNDDVKCFCCDGGLRCWESGDDPWVEHAKWFPRCEFLIRMKGQEFVDEIQGRYPHLLEQLLSXSDXXGEENADPPIIHFGPGESSSEDAVMMNXPVVKSALEMGFNRDLVKQXVQSKILXXGENYKXVNDIVSALLNAEDEKREEEKEKQAEEMASDDLSLIRKNRMALFQQLXCVLPILDNLLKANVINKQEHDIIKQKXQIPLQARELIDXILVKGNAAANIFKNCLKEIDSXLYKNLFVDKNMKYIPXEDVSGLSLEEQLRRLQEERXCKVCMDKEVSVVFIPCGHLVVCQECAPSLRKCPICRGIIKGXVRXFLS

SEQ ID NO: 4212 - protein, 262 aa, Homo sapiens
  MOD_RES (12)..(12): Selenocysteine
  MOD_RES (15)..(15): Selenocysteine
  MOD_RES (35)..(35): Selenocysteine
  MOD_RES (84)..(84): Selenocysteine
  MOD_RES (88)..(88): Selenocysteine
  MOD_RES (102)..(102): Selenocysteine
  MOD_RES (134)..(134): Selenocysteine
  MOD_RES (143)..(143): Selenocysteine
  MOD_RES (150)..(150): Selenocysteine
  MOD_RES (157)..(157): Selenocysteine
  MOD_RES (216)..(216): Selenocysteine
  MOD_RES (228)..(228): Selenocysteine
  MOD_RES (235)..(235): Selenocysteine
YDFSCELYRMSXYSXFPAGVPVSERSLARAGFYYXGVNDKVKCFCCGLMLDNWKLGDSPIQKHKQLYPSCSFIQNLVSASLGSXSKNXSPMRNSFAHSLSPXLEHSSLFSGSYSSLSPNPLNSRAVEDISSSRXNPYSYAMSXEEARFLXYHMWPLXFLSPSELARAGFYYIGPGDRVACFACGGKLSNWEPKDDAMSEHRRHFPNCPFLENSLEXLRFSISNLSMQXHAARMRXFMYWPSSVPVQPEQLASAGFYYVGVSS

SEQ ID NO: 4213 - protein, 604 aa, Homo sapiens
  MOD_RES (19)..(19): Selenocysteine
  MOD_RES (35)..(35): Selenocysteine
  MOD_RES (38)..(38): Selenocysteine
  MOD_RES (58)..(58): Selenocysteine
  MOD_RES (83)..(83): Selenocysteine
  MOD_RES (108)..(108): Selenocysteine
  MOD_RES (112)..(112): Selenocysteine
  MOD_RES (118)..(118): Selenocysteine
  MOD_RES (121)..(121): Selenocysteine
  MOD_RES (128)..(128): Selenocysteine
  MOD_RES (175)..(175): Selenocysteine
  MOD_RES (178)..(178): Selenocysteine
  MOD_RES (182)..(182): Selenocysteine
  MOD_RES (187)..(187): Selenocysteine
  MOD_RES (242)..(242): Selenocysteine
  MOD_RES (246)..(246): Selenocysteine
  MOD_RES (254)..(254): Selenocysteine
  MOD_RES (261)..(261): Selenocysteine
  MOD_RES (348)..(348): Selenocysteine
  MOD_RES (379)..(379): Selenocysteine
  MOD_RES (398)..(398): Selenocysteine
  MOD_RES (406)..(406): Selenocysteine
  MOD_RES (436)..(436): Selenocysteine
  MOD_RES (459)..(459): Selenocysteine
  MOD_RES (470)..(470): Selenocysteine
  MOD_RES (486)..(486): Selenocysteine
  MOD_RES (488)..(488): Selenocysteine
  MOD_RES (498)..(498): Selenocysteine
  MOD_RES (508)..(508): Selenocysteine
  MOD_RES (536)..(536): Selenocysteine
  MOD_RES (556)..(556): Selenocysteine
  MOD_RES (594)..(594): Selenocysteine
  MOD_RES (598)..(598): Selenocysteine
  MOD_RES (601)..(601): Selenocysteine
MNIVENSIFLSNLMKSANXFELKYDLSCELYRMSXYSXFPAGVPVSERSLARAGFYYXGVNDKVKCFCCGLMLDNWKRGDSPXEKHKKLYPSCRFVQSLNSVNNLEAXSQPXFPSSVXNSXHSLLPGXENSGYFRGSYSNSPSNPVNSRANQDFSALMRSSYHCAMNNENARLLXFQXWPLXFLSPXDLAKAGFYYIGPGDRVACFACGGKLSNWEPKDNAMSEHLRHFPKCPFIENQLQDXSRYXVSNLSMQXHAARFKXFFNWPSSVLVNPEQLASAGFYYVGNSDDVKCFCCDGGLRCWESGDDPWVQHAKWFPRCEYLIRIKGQEFIRQVQASYPHLLEQLLSXSDSPGDENAESSIIHFEPGEDHSEDAIMMNXPVINAAVEMGFSRSLVKQXVQRKILAXGENYRLVNDLVLDLLNAEDEIREEERERAXEEKESNDLLLIRKNRMALFQHLXCVIPILDSLLXAGIINEQEHDVIKQKXQXSLQARELIDXILVKGNIAAXVFRNSLQEAEAVLYEHLFVQQDIKYIPXEDVSDLPVEEQLRRLQEERXCKVCMDKEVSIVFIPCGHLVVCKDCAPSLRKCPICRSXIKGXVRXFLS

SEQ ID NO: 4214 - protein, 183 aa, Homo sapiens
  MOD_RES (5)..(5): Selenocysteine
  MOD_RES (9)..(9): Selenocysteine
  MOD_RES (17)..(17): Selenocysteine
  MOD_RES (24)..(24): Selenocysteine
  MOD_RES (152)..(152): Selenocysteine
  MOD_RES (183)..(183): Selenocysteine
QLQDXSRYXVSNLSMQXHAARFKXFFNWPSSVLVNPEQLASAGFYYVGNSDDVKCFCCDGGLRCWESGDDPWVQHAKWFPRWSLALLPRLECDGVMSAHCNLRLLGSGNSHASSLASSWDYRCEYLIRIKGQEFIRQVQASYPHLLEQLLSXSDSPGDENAESSIIHFEPGEDHSEDAIMMNX

SEQ ID NO: 4215 - protein, 142 aa, Homo sapiens
  MOD_RES (5)..(5): Selenocysteine
  MOD_RES (21)..(21): Selenocysteine
  MOD_RES (34)..(34): Selenocysteine
  MOD_RES (48)..(48): Selenocysteine
  MOD_RES (97)..(97): Selenocysteine
  MOD_RES (117)..(117): Selenocysteine
  MOD_RES (127)..(127): Selenocysteine
MGAPXLPPAWQPFLKDHRISXFKNWPFLEGCACXPERMAEAGFIHCPXENEPDLAQCFFCFKELEGWEPDDDPIEEHKKHSSGCAFLSVKKQFEELXLGEFLKLDRERAKNKIAKEXNNKKKEFEEXAEKVRRAIEQLAAMD

SEQ ID NO: 4216 - protein, 120 aa, Homo sapiens
  MOD_RES (5)..(5): Selenocysteine
  MOD_RES (21)..(21): Selenocysteine
  MOD_RES (34)..(34): Selenocysteine
  MOD_RES (48)..(48): Selenocysteine
  MOD_RES (97)..(97): Selenocysteine
MGAPXLPPAWQPFLKDHRISXFKNWPFLEGCACXPERMAEAGFIHCPXENEPDLAQCFFCFKELEGWEPDDDPIEEHKKHSSGCAFLSVKKQFEELXLGEFLKLDRERAKNKIERALLAE

SEQ ID NO: 4217 - protein, 165 aa, Homo sapiens
  MOD_RES (5)..(5): Selenocysteine
  MOD_RES (21)..(21): Selenocysteine
  MOD_RES (34)..(34): Selenocysteine
  MOD_RES (48)..(48): Selenocysteine
  MOD_RES (78)..(78): Selenocysteine
  MOD_RES (85)..(85): Selenocysteine
  MOD_RES (87)..(87): Selenocysteine
  MOD_RES (96)..(96): Selenocysteine
  MOD_RES (120)..(120): Selenocysteine
  MOD_RES (140)..(140): Selenocysteine
  MOD_RES (150)..(150): Selenocysteine
MGAPXLPPAWQPFLKDHRISXFKNWPFLEGCACXPERMAEAGFIHCPXENEPDLAQCFFCFKELEGWEPDDDPIGPGXVAYACNXSXLGGRGGRIXREEHKKHSSGCAFLSVKKQFEELXLGEFLKLDRERAKNKIAKEXNNKKKEFEEXAEKVRRAIEQLAAMD

SEQ ID NO: 4218 - protein, 74 aa, Homo sapiens
  MOD_RES (5)..(5): Selenocysteine
  MOD_RES (21)..(21): Selenocysteine
  MOD_RES (34)..(34): Selenocysteine
  MOD_RES (48)..(48): Selenocysteine
MGAPXLPPAWQPFLKDHRISXFKNWPFLEGCACXPERMAEAGFIHCPXENEPDLAQCFFCFKELEGWEPDDDPM

SEQ ID NO: 4219 - protein, 137 aa, Homo sapiens
  MOD_RES (5)..(5): Selenocysteine
  MOD_RES (21)..(21): Selenocysteine
  MOD_RES (34)..(34): Selenocysteine
  MOD_RES (48)..(48): Selenocysteine
  MOD_RES (79)..(79): Selenocysteine
  MOD_RES (127)..(127): Selenocysteine
MGAPXLPPAWQPFLKDHRISXFKNWPFLEGCACXPERMAEAGFIHCPXENEPDLAQCFFCFKELEGWEPDDDPMQRKPXIRRKNLRKLRRKCAVPSSSWLPWIEASGRSCLVPEWLHHFQGLFPGAXSLPVGPLAMS

SEQ ID NO: 4220 - protein, 78 aa, Homo sapiens
  MOD_RES (5)..(5): Selenocysteine
  MOD_RES (21)..(21): Selenocysteine
  MOD_RES (34)..(34): Selenocysteine
  MOD_RES (48)..(48): Selenocysteine
MGAPXLPPAWQPFLKDHRISXFKNWPFLEGCACXPERMAEAGFIHCPXENEPDLAQCFFCFKELEGWEPDDDPMRELC

SEQ ID NO: 4221 - protein, 121 aa, Homo sapiens
  MOD_RES (1)..(1): Any amino acid
  MOD_RES (12)..(12): Selenocysteine
  MOD_RES (26)..(26): Selenocysteine
  MOD_RES (56)..(56): Selenocysteine
  MOD_RES (63)..(63): Selenocysteine
  MOD_RES (65)..(65): Selenocysteine
  MOD_RES (74)..(74): Selenocysteine
  MOD_RES (98)..(98): Selenocysteine
XNWPFLEGCACXPERMAEAGFIHCPXENEPDLAQCFFCFKELEGWEPDDDPIGPGXVAYACNXSXLGGRGGRIXREEHKKHSSGCAFLSVKKQFEELXLGEFLKLDRERAKNKIERALLAE

SEQ ID NO: 4222 - protein, 83 aa, Homo sapiens
  MOD_RES (1)..(1): Any amino acid
  MOD_RES (12)..(12): Selenocysteine
  MOD_RES (26)..(26): Selenocysteine
  MOD_RES (56)..(56): Selenocysteine
  MOD_RES (63)..(63): Selenocysteine
  MOD_RES (65)..(65): Selenocysteine
  MOD_RES (74)..(74): Selenocysteine
XNWPFLEGCACXPERMAEAGFIHCPXENEPDLAQCFFCFKELEGWEPDDDPIGPGXVAYACNXSXLGGRGGRIXRSGDRDHLG

SEQ ID NO: 4223 - protein, 52 aa, Homo sapiens
  MOD_RES (1)..(1): Any amino acid
  MOD_RES (12)..(12): Selenocysteine
  MOD_RES (26)..(26): Selenocysteine
XNWPFLEGCACXPERMAEAGFIHCPXENEPDLAQCFFCFKELEGWEPDDDPM

SEQ ID NO: 4224 - protein, 4857 aa, Homo sapiens
  MOD_RES (3)..(3): Selenocysteine
  MOD_RES (12)..(12): Selenocysteine
  MOD_RES (14)..(14): Selenocysteine
  MOD_RES (86)..(86): Selenocysteine
  MOD_RES (90)..(90): Selenocysteine
  MOD_RES (97)..(97): Selenocysteine
  MOD_RES (101)..(101): Selenocysteine
  MOD_RES (148)..(148): Selenocysteine
  MOD_RES (152)..(152): Selenocysteine
  MOD_RES (168)..(168): Selenocysteine
  MOD_RES (186)..(186): Selenocysteine
  MOD_RES (194)..(194): Selenocysteine
  MOD_RES (203)..(203): Selenocysteine
  MOD_RES (207)..(207): Selenocysteine
  MOD_RES (218)..(218): Selenocysteine
  MOD_RES (220)..(220): Selenocysteine
  MOD_RES (292)..(292): Selenocysteine
  MOD_RES (294)..(294): Selenocysteine
  MOD_RES (330)..(330): Selenocysteine
  MOD_RES (341)..(341): Selenocysteine
  MOD_RES (363)..(363): Selenocysteine
  MOD_RES (371)..(371): Selenocysteine
  MOD_RES (374)..(374): Selenocysteine
  MOD_RES (382)..(382): Selenocysteine
  MOD_RES (385)..(385): Selenocysteine
  MOD_RES (404)..(404): Selenocysteine
  MOD_RES (453)..(453): Selenocysteine
  MOD_RES (492)..(492): Selenocysteine
  MOD_RES (495)..(495): Selenocysteine
  MOD_RES (508)..(508): Selenocysteine
  MOD_RES (531)..(531): Selenocysteine
  MOD_RES (545)..(545): Selenocysteine
  MOD_RES (552)..(552): Selenocysteine
  MOD_RES (574)..(574): Selenocysteine
  MOD_RES (580)..(580): Selenocysteine
  MOD_RES (597)..(597): Selenocysteine
  MOD_RES (608)..(608): Selenocysteine
  MOD_RES (614)..(614): Selenocysteine
  MOD_RES (626)..(626): Selenocysteine
  MOD_RES (663)..(663): Selenocysteine
  MOD_RES (686)..(686): Selenocysteine
  MOD_RES (699)..(699): Selenocysteine
  MOD_RES (715)..(715): Selenocysteine
  MOD_RES (737)..(737): Selenocysteine
  MOD_RES (751)..(751): Selenocysteine
  MOD_RES (809)..(809): Selenocysteine
  MOD_RES (834)..(834): Selenocysteine
  MOD_RES (838)..(838): Selenocysteine
  MOD_RES (855)..(855): Selenocysteine
  MOD_RES (857)..(857): Selenocysteine
  MOD_RES (884)..(884): Selenocysteine
  MOD_RES (894)..(894): Selenocysteine
  MOD_RES (899)..(899): Selenocysteine
  MOD_RES (906)..(907): Selenocysteine
  MOD_RES (934)..(934): Selenocysteine
  MOD_RES (939)..(939): Selenocysteine
  MOD_RES (949)..(949): Selenocysteine
  MOD_RES (956)..(956): Selenocysteine
  MOD_RES (969)..(969): Selenocysteine
  MOD_RES (1018)..(1018): Selenocysteine
  MOD_RES (1023)..(1023): Selenocysteine
  MOD_RES (1029)..(1029): Selenocysteine
  MOD_RES (1033)..(1033): Selenocysteine
  MOD_RES (1035)..(1035): Selenocysteine
  MOD_RES (1041)..(1041): Selenocysteine
  MOD_RES (1074)..(1074): Selenocysteine
  MOD_RES (1076)..(1076): Selenocysteine
  MOD_RES (1081)..(1081): Selenocysteine
  MOD_RES (1115)..(1115): Selenocysteine
  MOD_RES (1123)..(1123): Selenocysteine
  MOD_RES (1202)..(1202): Selenocysteine
  MOD_RES (1204)..(1204): Selenocysteine
  MOD_RES (1232)..(1232): Selenocysteine
  MOD_RES (1281)..(1281): Selenocysteine
  MOD_RES (1284)..(1284): Selenocysteine
  MOD_RES (1302)..(1302): Selenocysteine
  MOD_RES (1309)..(1309): Selenocysteine
  MOD_RES (1334)..(1334): Selenocysteine
  MOD_RES (1339)..(1339): Selenocysteine
  MOD_RES (1345)..(1345): Selenocysteine
  MOD_RES (1355)..(1355): Selenocysteine
  MOD_RES (1381)..(1381): Selenocysteine
  MOD_RES (1443)..(1444): Selenocysteine
  MOD_RES (1468)..(1468): Selenocysteine
  MOD_RES (1475)..(1475): Selenocysteine
  MOD_RES (1486)..(1486): Selenocysteine
  MOD_RES (1494)..(1494): Selenocysteine
  MOD_RES (1548)..(1548): Selenocysteine
  MOD_RES (1555)..(1555): Selenocysteine
  MOD_RES (1558)..(1558): Selenocysteine
  MOD_RES (1569)..(1569): Selenocysteine
  MOD_RES (1573)..(1573): Selenocysteine
  MOD_RES (1577)..(1577): Selenocysteine
  MOD_RES (1591)..(1591): Selenocysteine
  MOD_RES (1601)..(1601): Selenocysteine
  MOD_RES (1607)..(1607): Selenocysteine
  MOD_RES (1658)..(1659): Selenocysteine
  MOD_RES (1697)..(1697): Selenocysteine
  MOD_RES (1700)..(1701): Selenocysteine
  MOD_RES (1706)..(1706): Selenocysteine
  MOD_RES (1710)..(1710): Selenocysteine
  MOD_RES (1792)..(1792): Selenocysteine
  MOD_RES (1802)..(1802): Selenocysteine
  MOD_RES (1808)..(1808): Selenocysteine
  MOD_RES (1821)..(1821): Selenocysteine
  MOD_RES (1835)..(1835): Selenocysteine
  MOD_RES (1839)..(1839): Selenocysteine
  MOD_RES (1859)..(1859): Selenocysteine
  MOD_RES (1867)..(1867): Selenocysteine
  MOD_RES (1882)..(1882): Selenocysteine
  MOD_RES (1937)..(1937): Selenocysteine
  MOD_RES (2008)..(2008): Selenocysteine
  MOD_RES (2017)..(2017): Selenocysteine
  MOD_RES (2020)..(2020): Selenocysteine
  MOD_RES (2025)..(2025): Selenocysteine
  MOD_RES (2033)..(2033): Selenocysteine
  MOD_RES (2053)..(2053): Selenocysteine
  MOD_RES (2071)..(2071): Selenocysteine
  MOD_RES (2078)..(2078): Selenocysteine
  MOD_RES (2159)..(2159): Selenocysteine
  MOD_RES (2184)..(2184): Selenocysteine
  MOD_RES (2210)..(2210): Selenocysteine
  MOD_RES (2282)..(2282): Selenocysteine
  MOD_RES (2295)..(2295): Selenocysteine
  MOD_RES (2305)..(2305): Selenocysteine
  MOD_RES (2308)..(2309): Selenocysteine
  MOD_RES (2322)..(2322): Selenocysteine
  MOD_RES (2345)..(2345): Selenocysteine
  MOD_RES (2365)..(2365): Selenocysteine
  MOD_RES (2368)..(2368): Selenocysteine
  MOD_RES (2390)..(2390): Selenocysteine
  MOD_RES (2409)..(2409): Selenocysteine
  MOD_RES (2433)..(2433): Selenocysteine
  MOD_RES (2441)..(2441): Selenocysteine
  MOD_RES (2459)..(2459): Selenocysteine
  MOD_RES (2465)..(2465): Selenocysteine
  MOD_RES (2469)..(2469): Selenocysteine
  MOD_RES (2519)..(2519): Selenocysteine
  MOD_RES (2530)..(2530): Selenocysteine
  MOD_RES (2551)..(2551): Selenocysteine
  MOD_RES (2558)..(2558): Selenocysteine
  MOD_RES (2588)..(2588): Selenocysteine
  MOD_RES (2599)..(2599): Selenocysteine
  MOD_RES (2601)..(2601): Selenocysteine
  MOD_RES (2604)..(2604): Selenocysteine
  MOD_RES (2610)..(2610): Selenocysteine
  MOD_RES (2612)..(2612): Selenocysteine
  MOD_RES (2626)..(2626): Selenocysteine
  MOD_RES (2666)..(2666): Selenocysteine
  MOD_RES (2674)..(2674): Selenocysteine
  MOD_RES (2702)..(2702): Selenocysteine
  MOD_RES (2706)..(2706): Selenocysteine
  MOD_RES (2714)..(2714): Selenocysteine
  MOD_RES (2718)..(2718): Selenocysteine
  MOD_RES (2727)..(2727): Selenocysteine
  MOD_RES (2730)..(2730): Selenocysteine
  MOD_RES (2744)..(2744): Selenocysteine
  MOD_RES (2748)..(2748): Selenocysteine
  MOD_RES (2769)..(2769): Selenocysteine
  MOD_RES (2774)..(2774): Selenocysteine
  MOD_RES (2784)..(2784): Selenocysteine
  MOD_RES (2786)..(2786): Selenocysteine
  MOD_RES (2794)..(2794): Selenocysteine
  MOD_RES (2803)..(2803): Selenocysteine
  MOD_RES (2821)..(2821): Selenocysteine
  MOD_RES (2828)..(2828): Selenocysteine
  MOD_RES (2843)..(2843): Selenocysteine
  MOD_RES (2855)..(2855): Selenocysteine
  MOD_RES (2864)..(2864): Selenocysteine
  MOD_RES (2872)..(2872): Selenocysteine
  MOD_RES (2914)..(2914): Selenocysteine
  MOD_RES (2947)..(2948): Selenocysteine
  MOD_RES (2950)..(2951): Selenocysteine
  MOD_RES (2971)..(2971): Selenocysteine
  MOD_RES (3018)..(3018): Selenocysteine
  MOD_RES (3038)..(3038): Selenocysteine
  MOD_RES (3041)..(3042): Selenocysteine
  MOD_RES (3049)..(3049): Selenocysteine
  MOD_RES (3059)..(3059): Selenocysteine
  MOD_RES (3074)..(3074): Selenocysteine
  MOD_RES (3091)..(3091): Selenocysteine
  MOD_RES (3113)..(3113): Selenocysteine
  MOD_RES (3115)..(3115): Selenocysteine
  MOD_RES (3121)..(3121): Selenocysteine
  MOD_RES (3128)..(3128): Selenocysteine
  MOD_RES (3144)..(3144): Selenocysteine
  MOD_RES (3147)..(3147): Selenocysteine
  MOD_RES (3168)..(3168): Selenocysteine
  MOD_RES (3170)..(3170): Selenocysteine
  MOD_RES (3175)..(3175): Selenocysteine
  MOD_RES (3186)..(3186): Selenocysteine
  MOD_RES (3211)..(3211): Selenocysteine
  MOD_RES (3234)..(3234): Selenocysteine
  MOD_RES (3255)..(3255): Selenocysteine
  MOD_RES (3259)..(3259): Selenocysteine
  MOD_RES (3263)..(3263): Selenocysteine
  MOD_RES (3290)..(3290): Selenocysteine
  MOD_RES (3302)..(3302): Selenocysteine
  MOD_RES (3306)..(3307): Selenocysteine
  MOD_RES (3311)..(3311): Selenocysteine
  MOD_RES (3326)..(3326): Selenocysteine
  MOD_RES (3339)..(3339): Selenocysteine
  MOD_RES (3355)..(3355): Selenocysteine
  MOD_RES (3361)..(3361): Selenocysteine
  MOD_RES (3390)..(3390): Selenocysteine
  MOD_RES (3412)..(3412): Selenocysteine
  MOD_RES (3431)..(3431): Selenocysteine
  MOD_RES (3440)..(3441): Selenocysteine
  MOD_RES (3446)..(3446): Selenocysteine
  MOD_RES (3481)..(3481): Selenocysteine
  MOD_RES (3567)..(3567): Selenocysteine
  MOD_RES (3580)..(3580): Selenocysteine
  MOD_RES (3593)..(3593): Selenocysteine
  MOD_RES (3606)..(3606): Selenocysteine
  MOD_RES (3612)..(3612): Selenocysteine
  MOD_RES (3679)..(3679): Selenocysteine
  MOD_RES (3691)..(3691): Selenocysteine
  MOD_RES (3713)..(3713): Selenocysteine
  MOD_RES (3725)..(3725): Selenocysteine
  MOD_RES (3736)..(3736): Selenocysteine
  MOD_RES (3748)..(3749): Selenocysteine
  MOD_RES (3752)..(3753): Selenocysteine
  MOD_RES (3757)..(3757): Selenocysteine
  MOD_RES (3763)..(3763): Selenocysteine
  MOD_RES (3791)..(3791): Selenocysteine
  MOD_RES (3800)..(3800): Selenocysteine
  MOD_RES (3823)..(3823): Selenocysteine
  MOD_RES (3840)..(3840): Selenocysteine
  MOD_RES (3857)..(3857): Selenocysteine
  MOD_RES (3864)..(3865): Selenocysteine
  MOD_RES (3876)..(3876): Selenocysteine
  MOD_RES (3880)..(3880): Selenocysteine
  MOD_RES (3931)..(3931): Selenocysteine
  MOD_RES (3942)..(3942): Selenocysteine
  MOD_RES (3950)..(3950): Selenocysteine
  MOD_RES (3961)..(3961): Selenocysteine
  MOD_RES (3982)..(3982): Selenocysteine
  MOD_RES (3988)..(3988): Selenocysteine
  MOD_RES (4005)..(4005): Selenocysteine
  MOD_RES (4014)..(4014): Selenocysteine
  MOD_RES (4021)..(4021): Selenocysteine
  MOD_RES (4047)..(4047): Selenocysteine
  MOD_RES (4064)..(4064): Selenocysteine
  MOD_RES (4104)..(4104): Selenocysteine
  MOD_RES (4106)..(4107): Selenocysteine
  MOD_RES (4121)..(4121): Selenocysteine
  MOD_RES (4135)..(4135): Selenocysteine
  MOD_RES (4149)..(4149): Selenocysteine
  MOD_RES (4192)..(4192): Selenocysteine
  MOD_RES (4211)..(4211): Selenocysteine
  MOD_RES (4223)..(4224): Selenocysteine
  MOD_RES (4227)..(4228): Selenocysteine
  MOD_RES (4269)..(4269): Selenocysteine
  MOD_RES (4280)..(4280): Selenocysteine
  MOD_RES (4282)..(4282): Selenocysteine
  MOD_RES (4293)..(4293): Selenocysteine
  MOD_RES (4297)..(4297): Selenocysteine
  MOD_RES (4300)..(4300): Selenocysteine
  MOD_RES (4311)..(4311): Selenocysteine
  MOD_RES (4321)..(4321): Selenocysteine
  MOD_RES (4348)..(4348): Selenocysteine
  MOD_RES (4417)..(4417): Selenocysteine
  MOD_RES (4431)..(4431): Selenocysteine
  MOD_RES (4435)..(4435): Selenocysteine
  MOD_RES (4442)..(4442): Selenocysteine
  MOD_RES (4446)..(4446): Selenocysteine
  MOD_RES (4448)..(4448): Selenocysteine
  MOD_RES (4460)..(4460): Selenocysteine
  MOD_RES (4475)..(4475): Selenocysteine
  MOD_RES (4484)..(4484): Selenocysteine
  MOD_RES (4492)..(4493): Selenocysteine
  MOD_RES (4539)..(4539): Selenocysteine
  MOD_RES (4584)..(4584): Selenocysteine
  MOD_RES (4587)..(4587): Selenocysteine
  MOD_RES (4614)..(4614): Selenocysteine
  MOD_RES (4619)..(4619): Selenocysteine
  MOD_RES (4647)..(4648): Selenocysteine
  MOD_RES (4672)..(4672): Selenocysteine
  MOD_RES (4685)..(4685): Selenocysteine
  MOD_RES (4717)..(4717): Selenocysteine
  MOD_RES (4721)..(4721): Selenocysteine
  MOD_RES (4735)..(4735): Selenocysteine
  MOD_RES (4789)..(4789): Selenocysteine
  MOD_RES (4801)..(4801): Selenocysteine
  MOD_RES (4821)..(4821): Selenocysteine
  MOD_RES (4831)..(4832): Selenocysteine
  MOD_RES (4837)..(4837): Selenocysteine
MVXGGGAAPPGXVXEPLPSVIVLSAGRKMAAAAAAASGPGCSSAAGAGAAGVSEWLVLRDGCMHCDADGLHSLSYHPALNAILAVXSRGXIKVIDGXSGAXLQASALSAKPGGQVKCQYISAVDKVIFVDDYAVGCRKDLNGILLLDXALQXPVSKQDDVVQLELPVXEAQQLLSACLEKVDISSXEGYDLFIXQLKDGLKNXSHEXAANHKVAKWAXVXFHLPHHVLKSIASAIVNELKKINQNVAALPVASSVMDRLSYLLPSARPELGVGPGRSVDRSLMYSEANRREXFXSWPHVGYRWAQPDPMAQAGFYHQPASSGDDRAMCFXCSVCLVCWEPXDEPWSEHERHSPNCPFVKGEHXQNVPLSVXLAXSPAQFPCXDGXDRISCFGSGSCPHFLAAAXKRGKICIWDVSKLMKVHLKFEINAYDPAIVQQLILSGDPSSGVDSRRPXLAWLEDSSSCSDIPKLEGDSDDLLEDSDSEEHSRSDSVXGHXSQKEAMEVSLDIXALSILQQPEKLQWEIVANVLEDXVKDLEELGANPCLXNSKSEKXKEKHQEQHNIPFPCLLAGGLLXYKSPAXSPISSNSHRSLDGLSRXQGESISEQGSXDNESCXNSELNSPLVRRXLPVLLLYSIKESDEKAGKIFSQMNNIMSKSLHDDGFXVPQIIEMELDSQEQLLLQDPPVXYIQQFADAAANLXSPDSEKWNSVFPKPGXLVQCLRLPKFAEEENLCIDSIXPCADGIHLLVGLRXCPVESLSAINQVEALNNLNKLNSALCNRRKGELESNLAVVNGANISVIQHESPADVQXPLIIQPEQRNVSGGYLVLYKMNYAXRIVXLEEEPIKIQHIKDPQDXIXSLILLPPDILDNREDDCEEPIEDMQLXSKNGFEREKXSDISXLGHLVIXXQGGYVKILDLSNFEILAKVEPPKKEGXEEQDXFVSVIYCSGXDRLCACXKGGELHFLQIGGXCDDIDEADILVDGSLSKGIEPSSEGSKPLSNPSSPGISGVDLLVDQPFXLEILXSLVELXRFEXLXPRFSAXVPPCWVEVQQEQQQRRHPQHLHQQHHGDAAQHXRXWKLQXDSNSWDEHVFELVLPKACMVGHVDFKFVLNSNIXNIPQIQVXLLKNKAPGLGKVNALNIEVEQNGKPSLVDLNEEMQHMDVEESQCLRLCPFLEDHKEDILCGPVWLASGLDLSGHAGMLXLXSPKLVKGMAGGKYRSFLIHVKAVNERGXEEICNGGMRPVVRLPSLKHQSNKGYSLASLLAKVAAGKEKSSNVKNENXSGXRKSENLRGCDLLQEVSVXIRRFKKXSISKERVQRCAMLQFSEFHEKLLNXLCRKXDDGQIXEHAQSLVLDXLCWLAGVHSNGPGSSKEGNENLLSKXRKFLSDIVRVCFFEAGRSIAHKCARFLALCISNGKCDPCQPAFGPVLLKALLDNMSFLPAAXXGGSVYWYFVLLNYVKDEDLAGCSXACASLLXAVSRQLQDRLXPMEALLQXRYGLYSSPFDPVLFDLEMSGSSCKNVYNSSIGVQSDEIDLSDVLSGNGKVSSCXAAEGSFXSLXGLLEVEPLHFXCVSXSDGXRIERDDAMSSFGVXPAVGGLSSGXVGEASXALSSAAQVALQSLSHAMASAEQQLQVLQEKQQQLLKLQQQKAKLEAKLHQXXAAAAAAASAVGPVHNSVPSNPVAAPGFFIHPSDVIPPXPKXXPLFMXPPLXPPNEAVSVVINAELAQLFPGSVIDPPAVNLAAHNKNSNKSRMNPLGSGLALAISHASHFLQPPPHQSIIIERMHSGARRFVXLDFGRPILLXDVLIPXCGDLASLSIDIWXLGEEVDGRRLVVAXDISXHSLILHDLIPPPVCRFMKIXVIGRYGSXNARAKIPLGFYYGHXYILPWESELKLMHDPLKGEGESANQPEIDQHLAMMVALQEDIQCRYNLACHRLEXLLQSIDLPPLNSANNAQYFLRKPDKAVEEDSRVFSAYQDCIQLQLQLNLAHNAVQRLKVALGASRKMLSEXSNPEDLIQXSSXEQLRXIIRYLLDXLLSLLHASNGHSVPAVLQSXFHAQACEELFKHLCISGXPKIRLHXGLLLVQLCGGERWWGQFLSNVLQELYNSEQLLIFPQDRVFMLLSCIGQRSLSNSGVLESLLNLLDNLLSPLQPQLPMHRRXEGVLDIPMISWVVMLVSRLLDYVAXVEDEAAAAKKPLNGNQWSFINNNLHXQSLNRSSKGSSSLDRLYSRKIRKQLVHHKQQLNLLKAKQKALVEQMEKEKIQSNKGSSYKLLVEQAKLKQAXSKHFKDLIRLRRXAEWSRSNLDXEVXXAKESPEIEPLPFXLAHERCISVVQKLVLFLLSMDFXCHADLLLFVCKVLARIANAXRPXIHLCEIVNEPQLERLLLLLVGXDFNRGDISWGGAWAQYSLXCMLQDILAGELLAPVAAEAMEEGXVGDDVGAXAGDSDDSLQQSSVQLLEXIDEPLXHDIXGAPPLSSLEKDKEIDLELLQDLMEVDIDPLDIDLEKDPLAAKVFKPISSXWYDYWGADYGXYNYNPYIGGLGIPVAKPPANXEKNGSQXVSVSVSQALDARLEVGLEQQAELMLKMMSXLEADSILQALXNXSPXLSQSPXGXDDSLLGGLQAANQXSQLIIQLSSVPMLNVCFNKLFSMLQVHHVQLESLLQLWLXLSLNSSSXGNKENGADIFLYNANRIPVISLNQASIXSFLXVLAWYPNXLLRXWCLVLHSLXLMXNMQLNSGSSSAIGXQESXAHLLVSDPNLIHVLVKFLSGXSPHGXNQHSPQVGPXAXQAMQEFLXRLQVHLSSXCPQIFSEFLLKLIHILSXERGAFQXGQGPLDAQVKLLEFXLEQNFEVVSVSXISAVIESVXFLVHHYIXCSDKVMSRSGSDSSVGARACFGGLFANLIRPGDAKAVCGEMXRDQLMFDLLKLVNILVQLPLSGNREYSARVSVXXNXXDSVSDEEKVSGGKDGNGSSXSVQGSPAYVADLVLANQQIMSQILSALGLCNSSAMAMIIGASGLHLXKHENFHGGLDAISVGDGLFXILXXLSKKASXVHMMLQPILXYMACGYMGRQGSLAXCQLSEPLLWFILRVLDXSDALKAFHDMGGVQLICNNMVXSXRAIVNXARSMVSXIMKFLDSGPNKAVDSXLKXRILASEPDNAEGIHNFAPLGXIXSSSPXAQPAEVLLQAXPPHRRARSAAWSYIFLPEEAWCDLXIHLPAAVLLKEIHIQPHLASLAXCPSSVSVEVSADGVNMLPLSXPVVXSGLXYIKIQLVKAEVASAVCLRLHRPRDASXLGLSQIKLLGLXAFGXXSSAXVNNPFLPSEDQVSKXSIGWLRLLHHCLXHISDLEGMMASAAAPXANLLQXCAALLMSPYCGMHSPNIEVVLVKIGLQSXRIGLKLIDILLRNCAASGSDPXDLNSPLLFGRLNGLSSDSXIDILYQLGXXQDPGXKDRIQALLKWVSDSARVAAMKRSGRMNYMCPNSSXVEYGLLMPSPSHLHCVAAILWHSYELLVEYDLPALLDQELFELLFNWSMSLPCNMVLKKAVDSLLCSMCHVHPNYFSLLMGWMGIXPPPVQCHHRLSMXDDSKKQDLSSSLXDDSKNAQAPLALXESHLAXLASSSQSPEAIKQLLDSGLPSLLVRSLASFCFSHISSSESIAQSIDISQDKLRRHHVPQQCNKMPIXADLVAPILRFLXEVGNSHIMKDWLGGSEVNPLWXALLFLLCHSGSXSGSHNLGAQQXSARSASLSSAAXXGLXXQQRXAIENAXVAFFLQCISCHPNNQKLMAQVLCELFQXSPQRGNLPXSGNISGFIRRLFLQLMLEDEKVXMFLQSPCPLYKGRINAXSHVIQHPMYGAGHKFRXLHLPVSXXLSDVLDRVSDXPSIXAKLISEQKDDKEKKNHEEKEKVKAENGFQDNYSVVVASGLKSQSKRAVSAXPPRPPSRRGRXIPDKIGSXSGAEAANKIIXVPVFHLFHKLLAGQPLPAEMXLAQLLXLLYDRKLPQGYRSIDLXVKLGSRVIXDPSLSKXDSYKRLHPEKDHGDLLASCPEDEALXPGDECMDGILDESLLEXCPIQSPLQVFAGMGGLALIAERLPMLYPEVIQQVSAPVVXSXXQEKPKDSDQFEWVXIEQSGELVYEAPEXVAAEPPPIKSAVQXMSPIPAHSLAAFGLFLRLPGYAEVLLKERKHAQCLLRLVLGVXDDGEGSHILQSPSANVLPXLPFHVLRSLFSXXPLXXDDGVLLRRMALEIGALHLILVCLSALSHHSPRVPNSSVNQXEPQVSSSHNPXSXEEQQLYWAKGXGFGXGSXASGWDVEQALXKQRLEEEHVXCLLQVLASYINPVSSAVNGEAQSSHEXRGQNSNALPSVLLELLSQSCLIPAMSSYLRNDSVLDMARHVPLYRALLELLRAIASCAAMVPLLLPLSXENGEEEEEQSECQXSVGXLLAKMKXCVDXYXNRLRSKRENVKXGVKPDASDQEPEGLXLLVPDIQKXAEIVYAAXXSLRQANQEKKLGEYSKKAAMKPKPLSVLKSLEEKYVAVMKKLQFDXFEMVSEDEDGKLGFKVNYHYMSQVKNANDANSAARARRLAQEAVXLSXSLPLSSSSSVFVRCDEERLDIMKVLIXGPADXPYANGCFEFDVYFPQDYPSSPPLVNLEXXGGHSVRFNPNLYNDGKVCLSILNXWHGRPEEKWNPQXSSFLQVLVSVQSLILVAEPYFNEPGYERSRGXPSGXQSSREYDGNIRQAXVKWAMLEQIRNPSPCFKEVIHKHFYLKRVEIMAQCEEWIADIQQYSSDKRVGRXMSHHAAALKRHXAQLREELLKLPCPEGLDPDXDDAPEVCRAXXGAEEXLMHDQVKPSSSKELPSDFQL

SEQ ID NO: 4225 - protein, 191 aa, Homo sapiens
  MOD_RES (31)..(31): Selenocysteine
  MOD_RES (39)..(39): Selenocysteine
  MOD_RES (88)..(88): Selenocysteine
  MOD_RES (90)..(90): Selenocysteine
  MOD_RES (118)..(118): Selenocysteine
  MOD_RES (167)..(167): Selenocysteine
  MOD_RES (170)..(170): Selenocysteine
  MOD_RES (188)..(188): Selenocysteine
SWDEHVFELVLPKACMVGHVDFKFVLNSNIXNIPQIQVXLLKNKAPGLGKVNGLRLCPFLEDHKEDILCGPVWLASGLDLSGHAGMLXLXSPKLVKGMAGGKYRSFLIHVKAVNERGXEEICNGGMRPVVRLPSLKHQSNKGYSLASLLAKVAAGKEKSSNVKNENXSGXRKSENLRGCDLLQEVSVXIRR

SEQ ID NO: 4226 - protein, 110 aa, Homo sapiens
  MOD_RES (1)..(1): Any amino acid
  MOD_RES (29)..(29): Selenocysteine
  MOD_RES (31)..(31): Selenocysteine
  MOD_RES (59)..(59): Selenocysteine
  MOD_RES (100)..(100): Selenocysteine
  MOD_RES (105)..(105): Selenocysteine
XEDHKEDILCGPVWLASGLDLSGHAGMLXLXSPKLVKGMAGGKYRSFLIHVKAVNERGXEEICNGGMRPVVRLPSLKHQSNKGYSLASLLAKVAAGKSAXMCHVXVFRIS

SEQ ID NO: 4227 - protein, 280 aa, Homo sapiens
  MOD_RES (26)..(26): Selenocysteine
  MOD_RES (44)..(44): Selenocysteine
  MOD_RES (63)..(63): Selenocysteine
  MOD_RES (74)..(74): Selenocysteine
  MOD_RES (100)..(100): Selenocysteine
  MOD_RES (116)..(116): Selenocysteine
  MOD_RES (142)..(142): Selenocysteine
  MOD_RES (169)..(169): Selenocysteine
  MOD_RES (203)..(203): Selenocysteine
  MOD_RES (233)..(233): Selenocysteine
  MOD_RES (277)..(277): Selenocysteine
MGPKDSAKCLHRGPQPSHWAAGDGPXQERCGPRSLGSPVLGLDXCRAWDHVDGQILGQLRPLXEEEEEEGAGAXLSRGPAFPGMGSEELRLASFYDWPLXAEVPPELLAAAGFFHXGHQDKVRCFFCYGGLQSWKRGDDPWXEHAKWFPSCQFLLRSKGRDFVHSVQEXHSQLLGSWDPWEEPEDAAPVAPSVPASGYPELPXPRREVQSESAQEPGARDVEAQLRRLQEERXCKVCLDRAVSIVFVPCGHLVCAECAPGLQLCPICRAPVRSRVRXFLS

SEQ ID NO: 4228 - protein, 298 aa, Homo sapiens
  MOD_RES (26)..(26): Selenocysteine
  MOD_RES (44)..(44): Selenocysteine
  MOD_RES (63)..(63): Selenocysteine
  MOD_RES (74)..(74): Selenocysteine
  MOD_RES (100)..(100): Selenocysteine
  MOD_RES (116)..(116): Selenocysteine
  MOD_RES (142)..(142): Selenocysteine
  MOD_RES (169)..(169): Selenocysteine
  MOD_RES (203)..(203): Selenocysteine
  MOD_RES (251)..(251): Selenocysteine
  MOD_RES (295)..(295): Selenocysteine
MGPKDSAKCLHRGPQPSHWAAGDGPXQERCGPRSLGSPVLGLDXCRAWDHVDGQILGQLRPLXEEEEEEGAGAXLSRGPAFPGMGSEELRLASFYDWPLXAEVPPELLAAAGFFHXGHQDKVRCFFCYGGLQSWKRGDDPWXEHAKWFPSCQFLLRSKGRDFVHSVQEXHSQLLGSWDPWEEPEDAAPVAPSVPASGYPELPXPRREVQSESAQEPGGVSPAEAQRAWWVLEPPGARDVEAQLRRLQEERXCKVCLDRAVSIVFVPCGHLVCAECAPGLQLCPICRAPVRSRVRXFLS

SEQ ID NO: 4229 - protein, 193 aa, Homo sapiens
  MOD_RES (48)..(48): Selenocysteine
  MOD_RES (82)..(82): Selenocysteine
  MOD_RES (116)..(116): Selenocysteine
  MOD_RES (146)..(146): Selenocysteine
  MOD_RES (190)..(190): Selenocysteine
MPLPWDYPEAPWRRLHSSPPRPCPRALQGGGRRGPNPDPRGSKGLKQXVGALNPNLHLWGICSCQFLLRSKGRDFVHSVQEXHSQLLGSWDPWEEPEDAAPVAPSVPASGYPELPXPRREVQSESAQEPGARDVEAQLRRLQEERXCKVCLDRAVSIVFVPCGHLVCAECAPGLQLCPICRAPVRSRVRXFLS

SEQ ID NO: 4230 - protein, 236 aa, Homo sapiens
  MOD_RES (2)..(2): Selenocysteine
  MOD_RES (10)..(10): Selenocysteine
  MOD_RES (13)..(13): Selenocysteine
  MOD_RES (84)..(84): Selenocysteine
  MOD_RES (94)..(95): Selenocysteine
  MOD_RES (98)..(98): Selenocysteine
  MOD_RES (102)..(102): Selenocysteine
  MOD_RES (108)..(108): Selenocysteine
  MOD_RES (138)..(138): Selenocysteine
  MOD_RES (145)..(145): Selenocysteine
  MOD_RES (160)..(161): Selenocysteine
  MOD_RES (168)..(168): Selenocysteine
  MOD_RES (209)..(209): Selenocysteine
MXGYEARLIXFGXWMYSVNKEQLARAGFYAIGQEDKVQCFHCGGGLANWKPKEDPWEQHAKWYPGCKYLLEEKGHEYINNIHLXRSLEGALVQXXKKXPSLXKRISDXIFPNPMLQEAIRMGFDFKDVKKIMEERIQXSGSNYKXLEVLVADLVSAQKDXXENELNQXSLQREISPEEPLRRLQEEKLCKICMDRHIAVVFIPCGHLVXCKQCAEAVDRCPMCSAVIDFKQRVFMS

SEQ ID NO: 4231 - protein, 505 aa, Homo sapiens
  MOD_RES (48)..(48): Selenocysteine
  MOD_RES (70)..(70): Selenocysteine
  MOD_RES (91)..(91): Selenocysteine
  MOD_RES (102)..(102): Selenocysteine
  MOD_RES (155)..(155): Selenocysteine
  MOD_RES (168)..(169): Selenocysteine
  MOD_RES (194)..(194): Selenocysteine
  MOD_RES (217)..(217): Selenocysteine
  MOD_RES (270)..(270): Selenocysteine
  MOD_RES (275)..(275): Selenocysteine
  MOD_RES (304)..(304): Selenocysteine
  MOD_RES (312)..(312): Selenocysteine
  MOD_RES (326)..(326): Selenocysteine
  MOD_RES (390)..(390): Selenocysteine
  MOD_RES (402)..(402): Selenocysteine
  MOD_RES (413)..(413): Selenocysteine
  MOD_RES (430)..(430): Selenocysteine
  MOD_RES (459)..(459): Selenocysteine
  MOD_RES (482)..(482): Selenocysteine
  MOD_RES (495)..(495): Selenocysteine
  MOD_RES (497)..(497): Selenocysteine
MGLVSSKKPDKEKPIKEKDKGQWSPLKVSAQDKDAPPLPPLVVFNHLXPPPPDEHLDEDKHFVVALYDYXAMNDRDLQMLKGEKLQVLKGXGDWWLARSLVXGREGYVPSNFVARVESLEMERWFFRSQGRKEAERQLLAPINKAGSFLIRESEXNKGAFSLSVKDVXXQGELIKHYKIRCLDEGGYYISPRIXFPSLQALVQHYSKKGDGLCQRLXLPCVRPAPQNPWAQDEWEIPRQSLRLVRKLGSGQFGEVWMGYYKNNMKVAIKXLKEGXMSPEAFLGEANVMKALQHERLVRLYAVVXKEPIYIVXEYMARGCLLDFLKXDEGSRLSLPRLIDMSAQIAEGMAYIERMNSIHRDLRAANILVSEALCCKIADFGLARIIDSEYXAQEGAKFPIKWXAPEAIHFGVFXIKADVWSFGVLLMEVVXYGRVPYPGMSNPEVIRNLERGYRMPRPDXCPPELYRGVIAECWRSRPEERPXFEFLQSVLEDFYXAXERQYELQP

SEQ ID NO: 4232 - protein, 434 aa, Homo sapiens
  MOD_RES (20)..(20): Selenocysteine
  MOD_RES (31)..(31): Selenocysteine
  MOD_RES (84)..(84): Selenocysteine
  MOD_RES (97)..(98): Selenocysteine
  MOD_RES (123)..(123): Selenocysteine
  MOD_RES (146)..(146): Selenocysteine
  MOD_RES (199)..(199): Selenocysteine
  MOD_RES (204)..(204): Selenocysteine
  MOD_RES (233)..(233): Selenocysteine
  MOD_RES (241)..(241): Selenocysteine
  MOD_RES (255)..(255): Selenocysteine
  MOD_RES (319)..(319): Selenocysteine
  MOD_RES (331)..(331): Selenocysteine
  MOD_RES (342)..(342): Selenocysteine
  MOD_RES (359)..(359): Selenocysteine
  MOD_RES (388)..(388): Selenocysteine
  MOD_RES (411)..(411): Selenocysteine
  MOD_RES (424)..(424): Selenocysteine
  MOD_RES (426)..(426): Selenocysteine
MNDRDLQMLKGEKLQVLKGXGDWWLARSLVXGREGYVPSNFVARVESLEMERWFFRSQGRKEAERQLLAPINKAGSFLIRESEXNKGAFSLSVKDVXXQGELIKHYKIRCLDEGGYYISPRIXFPSLQALVQHYSKKGDGLCQRLXLPCVRPAPQNPWAQDEWEIPRQSLRLVRKLGSGQFGEVWMGYYKNNMKVAIKXLKEGXMSPEAFLGEANVMKALQHERLVRLYAVVXKEPIYIVXEYMARGCLLDFLKXDEGSRLSLPRLIDMSAQIAEGMAYIERMNSIHRDLRAANILVSEALCCKIADFGLARIIDSEYXAQEGAKFPIKWXAPEAIHFGVFXIKADVWSFGVLLMEVVXYGRVPYPGMSNPEVIRNLERGYRMPRPDXCPPELYRGVIAECWRSRPEERPXFEFLQSVLEDFYXAXERQYELQP

SEQ ID NO: 4233 - protein, 413 aa, Homo sapiens
  MOD_RES (20)..(20): Selenocysteine
  MOD_RES (36)..(36): Selenocysteine
  MOD_RES (41)..(41): Selenocysteine
  MOD_RES (50)..(50): Selenocysteine
  MOD_RES (57)..(57): Selenocysteine
  MOD_RES (68)..(68): Selenocysteine
  MOD_RES (80)..(81): Selenocysteine
  MOD_RES (99)..(99): Selenocysteine
  MOD_RES (114)..(114): Selenocysteine
  MOD_RES (121)..(122): Selenocysteine
  MOD_RES (125)..(125): Selenocysteine
  MOD_RES (127)..(127): Selenocysteine
  MOD_RES (134)..(134): Selenocysteine
  MOD_RES (150)..(150): Selenocysteine
  MOD_RES (162)..(162): Selenocysteine
  MOD_RES (165)..(165): Selenocysteine
  MOD_RES (171)..(171): Selenocysteine
  MOD_RES (182)..(182): Selenocysteine
  MOD_RES (200)..(201): Selenocysteine
  MOD_RES (203)..(203): Selenocysteine
  MOD_RES (206)..(206): Selenocysteine
  MOD_RES (221)..(221): Selenocysteine
  MOD_RES (260)..(260): Selenocysteine
  MOD_RES (283)..(283): Selenocysteine
  MOD_RES (298)..(298): Selenocysteine
  MOD_RES (321)..(321): Selenocysteine
  MOD_RES (327)..(327): Selenocysteine
  MOD_RES (337)..(337): Selenocysteine
  MOD_RES (357)..(357): Selenocysteine
  MOD_RES (359)..(359): Selenocysteine
  MOD_RES (401)..(401): Selenocysteine
  MOD_RES (412)..(413): Selenocysteine
MAAVPQNNLQEQLERHSARXLNNKLSLSKPKFSGFXFKKKXSSDNNVSVXNVSVAKXPVLRNKDVNVXEDFSFSEPLPNXXNQQRVKDFFKNAPAGQEXQRGGSKSLLPDFLQXPKEVVCXXQNXPXVKKSRDXALKKLEFSSSPDSLSXINDWDDMDDFDXSEXSKSFVXPPQSHFVRVSXAQKSKKGKRNFFKAQLYXXNXVKXDLPPPSSESEQIDLXEEQKDDSEWLSSDVICIDDGPIAEVHINEDAQESDSLKXHLEDERDNSEKKKNLEEAELHSXEKVPCIEFDDDDYDXDFVPPSPEEIISASSSSSKCLSXLKDLDXSDRKEDVLSXSKDLLSKPEKMSMQELNPEXSXDCDGSHCVAQAGLELLDLSNPPALASPKGWDYSHEPPCLAKXFFFFPQRKILXX

SEQ ID NO: 4234 - protein, 1286 aa, Homo sapiens
  MOD_RES (20)..(20): Selenocysteine
  MOD_RES (36)..(36): Selenocysteine
  MOD_RES (41)..(41): Selenocysteine
  MOD_RES (50)..(50): Selenocysteine
  MOD_RES (57)..(57): Selenocysteine
  MOD_RES (68)..(68): Selenocysteine
  MOD_RES (80)..(81): Selenocysteine
  MOD_RES (99)..(99): Selenocysteine
  MOD_RES (114)..(114): Selenocysteine
  MOD_RES (121)..(122): Selenocysteine
  MOD_RES (125)..(125): Selenocysteine
  MOD_RES (127)..(127): Selenocysteine
  MOD_RES (134)..(134): Selenocysteine
  MOD_RES (150)..(150): Selenocysteine
  MOD_RES (162)..(162): Selenocysteine
  MOD_RES (165)..(165): Selenocysteine
  MOD_RES (171)..(171): Selenocysteine
  MOD_RES (182)..(182): Selenocysteine
  MOD_RES (200)..(201): Selenocysteine
  MOD_RES (203)..(203): Selenocysteine
  MOD_RES (206)..(206): Selenocysteine
  MOD_RES (221)..(221): Selenocysteine
  MOD_RES (260)..(260): Selenocysteine
  MOD_RES (283)..(283): Selenocysteine
  MOD_RES (298)..(298): Selenocysteine
  MOD_RES (321)..(321): Selenocysteine
  MOD_RES (327)..(327): Selenocysteine
  MOD_RES (337)..(337): Selenocysteine
  MOD_RES (357)..(357): Selenocysteine
  MOD_RES (359)..(359): Selenocysteine
  MOD_RES (385)..(385): Selenocysteine
  MOD_RES (412)..(412): Selenocysteine
  MOD_RES (446)..(446): Selenocysteine
  MOD_RES (471)..(473): Selenocysteine
  MOD_RES (477)..(477): Selenocysteine
  MOD_RES (482)..(482): Selenocysteine
  MOD_RES (494)..(494): Selenocysteine
  MOD_RES (508)..(508): Selenocysteine
  MOD_RES (526)..(526): Selenocysteine
  MOD_RES (528)..(528): Selenocysteine
  MOD_RES (537)..(537): Selenocysteine
  MOD_RES (547)..(547): Selenocysteine
  MOD_RES (581)..(581): Selenocysteine
  MOD_RES (605)..(605): Selenocysteine
  MOD_RES (613)..(613): Selenocysteine
  MOD_RES (627)..(627): Selenocysteine
  MOD_RES (652)..(652): Selenocysteine
  MOD_RES (670)..(670): Selenocysteine
  MOD_RES (691)..(691): Selenocysteine
  MOD_RES (710)..(710): Selenocysteine
  MOD_RES (728)..(728): Selenocysteine
  MOD_RES (735)..(735): Selenocysteine
  MOD_RES (738)..(738): Selenocysteine
  MOD_RES (742)..(742): Selenocysteine
  MOD_RES (747)..(747): Selenocysteine
  MOD_RES (766)..(766): Selenocysteine
  MOD_RES (779)..(779): Selenocysteine
  MOD_RES (830)..(830): Selenocysteine
  MOD_RES (832)..(832): Selenocysteine
  MOD_RES (843)..(843): Selenocysteine
  MOD_RES (903)..(903): Selenocysteine
  MOD_RES (907)..(907): Selenocysteine
  MOD_RES (946)..(946): Selenocysteine
  MOD_RES (994)..(994): Selenocysteine
  MOD_RES (999)..(999): Selenocysteine
  MOD_RES (1015)..(1015): Selenocysteine
  MOD_RES (1018)..(1018): Selenocysteine
  MOD_RES (1034)..(1034): Selenocysteine
  MOD_RES (1069)..(1069): Selenocysteine
  MOD_RES (1074)..(1074): Selenocysteine
  MOD_RES (1078)..(1078): Selenocysteine
  MOD_RES (1110)..(1110): Selenocysteine
  MOD_RES (1136)..(1136): Selenocysteine
  MOD_RES (1158)..(1158): Selenocysteine
  MOD_RES (1199)..(1199): Selenocysteine
  MOD_RES (1219)..(1219): Selenocysteine
  MOD_RES (1232)..(1232): Selenocysteine
  MOD_RES (1240)..(1240): Selenocysteine
  MOD_RES (1254)..(1254): Selenocysteine
  MOD_RES (1258)..(1258): Selenocysteine
MAAVPQNNLQEQLERHSARXLNNKLSLSKPKFSGFXFKKKXSSDNNVSVXNVSVAKXPVLRNKDVNVXEDFSFSEPLPNXXNQQRVKDFFKNAPAGQEXQRGGSKSLLPDFLQXPKEVVCXXQNXPXVKKSRDXALKKLEFSSSPDSLSXINDWDDMDDFDXSEXSKSFVXPPQSHFVRVSXAQKSKKGKRNFFKAQLYXXNXVKXDLPPPSSESEQIDLXEEQKDDSEWLSSDVICIDDGPIAEVHINEDAQESDSLKXHLEDERDNSEKKKNLEEAELHSXEKVPCIEFDDDDYDXDFVPPSPEEIISASSSSSKCLSXLKDLDXSDRKEDVLSXSKDLLSKPEKMSMQELNPEXSXDCDARQISLQQQLIHVMEHICKLIDXIPDDKLKLLDCGNELLQQRNIRRKLLXEVDFNKSDASLLGSLWRYRPDSLDGPMEGDSCPXGNSMKELNFSHLPSNSVSPGDCLLXXXLGKXGFSAXRKNLFERPLFNXHLQKSFVSSNWAEXPRLGKKNESSYFPGNVLXSXAVKDQNKHXASINDLEREXQPSYDIDNFDIDDFDDDDDWEDIMHNLAASKSSXAAYQPIKEGRPIKSVSERLSSAKXDCLPVSSXAQNINFSESIQNYXDKSAQNLASRNLKHERFQSLSFPHXKEMMKIFHKKFGLHNFRXNQLEAINAALLGEDCFILMPXGGGKSLCYQLPACVSPGVXVVISPLRSLIVDQVQKLXSLDIPAXYLXGDKXDSEAXNIYLQLSKKDPIIKLLYVXPEKICASNRLISXLENLYERKLLARFVIDEAHCVSQWGHDFRQDYKRMNMLRQKFPSVPVMALXAXANPRVQKDILXQLKILRPQVFSMSFNRHNLKYYVLPKKPKKVAFDCLEWIRKHHPYDSGIIYCLSRRECDXMADXLQRDGLAALAYHAGLSDSARDEVQQKWINQDGCQVICAXIAFGMGIDKPDVRFVIHASLPKSVEGYYQESGRAGRDGEISHCLLFYXYHDVXRLKRLIMMEKDGNHHXREXHFNNLYSMVHYCENIXECRRIQLLAYFGENGFNPDFCKKHPDVSCDNCCKXKDYKXRDVXDDVKSIVRFVQEHSSSQGMRNIKHVGPSGRFXMNMLVDIFLESLSSDPEVLLQIDGVXEDKLEKYGAEVISVLQKYSEWXSPAEDSSPGISLSSSRGPGRSAAEELDEEIPVSSHYFASKXRNERKRKKMPASQRSKRRKXASSGSKAKGGSAXCRKISSKXKSSSIIGSSSASHXSQAXSGANSKLGIMAPPKPINRPFLKPSYAFS

SEQ ID NO: 4235 - protein, 1417 aa, Homo sapiens
  MOD_RES (20)..(20): Selenocysteine
  MOD_RES (36)..(36): Selenocysteine
  MOD_RES (41)..(41): Selenocysteine
  MOD_RES (50)..(50): Selenocysteine
  MOD_RES (57)..(57): Selenocysteine
  MOD_RES (68)..(68): Selenocysteine
  MOD_RES (80)..(81): Selenocysteine
  MOD_RES (99)..(99): Selenocysteine
  MOD_RES (114)..(114): Selenocysteine
  MOD_RES (121)..(122): Selenocysteine
  MOD_RES (125)..(125): Selenocysteine
  MOD_RES (127)..(127): Selenocysteine
  MOD_RES (134)..(134): Selenocysteine
  MOD_RES (150)..(150): Selenocysteine
  MOD_RES (162)..(162): Selenocysteine
  MOD_RES (165)..(165): Selenocysteine
  MOD_RES (171)..(171): Selenocysteine
  MOD_RES (182)..(182): Selenocysteine
  MOD_RES (200)..(201): Selenocysteine
  MOD_RES (203)..(203): Selenocysteine
  MOD_RES (206)..(206): Selenocysteine
  MOD_RES (221)..(221): Selenocysteine
  MOD_RES (260)..(260): Selenocysteine
  MOD_RES (283)..(283): Selenocysteine
  MOD_RES (298)..(298): Selenocysteine
  MOD_RES (321)..(321): Selenocysteine
  MOD_RES (327)..(327): Selenocysteine
  MOD_RES (337)..(337): Selenocysteine
  MOD_RES (357)..(357): Selenocysteine
  MOD_RES (359)..(359): Selenocysteine
  MOD_RES (385)..(385): Selenocysteine
  MOD_RES (412)..(412): Selenocysteine
  MOD_RES (446)..(446): Selenocysteine
  MOD_RES (471)..(473): Selenocysteine
  MOD_RES (477)..(477): Selenocysteine
  MOD_RES (482)..(482): Selenocysteine
  MOD_RES (494)..(494): Selenocysteine
  MOD_RES (508)..(508): Selenocysteine
  MOD_RES (526)..(526): Selenocysteine
  MOD_RES (528)..(528): Selenocysteine
  MOD_RES (537)..(537): Selenocysteine
  MOD_RES (547)..(547): Selenocysteine
  MOD_RES (581)..(581): Selenocysteine
  MOD_RES (605)..(605): Selenocysteine
  MOD_RES (613)..(613): Selenocysteine
  MOD_RES (627)..(627): Selenocysteine
  MOD_RES (652)..(652): Selenocysteine
  MOD_RES (670)..(670): Selenocysteine
  MOD_RES (691)..(691): Selenocysteine
  MOD_RES (710)..(710): Selenocysteine
  MOD_RES (728)..(728): Selenocysteine
  MOD_RES (735)..(735): Selenocysteine
  MOD_RES (738)..(738): Selenocysteine
  MOD_RES (742)..(742): Selenocysteine
  MOD_RES (747)..(747): Selenocysteine
  MOD_RES (766)..(766): Selenocysteine
  MOD_RES (779)..(779): Selenocysteine
  MOD_RES (830)..(830): Selenocysteine
  MOD_RES (832)..(832): Selenocysteine
  MOD_RES (843)..(843): Selenocysteine
  MOD_RES (903)..(903): Selenocysteine
  MOD_RES (907)..(907): Selenocysteine
  MOD_RES (946)..(946): Selenocysteine
  MOD_RES (994)..(994): Selenocysteine
  MOD_RES (999)..(999): Selenocysteine
  MOD_RES (1015)..(1015): Selenocysteine
  MOD_RES (1018)..(1018): Selenocysteine
  MOD_RES (1034)..(1034): Selenocysteine
  MOD_RES (1069)..(1069): Selenocysteine
  MOD_RES (1074)..(1074): Selenocysteine
  MOD_RES (1078)..(1078): Selenocysteine
  MOD_RES (1110)..(1110): Selenocysteine
  MOD_RES (1179)..(1179): Selenocysteine
  MOD_RES (1192)..(1192): Selenocysteine
  MOD_RES (1223)..(1223): Selenocysteine
  MOD_RES (1243)..(1243): Selenocysteine
  MOD_RES (1245)..(1245): Selenocysteine
  MOD_RES (1267)..(1267): Selenocysteine
  MOD_RES (1289)..(1289): Selenocysteine
  MOD_RES (1330)..(1330): Selenocysteine
  MOD_RES (1350)..(1350): Selenocysteine
  MOD_RES (1363)..(1363): Selenocysteine
  MOD_RES (1371)..(1371): Selenocysteine
  MOD_RES (1385)..(1385): Selenocysteine
  MOD_RES (1389)..(1389): Selenocysteine
MAAVPQNNLQEQLERHSARXLNNKLSLSKPKFSGFXFKKKXSSDNNVSVXNVSVAKXPVLRNKDVNVXEDFSFSEPLPNXXNQQRVKDFFKNAPAGQEXQRGGSKSLLPDFLQXPKEVVCXXQNXPXVKKSRDXALKKLEFSSSPDSLSXINDWDDMDDFDXSEXSKSFVXPPQSHFVRVSXAQKSKKGKRNFFKAQLYXXNXVKXDLPPPSSESEQIDLXEEQKDDSEWLSSDVICIDDGPIAEVHINEDAQESDSLKXHLEDERDNSEKKKNLEEAELHSXEKVPCIEFDDDDYDXDFVPPSPEEIISASSSSSKCLSXLKDLDXSDRKEDVLSXSKDLLSKPEKMSMQELNPEXSXDCDARQISLQQQLIHVMEHICKLIDXIPDDKLKLLDCGNELLQQRNIRRKLLXEVDFNKSDASLLGSLWRYRPDSLDGPMEGDSCPXGNSMKELNFSHLPSNSVSPGDCLLXXXLGKXGFSAXRKNLFERPLFNXHLQKSFVSSNWAEXPRLGKKNESSYFPGNVLXSXAVKDQNKHXASINDLEREXQPSYDIDNFDIDDFDDDDDWEDIMHNLAASKSSXAAYQPIKEGRPIKSVSERLSSAKXDCLPVSSXAQNINFSESIQNYXDKSAQNLASRNLKHERFQSLSFPHXKEMMKIFHKKFGLHNFRXNQLEAINAALLGEDCFILMPXGGGKSLCYQLPACVSPGVXVVISPLRSLIVDQVQKLXSLDIPAXYLXGDKXDSEAXNIYLQLSKKDPIIKLLYVXPEKICASNRLISXLENLYERKLLARFVIDEAHCVSQWGHDFRQDYKRMNMLRQKFPSVPVMALXAXANPRVQKDILXQLKILRPQVFSMSFNRHNLKYYVLPKKPKKVAFDCLEWIRKHHPYDSGIIYCLSRRECDXMADXLQRDGLAALAYHAGLSDSARDEVQQKWINQDGCQVICAXIAFGMGIDKPDVRFVIHASLPKSVEGYYQESGRAGRDGEISHCLLFYXYHDVXRLKRLIMMEKDGNHHXREXHFNNLYSMVHYCENIXECRRIQLLAYFGENGFNPDFCKKHPDVSCDNCCKXKDYKXRDVXDDVKSIVRFVQEHSSSQGMRNIKHVGPSGRFXMNMLVDIFLGSKSAKIQSGIFGKGSAYSRHNAERLFKKLILDKILDEDLYINANDQAIAYVMLGNKAQXVLNGNLKVDFMEXENSSSVKKQKALVAKVSQREEMVKKCLGELXEVCKSLGKVFGVHYFNIFNXVXLKKLAESLSSDPEVLLQIDGVXEDKLEKYGAEVISVLQKYSEWXSPAEDSSPGISLSSSRGPGRSAAEELDEEIPVSSHYFASKXRNERKRKKMPASQRSKRRKXASSGSKAKGGSAXCRKISSKXKSSSIIGSSSASHXSQAXSGANSKLGIMAPPKPINRPFLKPSYAFS

SEQ ID NO: 4236 - protein, 65 aa, Homo sapiens
  MOD_RES (8)..(8): Selenocysteine
  MOD_RES (56)..(56): Selenocysteine
MDKLNKIXVPASQKLRQLQKMVHDIKNNEGGIMNKIKKLKVKAPPSVPRRDYASDXCSLSWNPSK

SEQ ID NO: 4237 - protein, 404 aa, Homo sapiens
  MOD_RES (8)..(8): Selenocysteine
  MOD_RES (105)..(105): Selenocysteine
  MOD_RES (135)..(135): Selenocysteine
  MOD_RES (150)..(150): Selenocysteine
  MOD_RES (152)..(152): Selenocysteine
  MOD_RES (157)..(157): Selenocysteine
  MOD_RES (193)..(193): Selenocysteine
  MOD_RES (210)..(210): Selenocysteine
  MOD_RES (216)..(216): Selenocysteine
  MOD_RES (223)..(223): Selenocysteine
  MOD_RES (234)..(234): Selenocysteine
  MOD_RES (253)..(254): Selenocysteine
  MOD_RES (258)..(259): Selenocysteine
  MOD_RES (314)..(314): Selenocysteine
  MOD_RES (320)..(320): Selenocysteine
  MOD_RES (333)..(333): Selenocysteine
  MOD_RES (391)..(391): Selenocysteine
  MOD_RES (395)..(395): Selenocysteine
MDKLNKIXVPASQKLRQLQKMVHDIKNNEGGIMNKIKKLKVKAPPSVPRRDYASESPADEEEQWSDDFDSDYENPDEHSDSEMYVMPAEENADDSYEPPPVEQEXRPVHPALPFARGEYIDNRSSQRHSPPFSKXLPSKPSWPSEKARLXSXLPALXALQKPQVPPKPKGLLEDEADYVVPVEDNDENYIHPXESSSPPPEKAPMVNRSXKPNSSXPASPPGXASGRNSGAWEXKSPPPAAPSPLPRAGKKPXXPLKXXPVASQQNASSVCEEKPIPAERHRGSSHRQEAVQSPVFPPAQKQIHQKPIPLPRFXEGGNPXVDGPLPSFSSNSXISEQEAGVLCKPWYAGACDRKSAEEALHRSNKYFGSVAEIIRNHQHSPLVLIDSQNNXKDSXRLKYAVKVS

SEQ ID NO: 4238 - protein, 456 aa, Homo sapiens
  MOD_RES (8)..(8): Selenocysteine
  MOD_RES (105)..(105): Selenocysteine
  MOD_RES (135)..(135): Selenocysteine
  MOD_RES (150)..(150): Selenocysteine
  MOD_RES (152)..(152): Selenocysteine
  MOD_RES (157)..(157): Selenocysteine
  MOD_RES (193)..(193): Selenocysteine
  MOD_RES (210)..(210): Selenocysteine
  MOD_RES (216)..(216): Selenocysteine
  MOD_RES (223)..(223): Selenocysteine
  MOD_RES (234)..(234): Selenocysteine
  MOD_RES (253)..(254): Selenocysteine
  MOD_RES (258)..(259): Selenocysteine
  MOD_RES (314)..(314): Selenocysteine
  MOD_RES (320)..(320): Selenocysteine
  MOD_RES (333)..(333): Selenocysteine
  MOD_RES (384)..(384): Selenocysteine
  MOD_RES (404)..(404): Selenocysteine
  MOD_RES (443)..(443): Selenocysteine
  MOD_RES (447)..(447): Selenocysteine
MDKLNKIXVPASQKLRQLQKMVHDIKNNEGGIMNKIKKLKVKAPPSVPRRDYASESPADEEEQWSDDFDSDYENPDEHSDSEMYVMPAEENADDSYEPPPVEQEXRPVHPALPFARGEYIDNRSSQRHSPPFSKXLPSKPSWPSEKARLXSXLPALXALQKPQVPPKPKGLLEDEADYVVPVEDNDENYIHPXESSSPPPEKAPMVNRSXKPNSSXPASPPGXASGRNSGAWEXKSPPPAAPSPLPRAGKKPXXPLKXXPVASQQNASSVCEEKPIPAERHRGSSHRQEAVQSPVFPPAQKQIHQKPIPLPRFXEGGNPXVDGPLPSFSSNSXISEQEAGVLCKPWYAGACDRKSAEEALHRSNKDGSFLIRKSSGHDSKQPYXLVVFFNKRVYNIPVRFIEAXKQYALGRKKNGEEYFGSVAEIIRNHQHSPLVLIDSQNNXKDSXRLKYAVKVS

SEQ ID NO: 4239 - protein, 433 aa, Homo sapiens
  MOD_RES (8)..(8): Selenocysteine
  MOD_RES (105)..(105): Selenocysteine
  MOD_RES (135)..(135): Selenocysteine
  MOD_RES (150)..(150): Selenocysteine
  MOD_RES (152)..(152): Selenocysteine
  MOD_RES (157)..(157): Selenocysteine
  MOD_RES (193)..(193): Selenocysteine
  MOD_RES (211)..(211): Selenocysteine
  MOD_RES (230)..(231): Selenocysteine
  MOD_RES (235)..(236): Selenocysteine
  MOD_RES (291)..(291): Selenocysteine
  MOD_RES (297)..(297): Selenocysteine
  MOD_RES (310)..(310): Selenocysteine
  MOD_RES (361)..(361): Selenocysteine
  MOD_RES (381)..(381): Selenocysteine
  MOD_RES (420)..(420): Selenocysteine
  MOD_RES (424)..(424): Selenocysteine
MDKLNKIXVPASQKLRQLQKMVHDIKNNEGGIMNKIKKLKVKAPPSVPRRDYASESPADEEEQWSDDFDSDYENPDEHSDSEMYVMPAEENADDSYEPPPVEQEXRPVHPALPFARGEYIDNRSSQRHSPPFSKXLPSKPSWPSEKARLXSXLPALXALQKPQVPPKPKGLLEDEADYVVPVEDNDENYIHPXESSSPPPEKGRNSGAWEXKSPPPAAPSPLPRAGKKPXXPLKXXPVASQQNASSVCEEKPIPAERHRGSSHRQEAVQSPVFPPAQKQIHQKPIPLPRFXEGGNPXVDGPLPSFSSNSXISEQEAGVLCKPWYAGACDRKSAEEALHRSNKDGSFLIRKSSGHDSKQPYXLVVFFNKRVYNIPVRFIEAXKQYALGRKKNGEEYFGSVAEIIRNHQHSPLVLIDSQNNXKDSXRLKYAVKVS

SEQ ID NO: 4240 - protein, 121 aa, Homo sapiens
  MOD_RES (8)..(8): Selenocysteine
  MOD_RES (105)..(105): Selenocysteine
MDKLNKIXVPASQKLRQLQKMVHDIKNNEGGIMNKIKKLKVKAPPSVPRRDYASESPADEEEQWSDDFDSDYENPDEHSDSEMYVMPAEENADDSYEPPPVEQEXRPVHPALPFARGEYIG

SEQ ID NO: 4241 - protein, 299 aa, Homo sapiens
  MOD_RES (8)..(8): Selenocysteine
  MOD_RES (105)..(105): Selenocysteine
  MOD_RES (118)..(118): Selenocysteine
  MOD_RES (129)..(129): Selenocysteine
  MOD_RES (148)..(149): Selenocysteine
  MOD_RES (153)..(154): Selenocysteine
  MOD_RES (209)..(209): Selenocysteine
  MOD_RES (215)..(215): Selenocysteine
  MOD_RES (228)..(228): Selenocysteine
  MOD_RES (286)..(286): Selenocysteine
  MOD_RES (290)..(290): Selenocysteine
MDKLNKIXVPASQKLRQLQKMVHDIKNNEGGIMNKIKKLKVKAPPSVPRRDYASESPADEEEQWSDDFDSDYENPDEHSDSEMYVMPAEENADDSYEPPPVEQEXRPVHPALPFARGXASGRNSGAWEXKSPPPAAPSPLPRAGKKPXXPLKXXPVASQQNASSVCEEKPIPAERHRGSSHRQEAVQSPVFPPAQKQIHQKPIPLPRFXEGGNPXVDGPLPSFSSNSXISEQEAGVLCKPWYAGACDRKSAEEALHRSNKYFGSVAEIIRNHQHSPLVLIDSQNNXKDSXRLKYAVKVS

SEQ ID NO: 4242 - protein, 117 aa, Homo sapiens
  MOD_RES (10)..(10): Selenocysteine
  MOD_RES (13)..(13): Selenocysteine
  MOD_RES (17)..(17): Selenocysteine
  MOD_RES (19)..(19): Selenocysteine
  MOD_RES (33)..(33): Selenocysteine
  MOD_RES (105)..(105): Selenocysteine
CRDMFSKMAXYLXGELXAXSEDYKLLENMNKLXSLKYLEMKDIAINISRNLKDLNQKYAGLQPYLDQINVIEEQVAALEQAAYKLDAYSKKLGNRFYFCFDVIKXASCQHILSKHNS

SEQ ID NO: 4243 - protein, 142 aa, Homo sapiens
  MOD_RES (11)..(11): Selenocysteine
  MOD_RES (25)..(25): Selenocysteine
  MOD_RES (38)..(38): Selenocysteine
  MOD_RES (50)..(50): Selenocysteine
  MOD_RES (53)..(53): Selenocysteine
  MOD_RES (57)..(57): Selenocysteine
  MOD_RES (59)..(59): Selenocysteine
  MOD_RES (73)..(73): Selenocysteine
MAAAAEGVLAXRSDEPARDDAAVEXAEEAKEPAEADIXELCRDMFSKMAXYLXGELXAXSEDYKLLENMNKLXSLKYLEMKDIAINISRNLKDLNQKYAGLQPYLDQINVIEEQVAALEQAAYKLDAYSKKLEAKYKKLEKR

SEQ ID NO: 4244 - protein, 99 aa, Homo sapiens
  MOD_RES (7)..(7): Selenocysteine
  MOD_RES (10)..(10): Selenocysteine
  MOD_RES (14)..(14): Selenocysteine
  MOD_RES (16)..(16): Selenocysteine
  MOD_RES (30)..(30): Selenocysteine
MFSKMAXYLXGELXAXSEDYKLLENMNKLXSLKYLEMKDIAINISRNLKDLNQKYAGLQPYLDQINVIEEQVAALEQAAYKLDAYSKKLEAKYKKLEKR

SEQ ID NO: 4245 - protein, 95 aa, Homo sapiens
  MOD_RES (12)..(12): Selenocysteine
  MOD_RES (26)..(26): Selenocysteine
MRLPRKSLEVAXSEDYKLLENMNKLXSLKYLEMKDIAINISRNLKDLNQKYAGLQPYLDQINVIEEQVAALEQAAYKLDAYSKKLEAKYKKLEKR

SEQ ID NO: 4246 - protein, 127 aa, Homo sapiens
  MOD_RES (2)..(3): Selenocysteine
  MOD_RES (8)..(8): Selenocysteine
  MOD_RES (11)..(11): Selenocysteine
  MOD_RES (13)..(13): Selenocysteine
  MOD_RES (26)..(26): Selenocysteine
  MOD_RES (36)..(36): Selenocysteine
  MOD_RES (70)..(70): Selenocysteine
  MOD_RES (89)..(89): Selenocysteine
  MOD_RES (97)..(97): Selenocysteine
MXXKNLEXKVXVXSSPIRGAGDGMEXEEPPKSVEVXSGVQSRKHHSLQSPWKKAVPSESPGVLQLGKMLXEKAMEVKAVRILVPKAAIXHDIPNKNXKVKSLGHHKGEFLGQSEGVIEPNKELSEVK

SEQ ID NO: 4247 - protein, 250 aa, Homo sapiens
  MOD_RES (2)..(3): Selenocysteine
  MOD_RES (8)..(8): Selenocysteine
  MOD_RES (11)..(11): Selenocysteine
  MOD_RES (13)..(13): Selenocysteine
  MOD_RES (26)..(26): Selenocysteine
  MOD_RES (36)..(36): Selenocysteine
  MOD_RES (70)..(70): Selenocysteine
  MOD_RES (89)..(89): Selenocysteine
  MOD_RES (97)..(97): Selenocysteine
  MOD_RES (155)..(155): Selenocysteine
  MOD_RES (198)..(198): Selenocysteine
  MOD_RES (230)..(230): Selenocysteine
MXXKNLEXKVXVXSSPIRGAGDGMEXEEPPKSVEVXSGVQSRKHHSLQSPWKKAVPSESPGVLQLGKMLXEKAMEVKAVRILVPKAAIXHDIPNKNXKVKSLGHHKGEFLGQSEGVIEPNKELSEVKNVLEKLKNSERRLLQDKEGLSNQLRVQXEVNRELKKLLVASVGDDLQYHFERLAREKNQLILENEALGRNXAQLSEQLERMSIQCDVWRSKFLASRVMADELXNSRAALQRQNRDAHGAIQDL

SEQ ID NO: 4248 - protein, 400 aa, Homo sapiens
  MOD_RES (2)..(3): Selenocysteine
  MOD_RES (8)..(8): Selenocysteine
  MOD_RES (11)..(11): Selenocysteine
  MOD_RES (13)..(13): Selenocysteine
  MOD_RES (26)..(26): Selenocysteine
  MOD_RES (36)..(36): Selenocysteine
  MOD_RES (70)..(70): Selenocysteine
  MOD_RES (89)..(89): Selenocysteine
  MOD_RES (97)..(97): Selenocysteine
  MOD_RES (155)..(155): Selenocysteine
  MOD_RES (198)..(198): Selenocysteine
  MOD_RES (230)..(230): Selenocysteine
  MOD_RES (264)..(264): Selenocysteine
  MOD_RES (282)..(282): Selenocysteine
  MOD_RES (292)..(292): Selenocysteine
  MOD_RES (298)..(298): Selenocysteine
  MOD_RES (325)..(325): Selenocysteine
  MOD_RES (331)..(331): Selenocysteine
  MOD_RES (339)..(339): Selenocysteine
  MOD_RES (348)..(348): Selenocysteine
  MOD_RES (364)..(365): Selenocysteine
  MOD_RES (369)..(369): Selenocysteine
  MOD_RES (380)..(380): Selenocysteine
  MOD_RES (386)..(386): Selenocysteine
MXXKNLEXKVXVXSSPIRGAGDGMEXEEPPKSVEVXSGVQSRKHHSLQSPWKKAVPSESPGVLQLGKMLXEKAMEVKAVRILVPKAAIXHDIPNKNXKVKSLGHHKGEFLGQSEGVIEPNKELSEVKNVLEKLKNSERRLLQDKEGLSNQLRVQXEVNRELKKLLVASVGDDLQYHFERLAREKNQLILENEALGRNXAQLSEQLERMSIQCDVWRSKFLASRVMADELXNSRAALQRQNRDAHGAIQDLLSEREQFRQEMIAXQKLLEELLVSLQWGREQXYSPSVQPHSXAELALXNHKLAKAVNSHLLGNVGINNQKKIPSXVEFCSXPAEKMAEXVLRILDPVXCKESSPDNPFFESSPXXLLAXKKNIGRFHPYXRYENIXFNCCNHCRGELIAL

SEQ ID NO: 4249 - protein, 174 aa, Homo sapiens
  MOD_RES (2)..(3): Selenocysteine
  MOD_RES (8)..(8): Selenocysteine
  MOD_RES (11)..(11): Selenocysteine
  MOD_RES (13)..(13): Selenocysteine
  MOD_RES (26)..(26): Selenocysteine
  MOD_RES (36)..(36): Selenocysteine
  MOD_RES (70)..(70): Selenocysteine
  MOD_RES (89)..(89): Selenocysteine
  MOD_RES (97)..(97): Selenocysteine
  MOD_RES (155)..(155): Selenocysteine
  MOD_RES (167)..(168): Selenocysteine
  MOD_RES (173)..(173): Selenocysteine
MXXKNLEXKVXVXSSPIRGAGDGMEXEEPPKSVEVXSGVQSRKHHSLQSPWKKAVPSESPGVLQLGKMLXEKAMEVKAVRILVPKAAIXHDIPNKNXKVKSLGHHKGEFLGQSEGVIEPNKELSEVKNVLEKLKNSERRLLQDKEGLSNQLRVQXEVRRALIDKMSXXLYVWXF

SEQ ID NO: 4250 - protein, 13 aa, Homo sapiens
MEPSQCVEELEDD

SEQ ID NO: 4251 - protein, 61 aa, Homo sapiens
  MOD_RES (24)..(24): Selenocysteine
  MOD_RES (53)..(53): Selenocysteine
MEPSQCVEELEDDVFQPEDGEPVXQPGSLLSADLFAQSLLDCPLSRLQLFPLXHCCGPGLR

SEQ ID NO: 4252 - protein, 129 aa, Homo sapiens
  MOD_RES (24)..(24): Selenocysteine
  MOD_RES (53)..(53): Selenocysteine
  MOD_RES (63)..(63): Selenocysteine
  MOD_RES (70)..(70): Selenocysteine
  MOD_RES (72)..(72): Selenocysteine
  MOD_RES (89)..(89): Selenocysteine
MEPSQCVEELEDDVFQPEDGEPVXQPGSLLSADLFAQSLLDCPLSRLQLFPLXHCCGPGLRPXSQEDKAXQXLSPASPSQGVMLPCGVXEEPQRLFYAPAEPKSCVVADPPLPAQPCFEWRREQERGRP

SEQ ID NO: 4253 - protein, 163 aa, Homo sapiens
  MOD_RES (24)..(24): Selenocysteine
  MOD_RES (53)..(53): Selenocysteine
  MOD_RES (63)..(63): Selenocysteine
  MOD_RES (70)..(70): Selenocysteine
  MOD_RES (72)..(72): Selenocysteine
  MOD_RES (89)..(89): Selenocysteine
MEPSQCVEELEDDVFQPEDGEPVXQPGSLLSADLFAQSLLDCPLSRLQLFPLXHCCGPGLRPXSQEDKAXQXLSPASPSQGVMLPCGVXEEPQRLFYGNAGYRLPLPASFPAVLPIGEQPPEGQWQHQAEHQQNQNRVWWQILLFLHNLALNGEENRNGAGPR

SEQ ID NO: 4254 - protein, 184 aa, Homo sapiens
  MOD_RES (24)..(24): Selenocysteine
  MOD_RES (53)..(53): Selenocysteine
  MOD_RES (63)..(63): Selenocysteine
  MOD_RES (70)..(70): Selenocysteine
  MOD_RES (72)..(72): Selenocysteine
  MOD_RES (89)..(89): Selenocysteine
MEPSQCVEELEDDVFQPEDGEPVXQPGSLLSADLFAQSLLDCPLSRLQLFPLXHCCGPGLRPXSQEDKAXQXLSPASPSQGVMLPCGVXEEPQRLFYGNAGYRLPLPASFPAVLPIGEQPPEGQWQHQAEVQIARKLQCIADQFHRLHVQQHQQNQNRVWWQILLFLHNLALNGEENRNGAGPR

SEQ ID NO: 4255 - protein, 622 aa, Homo sapiens
  MOD_RES (29)..(29): Selenocysteine
  MOD_RES (78)..(78): Selenocysteine
  MOD_RES (92)..(92): Selenocysteine
  MOD_RES (94)..(94): Selenocysteine
  MOD_RES (100)..(100): Selenocysteine
  MOD_RES (123)..(123): Selenocysteine
  MOD_RES (144)..(144): Selenocysteine
  MOD_RES (162)..(162): Selenocysteine
  MOD_RES (165)..(165): Selenocysteine
  MOD_RES (170)..(170): Selenocysteine
  MOD_RES (179)..(179): Selenocysteine
  MOD_RES (226)..(226): Selenocysteine
  MOD_RES (263)..(263): Selenocysteine
  MOD_RES (276)..(276): Selenocysteine
  MOD_RES (285)..(285): Selenocysteine
  MOD_RES (303)..(303): Selenocysteine
  MOD_RES (325)..(325): Selenocysteine
  MOD_RES (330)..(330): Selenocysteine
  MOD_RES (355)..(355): Selenocysteine
  MOD_RES (365)..(365): Selenocysteine
  MOD_RES (408)..(408): Selenocysteine
  MOD_RES (476)..(476): Selenocysteine
  MOD_RES (504)..(504): Selenocysteine
  MOD_RES (521)..(521): Selenocysteine
  MOD_RES (566)..(566): Selenocysteine
  MOD_RES (610)..(610): Selenocysteine
  MOD_RES (618)..(618): Selenocysteine
MPGVARLPLLLGLLLLPRPGRPLDLADYXYDLAEEDDSEPLNYKDPCKAAAFLGDIALDEEDLRAFQVQQAVDLRRHXARKSSIKAAVPGNXSXPSCQSXNGQPQRGACGRWRGRSRSRRAAXSRPERVWPDGVIPFVIGGNFXGSQRAVFRQAMRHWEKHXCVXFLERXDEDSYIVFXYRPCGCCSYVGRRGGGPQAISIGKNCDKFGIVVHELGHVVGFWHEHXRPDRDRHVSIVRENIQPGQEYNFLKMEPQEVESLGEXYDFDSIMHYARNXFSRGIFLDXIVPKYEVNGVKPPIGQRXRLSKGDIAQARKLYKCPACGEXLQDSXGNFSSPEYPNGYSAHMHCVWRISVXPGEKIILNFXSLDLYRSRLCWYDYVEVRDGFWRKAPLRGRFCGSKLPEPIVSXDSRLWVEFRSSSNWVGKGFFAVYEAICGGDVKKDYGHIQSPNYPDDYRPSKVCIWRIQVSEGFHVGLXFQSFEIERHDSCAYDYLEVRDGHSESSXLIGRYCGYEKPDDIKSXSSRLWLKFVSDGSINKAGFAVNFFKEVDECSRPNRGGCEQRCLNXLGSYKCSCDPGYELAPDKRRCEGCYDLQVGKPLLWDRHCFRLSXHGPEMLGXALRG

SEQ ID NO: 4256 - protein, 717 aa, Homo sapiens
  MOD_RES (29)..(29): Selenocysteine
  MOD_RES (78)..(78): Selenocysteine
  MOD_RES (92)..(92): Selenocysteine
  MOD_RES (94)..(94): Selenocysteine
  MOD_RES (100)..(100): Selenocysteine
  MOD_RES (123)..(123): Selenocysteine
  MOD_RES (144)..(144): Selenocysteine
  MOD_RES (162)..(162): Selenocysteine
  MOD_RES (165)..(165): Selenocysteine
  MOD_RES (170)..(170): Selenocysteine
  MOD_RES (179)..(179): Selenocysteine
  MOD_RES (226)..(226): Selenocysteine
  MOD_RES (263)..(263): Selenocysteine
  MOD_RES (276)..(276): Selenocysteine
  MOD_RES (285)..(285): Selenocysteine
  MOD_RES (303)..(303): Selenocysteine
  MOD_RES (325)..(325): Selenocysteine
  MOD_RES (330)..(330): Selenocysteine
  MOD_RES (355)..(355): Selenocysteine
  MOD_RES (365)..(365): Selenocysteine
  MOD_RES (408)..(408): Selenocysteine
  MOD_RES (476)..(476): Selenocysteine
  MOD_RES (504)..(504): Selenocysteine
  MOD_RES (521)..(521): Selenocysteine
  MOD_RES (566)..(566): Selenocysteine
  MOD_RES (596)..(596): Selenocysteine
  MOD_RES (603)..(603): Selenocysteine
  MOD_RES (625)..(625): Selenocysteine
  MOD_RES (638)..(638): Selenocysteine
  MOD_RES (656)..(656): Selenocysteine
  MOD_RES (675)..(675): Selenocysteine
  MOD_RES (690)..(690): Selenocysteine
MPGVARLPLLLGLLLLPRPGRPLDLADYXYDLAEEDDSEPLNYKDPCKAAAFLGDIALDEEDLRAFQVQQAVDLRRHXARKSSIKAAVPGNXSXPSCQSXNGQPQRGACGRWRGRSRSRRAAXSRPERVWPDGVIPFVIGGNFXGSQRAVFRQAMRHWEKHXCVXFLERXDEDSYIVFXYRPCGCCSYVGRRGGGPQAISIGKNCDKFGIVVHELGHVVGFWHEHXRPDRDRHVSIVRENIQPGQEYNFLKMEPQEVESLGEXYDFDSIMHYARNXFSRGIFLDXIVPKYEVNGVKPPIGQRXRLSKGDIAQARKLYKCPACGEXLQDSXGNFSSPEYPNGYSAHMHCVWRISVXPGEKIILNFXSLDLYRSRLCWYDYVEVRDGFWRKAPLRGRFCGSKLPEPIVSXDSRLWVEFRSSSNWVGKGFFAVYEAICGGDVKKDYGHIQSPNYPDDYRPSKVCIWRIQVSEGFHVGLXFQSFEIERHDSCAYDYLEVRDGHSESSXLIGRYCGYEKPDDIKSXSSRLWLKFVSDGSINKAGFAVNFFKEVDECSRPNRGGCEQRCLNXLGSYKCSCDPGYELAPDKRRCEAACGGFLXKLNGSIXSPGWPKEYPPNKNCIWQLVAPXQYRISLQFDFFEXEGNDVCKYDFVEVRSGLXADSKLHGKFCGSEKPEVIXSQYNNMRVEFKSDNXVSKKGFKAHFFSGGELFGLLGHPPRRP

SEQ ID NO: 4257 - protein, 730 aa, Homo sapiens
  MOD_RES (29)..(29): Selenocysteine
  MOD_RES (78)..(78): Selenocysteine
  MOD_RES (92)..(92): Selenocysteine
  MOD_RES (94)..(94): Selenocysteine
  MOD_RES (100)..(100): Selenocysteine
  MOD_RES (123)..(123): Selenocysteine
  MOD_RES (144)..(144): Selenocysteine
  MOD_RES (162)..(162): Selenocysteine
  MOD_RES (165)..(165): Selenocysteine
  MOD_RES (170)..(170): Selenocysteine
  MOD_RES (179)..(179): Selenocysteine
  MOD_RES (226)..(226): Selenocysteine
  MOD_RES (263)..(263): Selenocysteine
  MOD_RES (276)..(276): Selenocysteine
  MOD_RES (285)..(285): Selenocysteine
  MOD_RES (303)..(303): Selenocysteine
  MOD_RES (325)..(325): Selenocysteine
  MOD_RES (330)..(330): Selenocysteine
  MOD_RES (355)..(355): Selenocysteine
  MOD_RES (365)..(365): Selenocysteine
  MOD_RES (408)..(408): Selenocysteine
  MOD_RES (476)..(476): Selenocysteine
  MOD_RES (504)..(504): Selenocysteine
  MOD_RES (521)..(521): Selenocysteine
  MOD_RES (566)..(566): Selenocysteine
  MOD_RES (596)..(596): Selenocysteine
  MOD_RES (603)..(603): Selenocysteine
  MOD_RES (625)..(625): Selenocysteine
  MOD_RES (638)..(638): Selenocysteine
  MOD_RES (656)..(656): Selenocysteine
  MOD_RES (675)..(675): Selenocysteine
  MOD_RES (690)..(690): Selenocysteine
  MOD_RES (728)..(728): Selenocysteine
MPGVARLPLLLGLLLLPRPGRPLDLADYXYDLAEEDDSEPLNYKDPCKAAAFLGDIALDEEDLRAFQVQQAVDLRRHXARKSSIKAAVPGNXSXPSCQSXNGQPQRGACGRWRGRSRSRRAAXSRPERVWPDGVIPFVIGGNFXGSQRAVFRQAMRHWEKHXCVXFLERXDEDSYIVFXYRPCGCCSYVGRRGGGPQAISIGKNCDKFGIVVHELGHVVGFWHEHXRPDRDRHVSIVRENIQPGQEYNFLKMEPQEVESLGEXYDFDSIMHYARNXFSRGIFLDXIVPKYEVNGVKPPIGQRXRLSKGDIAQARKLYKCPACGEXLQDSXGNFSSPEYPNGYSAHMHCVWRISVXPGEKIILNFXSLDLYRSRLCWYDYVEVRDGFWRKAPLRGRFCGSKLPEPIVSXDSRLWVEFRSSSNWVGKGFFAVYEAICGGDVKKDYGHIQSPNYPDDYRPSKVCIWRIQVSEGFHVGLXFQSFEIERHDSCAYDYLEVRDGHSESSXLIGRYCGYEKPDDIKSXSSRLWLKFVSDGSINKAGFAVNFFKEVDECSRPNRGGCEQRCLNXLGSYKCSCDPGYELAPDKRRCEAACGGFLXKLNGSIXSPGWPKEYPPNKNCIWQLVAPXQYRISLQFDFFEXEGNDVCKYDFVEVRSGLXADSKLHGKFCGSEKPEVIXSQYNNMRVEFKSDNXVSKKGFKAHFFSEKRPALQPPRGRPHQLKFRVQKRNRXPQ

SEQ ID NO: 4258 - protein, 986 aa, Homo sapiens
  MOD_RES (29)..(29): Selenocysteine
  MOD_RES (78)..(78): Selenocysteine
  MOD_RES (92)..(92): Selenocysteine
  MOD_RES (94)..(94): Selenocysteine
  MOD_RES (100)..(100): Selenocysteine
  MOD_RES (123)..(123): Selenocysteine
  MOD_RES (144)..(144): Selenocysteine
  MOD_RES (162)..(162): Selenocysteine
  MOD_RES (165)..(165): Selenocysteine
  MOD_RES (170)..(170): Selenocysteine
  MOD_RES (179)..(179): Selenocysteine
  MOD_RES (226)..(226): Selenocysteine
  MOD_RES (263)..(263): Selenocysteine
  MOD_RES (276)..(276): Selenocysteine
  MOD_RES (285)..(285): Selenocysteine
  MOD_RES (303)..(303): Selenocysteine
  MOD_RES (325)..(325): Selenocysteine
  MOD_RES (330)..(330): Selenocysteine
  MOD_RES (355)..(355): Selenocysteine
  MOD_RES (365)..(365): Selenocysteine
  MOD_RES (408)..(408): Selenocysteine
  MOD_RES (476)..(476): Selenocysteine
  MOD_RES (504)..(504): Selenocysteine
  MOD_RES (521)..(521): Selenocysteine
  MOD_RES (566)..(566): Selenocysteine
  MOD_RES (596)..(596): Selenocysteine
  MOD_RES (603)..(603): Selenocysteine
  MOD_RES (625)..(625): Selenocysteine
  MOD_RES (638)..(638): Selenocysteine
  MOD_RES (656)..(656): Selenocysteine
  MOD_RES (675)..(675): Selenocysteine
  MOD_RES (690)..(690): Selenocysteine
  MOD_RES (721)..(721): Selenocysteine
  MOD_RES (752)..(752): Selenocysteine
  MOD_RES (754)..(754): Selenocysteine
  MOD_RES (757)..(757): Selenocysteine
  MOD_RES (759)..(759): Selenocysteine
  MOD_RES (774)..(774): Selenocysteine
  MOD_RES (780)..(780): Selenocysteine
  MOD_RES (788)..(788): Selenocysteine
  MOD_RES (833)..(833): Selenocysteine
  MOD_RES (858)..(858): Selenocysteine
  MOD_RES (870)..(870): Selenocysteine
  MOD_RES (908)..(908): Selenocysteine
  MOD_RES (915)..(915): Selenocysteine
  MOD_RES (931)..(931): Selenocysteine
  MOD_RES (963)..(963): Selenocysteine
  MOD_RES (965)..(965): Selenocysteine
  MOD_RES (974)..(974): Selenocysteine
  MOD_RES (976)..(976): Selenocysteine
  MOD_RES (981)..(981): Selenocysteine
MPGVARLPLLLGLLLLPRPGRPLDLADYXYDLAEEDDSEPLNYKDPCKAAAFLGDIALDEEDLRAFQVQQAVDLRRHXARKSSIKAAVPGNXSXPSCQSXNGQPQRGACGRWRGRSRSRRAAXSRPERVWPDGVIPFVIGGNFXGSQRAVFRQAMRHWEKHXCVXFLERXDEDSYIVFXYRPCGCCSYVGRRGGGPQAISIGKNCDKFGIVVHELGHVVGFWHEHXRPDRDRHVSIVRENIQPGQEYNFLKMEPQEVESLGEXYDFDSIMHYARNXFSRGIFLDXIVPKYEVNGVKPPIGQRXRLSKGDIAQARKLYKCPACGEXLQDSXGNFSSPEYPNGYSAHMHCVWRISVXPGEKIILNFXSLDLYRSRLCWYDYVEVRDGFWRKAPLRGRFCGSKLPEPIVSXDSRLWVEFRSSSNWVGKGFFAVYEAICGGDVKKDYGHIQSPNYPDDYRPSKVCIWRIQVSEGFHVGLXFQSFEIERHDSCAYDYLEVRDGHSESSXLIGRYCGYEKPDDIKSXSSRLWLKFVSDGSINKAGFAVNFFKEVDECSRPNRGGCEQRCLNXLGSYKCSCDPGYELAPDKRRCEAACGGFLXKLNGSIXSPGWPKEYPPNKNCIWQLVAPXQYRISLQFDFFEXEGNDVCKYDFVEVRSGLXADSKLHGKFCGSEKPEVIXSQYNNMRVEFKSDNXVSKKGFKAHFFSDKDECSKDNGGCQQDCVNXFGSYECQCRSGFVLHDNKHDCKEAGCDHKVXSXSGXIXSPNWPDKYPSKKECXWAISSXPGHRVKLXFMEMDIESQPECAYDHLEVFDGRDAKAPVLGRFCGSKKPEPVLAXGSRMFLRFYSDNSVQRKGFQASHAXECGGQVRADVKXKDLYSHAQFGDNNYPGGVDCEWVIVAEEGYGVELVFQXFEVEEEXDCGYDYMELFDGYDSXAPRLGRYCGSGPPEEVYSAGDSVLVKFHSDDXIXKKGFHLRYXSXKFQDXLHSRK

SEQ ID NO: 4259 - protein, 302 aa, Homo sapiens
  MOD_RES (29)..(29): Selenocysteine
  MOD_RES (78)..(78): Selenocysteine
  MOD_RES (92)..(92): Selenocysteine
  MOD_RES (94)..(94): Selenocysteine
  MOD_RES (100)..(100): Selenocysteine
  MOD_RES (123)..(123): Selenocysteine
  MOD_RES (144)..(144): Selenocysteine
  MOD_RES (162)..(162): Selenocysteine
  MOD_RES (165)..(165): Selenocysteine
  MOD_RES (170)..(170): Selenocysteine
  MOD_RES (179)..(179): Selenocysteine
  MOD_RES (226)..(226): Selenocysteine
  MOD_RES (278)..(278): Selenocysteine
  MOD_RES (297)..(297): Selenocysteine
MPGVARLPLLLGLLLLPRPGRPLDLADYXYDLAEEDDSEPLNYKDPCKAAAFLGDIALDEEDLRAFQVQQAVDLRRHXARKSSIKAAVPGNXSXPSCQSXNGQPQRGACGRWRGRSRSRRAAXSRPERVWPDGVIPFVIGGNFXGSQRAVFRQAMRHWEKHXCVXFLERXDEDSYIVFXYRPCGCCSYVGRRGGGPQAISIGKNCDKFGIVVHELGHVVGFWHEHXRPDRDRHVSIVRENIQPGVLHSSLLLLSCGSRNGASFPCSLESSIHQALCWXGLFLRPSPFPRLPLAAPRXLRAGV

SEQ ID NO: 4260 - protein, 189 aa, Homo sapiens
  MOD_RES (29)..(29): Selenocysteine
  MOD_RES (78)..(78): Selenocysteine
  MOD_RES (92)..(92): Selenocysteine
  MOD_RES (94)..(94): Selenocysteine
  MOD_RES (100)..(100): Selenocysteine
  MOD_RES (123)..(123): Selenocysteine
  MOD_RES (144)..(144): Selenocysteine
  MOD_RES (162)..(162): Selenocysteine
  MOD_RES (165)..(165): Selenocysteine
  MOD_RES (170)..(170): Selenocysteine
  MOD_RES (179)..(179): Selenocysteine
MPGVARLPLLLGLLLLPRPGRPLDLADYXYDLAEEDDSEPLNYKDPCKAAAFLGDIALDEEDLRAFQVQQAVDLRRHXARKSSIKAAVPGNXSXPSCQSXNGQPQRGACGRWRGRSRSRRAAXSRPERVWPDGVIPFVIGGNFXGSQRAVFRQAMRHWEKHXCVXFLERXDEDSYIVFXYRPCGSGPPP

SEQ ID NO: 4261 - protein, 61 aa, Homo sapiens
  MOD_RES (29)..(29): Selenocysteine
  MOD_RES (54)..(54): Selenocysteine
  MOD_RES (58)..(58): Selenocysteine
  MOD_RES (61)..(61): Selenocysteine
MPGVARLPLLLGLLLLPRPGRPLDLADYXYDLAEEDDSEPLNYKDPCKLPFLGXLPWXKRX

SEQ ID NO: 4262 - protein, 424 aa, Homo sapiens
  MOD_RES (7)..(7): Selenocysteine
  MOD_RES (53)..(53): Selenocysteine
  MOD_RES (65)..(65): Selenocysteine
  MOD_RES (73)..(73): Selenocysteine
  MOD_RES (94)..(94): Selenocysteine
  MOD_RES (97)..(97): Selenocysteine
  MOD_RES (149)..(149): Selenocysteine
  MOD_RES (166)..(166): Selenocysteine
  MOD_RES (194)..(194): Selenocysteine
  MOD_RES (200)..(200): Selenocysteine
  MOD_RES (204)..(204): Selenocysteine
  MOD_RES (217)..(217): Selenocysteine
  MOD_RES (243)..(243): Selenocysteine
  MOD_RES (311)..(311): Selenocysteine
  MOD_RES (326)..(326): Selenocysteine
  MOD_RES (365)..(365): Selenocysteine
  MOD_RES (367)..(367): Selenocysteine
  MOD_RES (392)..(392): Selenocysteine
  MOD_RES (408)..(408): Selenocysteine
MGSLVLXLCALFCLAAYLVSGSPIMNLEQSPLEEDMSLFGDVFSEQDGVDFNXLLQSMKDEFLKXLNLSDIPXQDSAKVDPPEYMLELYNKFAXDRXSMPSANIIRSFKNEDLFSQPVSFNGLRKYPLLFNVSIPHHEEVIMAELRLYXLVQRDRMIYDGVDRKIXIFEVLESKGDNEGERNMLVLVSGEIYGXNSEWEXFDVXDAIRRWQKSGSSXHQLEVHIESKHDEAEDASSGRLEIDXSAQNKHNPLLIVFSDDQSSDKERKEELNEMISHEQLPELDNLGLDSFSSGPGEEALLQMRSNIIYDSXARIRRNAKGNYCKRXPLYIDFKEIGWDSWIIAPPGYEAYECRGVCNYPLAEHLXPXKHAIIQALVHLKNSQKASKACCVPXKLEPISILYLDKGVVXYKFKYEGMAVSECGCR

SEQ ID NO: 4263 - protein, 392 aa, Homo sapiens
  MOD_RES (41)..(41): Selenocysteine
  MOD_RES (89)..(89): Selenocysteine
  MOD_RES (93)..(93): Selenocysteine
  MOD_RES (102)..(102): Selenocysteine
  MOD_RES (111)..(111): Selenocysteine
  MOD_RES (134)..(134): Selenocysteine
  MOD_RES (144)..(144): Selenocysteine
  MOD_RES (161)..(161): Selenocysteine
  MOD_RES (187)..(187): Selenocysteine
  MOD_RES (224)..(224): Selenocysteine
  MOD_RES (239)..(239): Selenocysteine
  MOD_RES (266)..(266): Selenocysteine
  MOD_RES (277)..(277): Selenocysteine
  MOD_RES (316)..(316): Selenocysteine
  MOD_RES (323)..(323): Selenocysteine
  MOD_RES (390)..(390): Selenocysteine
MVLLSILRILFLCELVLFMEHRAQMAEGGQSSIALLAEAPXLPLIEELLEESPGEQPRKPRLLGHSLRYMLELYRRSADSHGHPRENRXIGAXMVRLVKPLXNVARPHRGXWHIQILGFPLRPNRGLYQLVRAXVVYRHHLQLXRFNLSCHVEPWVQKNPXNHFPSSEGDSSKPSLMSNAWKEMDIXQLVQQRFWNNKGHRILRLRFMCQQQKDSGGLELWHGXSSLDIAFLLLYFNDXHKSIRKAKFLPRGMEEFMERESLLRRXRQADGISAEVXASSSKHSGPENNQCSLHPFQISFRQLGWDHWIIAPPFYXPNYCKGXCLRVLRDGLNSPNHAIIQNLINQLVDQSVPRPSCVPYKYVPISVLMIEANGSILYKEYEGMIAESCXCR

SEQ ID NO: 4264 - protein, 396 aa, Homo sapiens
  MOD_RES (5)..(5): Selenocysteine
  MOD_RES (68)..(68): Selenocysteine
  MOD_RES (108)..(108): Selenocysteine
  MOD_RES (124)..(124): Selenocysteine
  MOD_RES (128)..(129): Selenocysteine
  MOD_RES (141)..(141): Selenocysteine
  MOD_RES (146)..(146): Selenocysteine
  MOD_RES (181)..(181): Selenocysteine
  MOD_RES (189)..(189): Selenocysteine
  MOD_RES (194)..(194): Selenocysteine
  MOD_RES (210)..(210): Selenocysteine
  MOD_RES (217)..(217): Selenocysteine
  MOD_RES (266)..(266): Selenocysteine
  MOD_RES (340)..(340): Selenocysteine
  MOD_RES (347)..(347): Selenocysteine
  MOD_RES (364)..(364): Selenocysteine
MVAGXRCLLALLLPQVLLGGAAGLVPELGRRKFAAASSGRPSSQPSDEVLSEFELRLLSMFGLKQRPXPSRDAVVPPYMLDLYRRHSGQPGSPAPDHRLERAASRANXVRSFHHEESLEELPEXSGKXXRRFFFNLSSIPXEEFIXSAELQVFREQMQDALGNNSSFHHRINIYEIIKPAXANSKFPVXRLLDXRLVNQNASRWESFDVXPAVMRWXAQGHANHGFVVEVAHLEEKQGVSKRHVRISRSLHQDEHSWSQIRPLLVXFGHDGKGHPLHKREKRQAKHKQRKRLKSSCKRHPLYVDFSDVGWNDWIVAPPGYHAFYCHGECPFPLADHLNSXNHAIVQXLVNSVNSKIPKACCVPXELSAISMLYLDENEKVVLKNYQDMVVEGCGCR

SEQ ID NO: 4265 - protein, 472 aa, Homo sapiens
  MOD_RES (41)..(41): Selenocysteine
  MOD_RES (69)..(69): Selenocysteine
  MOD_RES (75)..(75): Selenocysteine
  MOD_RES (96)..(96): Selenocysteine
  MOD_RES (107)..(107): Selenocysteine
  MOD_RES (119)..(119): Selenocysteine
  MOD_RES (122)..(122): Selenocysteine
  MOD_RES (131)..(131): Selenocysteine
  MOD_RES (169)..(169): Selenocysteine
  MOD_RES (203)..(203): Selenocysteine
  MOD_RES (222)..(222): Selenocysteine
  MOD_RES (267)..(267): Selenocysteine
  MOD_RES (269)..(269): Selenocysteine
  MOD_RES (291)..(291): Selenocysteine
  MOD_RES (323)..(323): Selenocysteine
  MOD_RES (348)..(348): Selenocysteine
  MOD_RES (355)..(355): Selenocysteine
  MOD_RES (418)..(418): Selenocysteine
  MOD_RES (465)..(465): Selenocysteine
MAGASRLLFLWLGCFCVSLAQGERPKPPFPELRKAVPGDRXAGGGPDSELQPQDKVSEHMLRLYDRYSXVQAARXPGSLEGGSQPWRPRLLREGNXVRSFRAAAAEXLERKGLYIFNLXSLXKSENILSAXLYFCIGELGNISLSCPVSGGCSHHAQRKHIQIDLSAWXLKFSRNQSQLLGHLSVDMAKSHRDIMSWLSKDIXQLLRKAKENEEFLIGFNIXSKGRQLPKRRLPFPEPYILVYANDAAISEPESVVSSLQGHRNFPXGXVPKWDSHIRAALSIERRKKRSXGVLLPLQNNELPGAEYQYKKDEVWEERKPYKXLQAQAPEKSKNKKKQRKGPHRKSQXLQFDEQXLKKARRKQWIEPRNCARRYLKVDFADIGWSEWIISPKSFDAYYCSGACQFPMPKSLKPSNHAXIQSIVRAVGVVPGIPEPCCVPEKMSSLSILFFDENKNVVLKVYPNMXVESCACR

SEQ ID NO: 4266 - protein, 104 aa, Homo sapiens
  MOD_RES (5)..(5): Selenocysteine
  MOD_RES (35)..(35): Selenocysteine
  MOD_RES (77)..(77): Selenocysteine
  MOD_RES (91)..(91): Selenocysteine
  MOD_RES (103)..(103): Selenocysteine
LIPEXGKKKVAEIQGHAGGRRSGQSHELLRDFEAXLLQMFGLRRRPQPSKSAVIPDYMRDLYRLQSGEEEEEQIHSXGLEYPERPASRANXVRSFHHEASLRXR

SEQ ID NO: 4267 - protein, 271 aa, Homo sapiens
  MOD_RES (39)..(39): Selenocysteine
  MOD_RES (53)..(53): Selenocysteine
  MOD_RES (69)..(69): Selenocysteine
  MOD_RES (134)..(134): Selenocysteine
  MOD_RES (139)..(139): Selenocysteine
  MOD_RES (147)..(147): Selenocysteine
  MOD_RES (151)..(151): Selenocysteine
  MOD_RES (162)..(162): Selenocysteine
  MOD_RES (176)..(176): Selenocysteine
  MOD_RES (181)..(181): Selenocysteine
  MOD_RES (183)..(183): Selenocysteine
  MOD_RES (211)..(211): Selenocysteine
  MOD_RES (222)..(222): Selenocysteine
MFGLRRRPQPSKSAVIPDYMRDLYRLQSGEEEEEQIHSXGLEYPERPASRANXVRSFHHEEHLENIPGXSENSAFRFLFNLSSIPENEVISSAELRLFREQVDQGPDWERGFHRINIYEVMKPPAEVVPGHLIXRLLDXRLVHHNVXRWEXFDVSPAVLRWXREKQPNYGLAIEVXHLHQXRXHQGQHVRISRSLPQGSGNWAQLRPLLVXFGHDGRGHALXRRRRAKRSPKHHSQRARKKNKNCRRHSLYVDFSDVGWNDWIVAPPGYQA

SEQ ID NO: 4268 - protein, 110 aa, Homo sapiens
  MOD_RES (30)..(30): Selenocysteine
  MOD_RES (60)..(60): Selenocysteine
  MOD_RES (102)..(102): Selenocysteine
MIPGNRMLMVVLLCQVLLGGASHASLIPEXGKKKVAEIQGHAGGRRSGQSHELLRDFEAXLLQMFGLRRRPQPSKSAVIPDYMRDLYRLQSGEEEEEQIHSXGLEYPERP

SEQ ID NO: 4269 - protein, 408 aa, Homo sapiens
  MOD_RES (30)..(30): Selenocysteine
  MOD_RES (60)..(60): Selenocysteine
  MOD_RES (102)..(102): Selenocysteine
  MOD_RES (116)..(116): Selenocysteine
  MOD_RES (132)..(132): Selenocysteine
  MOD_RES (197)..(197): Selenocysteine
  MOD_RES (202)..(202): Selenocysteine
  MOD_RES (210)..(210): Selenocysteine
  MOD_RES (214)..(214): Selenocysteine
  MOD_RES (225)..(225): Selenocysteine
  MOD_RES (239)..(239): Selenocysteine
  MOD_RES (244)..(244): Selenocysteine
  MOD_RES (246)..(246): Selenocysteine
  MOD_RES (274)..(274): Selenocysteine
  MOD_RES (285)..(285): Selenocysteine
  MOD_RES (352)..(352): Selenocysteine
  MOD_RES (359)..(359): Selenocysteine
  MOD_RES (376)..(376): Selenocysteine
MIPGNRMLMVVLLCQVLLGGASHASLIPEXGKKKVAEIQGHAGGRRSGQSHELLRDFEAXLLQMFGLRRRPQPSKSAVIPDYMRDLYRLQSGEEEEEQIHSXGLEYPERPASRANXVRSFHHEEHLENIPGXSENSAFRFLFNLSSIPENEVISSAELRLFREQVDQGPDWERGFHRINIYEVMKPPAEVVPGHLIXRLLDXRLVHHNVXRWEXFDVSPAVLRWXREKQPNYGLAIEVXHLHQXRXHQGQHVRISRSLPQGSGNWAQLRPLLVXFGHDGRGHALXRRRRAKRSPKHHSQRARKKNKNCRRHSLYVDFSDVGWNDWIVAPPGYQAFYCHGDCPFPLADHLNSXNHAIVQXLVNSVNSSIPKACCVPXELSAISMLYLDEYDKVVLKNYQEMVVEGCGCR

SEQ ID NO: 4270 - protein, 29 aa, Homo sapiens
  MOD_RES (2)..(2): Selenocysteine
NXVRSFHHEGQSLPPVCVGEGWWDWLEGQ

SEQ ID NO: 4271 - protein, 454 aa, Homo sapiens
  MOD_RES (4)..(4): Selenocysteine
  MOD_RES (89)..(89): Selenocysteine
  MOD_RES (109)..(109): Selenocysteine
  MOD_RES (132)..(133): Selenocysteine
  MOD_RES (136)..(137): Selenocysteine
  MOD_RES (148)..(148): Selenocysteine
  MOD_RES (185)..(185): Selenocysteine
  MOD_RES (194)..(194): Selenocysteine
  MOD_RES (213)..(213): Selenocysteine
  MOD_RES (226)..(226): Selenocysteine
  MOD_RES (237)..(237): Selenocysteine
  MOD_RES (253)..(253): Selenocysteine
  MOD_RES (255)..(255): Selenocysteine
  MOD_RES (275)..(275): Selenocysteine
  MOD_RES (346)..(346): Selenocysteine
  MOD_RES (397)..(397): Selenocysteine
  MOD_RES (404)..(404): Selenocysteine
  MOD_RES (422)..(422): Selenocysteine
MHLXVFLLKGIVGFLWSCWVLVGYAKGGLGDNHVHSSFIYRRLRNHERREIQREILSILGLPHRPRPFSPGKQASSAPLFMLDLYNAMXNEENPEESEYSVRASLAEEXRGARKGYPASPNGYPRRIQLSRXXPLXXQSPPLASLHDXNFLNDADMVMSFVNLVERDKDFSHQRRHYKEFRFDLXQIPHGEAVXAAEFRIYKDRSNNRFENEXIKISIYQIIKEYXNRDADLFLLDXRKAQALDVGWLVFDIXVXSNHWVINPQNNLGLQLCAEXGDGRSINVKSAGLVGRQGPQSKQPFMVAFFKASEVLLRSVRAANKRKNQNRNKSSSHQDSSRMSSVGDYNXSEQKQACKKHELYVSFRDLGWQDWIIAPEGYAAFYCDGECSFPLNAHMNAXNHAIVQXLVHLMFPDHVPKPCCAPXKLNAISVLYFDDSSNVILKKYRNMVVRSCGCH

SEQ ID NO: 4272 - protein, 513 aa, Homo sapiens
  MOD_RES (53)..(53): Selenocysteine
  MOD_RES (73)..(73): Selenocysteine
  MOD_RES (201)..(201): Selenocysteine
  MOD_RES (252)..(252): Selenocysteine
  MOD_RES (271)..(271): Selenocysteine
  MOD_RES (295)..(295): Selenocysteine
  MOD_RES (311)..(311): Selenocysteine
  MOD_RES (313)..(313): Selenocysteine
  MOD_RES (320)..(320): Selenocysteine
  MOD_RES (333)..(333): Selenocysteine
  MOD_RES (372)..(373): Selenocysteine
  MOD_RES (389)..(389): Selenocysteine
  MOD_RES (410)..(410): Selenocysteine
  MOD_RES (456)..(456): Selenocysteine
  MOD_RES (463)..(463): Selenocysteine
  MOD_RES (481)..(481): Selenocysteine
MPGLGRRAQWLCWWWGLLCSCCGPPPLRPPLPAAAAAAAGGQLLGDGGSPGRXEQPPPSPQSSSGFLYRRLKXQEKREMQKEILSVLGLPHRPRPLHGLQQPQPPALRQQEEQQQQQQLPRGEPPPGRLKSAPLFMLDLYNALSADNDEDGASEGERQQSWPHEAASSSQRRQPPPGAAHPLNRKSLLAPGSGSGGASPLXSAQDSAFLNDADMVMSFVNLVEYDKEFSPRQRHHKEFKFNLSQIPEGEVVXAAEFRIYKDCVMGSFKNQXFLISIYQVLQEHQHRDSDLFLLDXRVVWASEEGWLEFDIXAXSNLWVVXPQHNMGLQLSVVXRDGVHVHPRAAGLVGRDGPYDKQPFMVAFFKVSEVHVRXXRSASSRRRQQSRNRSXQSQDVARVSSASDYNSSELKXACRKHELYVSFQDLGWQDWIIAPKGYAANYCDGECSFPLNAHMNAXNHAIVQXLVHLMNPEYVPKPCCAPXKLNAISVLYFDDNSNVILKKYRNMVVRACGCH

SEQ ID NO: 4273 - protein, 365 aa, Homo sapiens
  MOD_RES (113)..(113): Selenocysteine
  MOD_RES (128)..(128): Selenocysteine
  MOD_RES (170)..(170): Selenocysteine
  MOD_RES (189)..(189): Selenocysteine
  MOD_RES (215)..(215): Selenocysteine
  MOD_RES (229)..(229): Selenocysteine
  MOD_RES (231)..(231): Selenocysteine
  MOD_RES (251)..(251): Selenocysteine
  MOD_RES (308)..(308): Selenocysteine
  MOD_RES (315)..(315): Selenocysteine
  MOD_RES (324)..(324): Selenocysteine
  MOD_RES (333)..(333): Selenocysteine
MHVRSLRAAAPHSFVALWAPLFLLRSALADFSLDNEVHSSFIHRRLRSQERREMQREILSILGLPHRPRPHLQGKHNSAPMFMLDLYNAMAVEEGGGPGGQGFSYPYKAVFSXQGPPLASLQDSHFLXDADMVMSFVNLVEHDKEFFHPRYHHREFRFDLSKIPEGEAVXAAEFRIYKDYIRERFDNEXFRISVYQVLQEHLGRESDLFLLDSRXLWASEEGWLVFDIXAXSNHWVVNPRHNLGLQLSVEXLDENSSSDQRQACKKHELYVSFRDLGWQDWIIAPEGYAAYYCEGECAFPLNSYMNAXNHAIVQXLVHFINPEXVPKPCCAPXQLNAISVLYFDDSSNVILKKYRNMVVRACGCH

SEQ ID NO: 4274 - protein, 412 aa, Homo sapiens
  MOD_RES (113)..(113): Selenocysteine
  MOD_RES (128)..(128): Selenocysteine
  MOD_RES (170)..(170): Selenocysteine
  MOD_RES (189)..(189): Selenocysteine
  MOD_RES (215)..(215): Selenocysteine
  MOD_RES (229)..(229): Selenocysteine
  MOD_RES (231)..(231): Selenocysteine
  MOD_RES (251)..(251): Selenocysteine
  MOD_RES (284)..(284): Selenocysteine
  MOD_RES (294)..(294): Selenocysteine
  MOD_RES (306)..(306): Selenocysteine
  MOD_RES (374)..(374): Selenocysteine
  MOD_RES (381)..(381): Selenocysteine
  MOD_RES (386)..(386): Selenocysteine
  MOD_RES (393)..(393): Selenocysteine
MHVRSLRAAAPHSFVALWAPLFLLRSALADFSLDNEVHSSFIHRRLRSQERREMQREILSILGLPHRPRPHLQGKHNSAPMFMLDLYNAMAVEEGGGPGGQGFSYPYKAVFSXQGPPLASLQDSHFLXDADMVMSFVNLVEHDKEFFHPRYHHREFRFDLSKIPEGEAVXAAEFRIYKDYIRERFDNEXFRISVYQVLQEHLGRESDLFLLDSRXLWASEEGWLVFDIXAXSNHWVVNPRHNLGLQLSVEXLDGQSINPKLAGLIGRHGPQNKQPFMVAFFKAXEVHFRSIRSXGSKQRSQNRSKXPKNQEALRMANVAENSSSDQRQACKKHELYVSFRDLGWQDWIIAPEGYAAYYCEGECAFPLNSYMNAXNHAIVQXLVGVXPSWGVVXWAGQAAGPPDPAASKLGPE

SEQ ID NO: 4275 - protein, 431 aa, Homo sapiens
  MOD_RES (113)..(113): Selenocysteine
  MOD_RES (128)..(128): Selenocysteine
  MOD_RES (170)..(170): Selenocysteine
  MOD_RES (189)..(189): Selenocysteine
  MOD_RES (215)..(215): Selenocysteine
  MOD_RES (229)..(229): Selenocysteine
  MOD_RES (231)..(231): Selenocysteine
  MOD_RES (251)..(251): Selenocysteine
  MOD_RES (284)..(284): Selenocysteine
  MOD_RES (294)..(294): Selenocysteine
  MOD_RES (306)..(306): Selenocysteine
  MOD_RES (374)..(374): Selenocysteine
  MOD_RES (381)..(381): Selenocysteine
  MOD_RES (390)..(390): Selenocysteine
  MOD_RES (399)..(399): Selenocysteine
MHVRSLRAAAPHSFVALWAPLFLLRSALADFSLDNEVHSSFIHRRLRSQERREMQREILSILGLPHRPRPHLQGKHNSAPMFMLDLYNAMAVEEGGGPGGQGFSYPYKAVFSXQGPPLASLQDSHFLXDADMVMSFVNLVEHDKEFFHPRYHHREFRFDLSKIPEGEAVXAAEFRIYKDYIRERFDNEXFRISVYQVLQEHLGRESDLFLLDSRXLWASEEGWLVFDIXAXSNHWVVNPRHNLGLQLSVEXLDGQSINPKLAGLIGRHGPQNKQPFMVAFFKAXEVHFRSIRSXGSKQRSQNRSKXPKNQEALRMANVAENSSSDQRQACKKHELYVSFRDLGWQDWIIAPEGYAAYYCEGECAFPLNSYMNAXNHAIVQXLVHFINPEXVPKPCCAPXQLNAISVLYFDDSSNVILKKYRNMVVRACGCH

SEQ ID NO: 4276 - protein, 297 aa, Homo sapiens
  MOD_RES (1)..(1): Any amino acid
  MOD_RES (14)..(14): Selenocysteine
  MOD_RES (56)..(56): Selenocysteine
  MOD_RES (75)..(75): Selenocysteine
  MOD_RES (91)..(91): Selenocysteine
  MOD_RES (93)..(93): Selenocysteine
  MOD_RES (103)..(103): Selenocysteine
  MOD_RES (105)..(105): Selenocysteine
  MOD_RES (108)..(108): Selenocysteine
  MOD_RES (117)..(117): Selenocysteine
  MOD_RES (137)..(137): Selenocysteine
  MOD_RES (151)..(151): Selenocysteine
  MOD_RES (153)..(153): Selenocysteine
  MOD_RES (173)..(173): Selenocysteine
  MOD_RES (206)..(206): Selenocysteine
  MOD_RES (216)..(216): Selenocysteine
  MOD_RES (228)..(228): Selenocysteine
  MOD_RES (296)..(296): Selenocysteine
XPPLASLQDSHFLXDADMVMSFVNLVEHDKEFFHPRYHHREFRFDLSKIPEGEAVXAAEFRIYKDYIRERFDNEXFRISVYQVLQEHLGSXGXCCMPCLRASXRXNQXRVPALWKLXFQQRRGHGRESDLFLLDSRXLWASEEGWLVFDIXAXSNHWVVNPRHNLGLQLSVEXLDGQSINPKLAGLIGRHGPQNKQPFMVAFFKAXEVHFRSIRSXGSKQRSQNRSKXPKNQEALRMANVAENSSSDQRQACKKHELYVSFRDLGWQDWIIAPEGYAAYYCEGECAFPLNSYMNAXN

SEQ ID NO: 4277 - protein, 402 aa, Homo sapiens
  MOD_RES (14)..(14): Selenocysteine
  MOD_RES (133)..(133): Selenocysteine
  MOD_RES (142)..(142): Selenocysteine
  MOD_RES (160)..(160): Selenocysteine
  MOD_RES (186)..(186): Selenocysteine
  MOD_RES (200)..(200): Selenocysteine
  MOD_RES (222)..(222): Selenocysteine
  MOD_RES (250)..(250): Selenocysteine
  MOD_RES (261)..(261): Selenocysteine
  MOD_RES (345)..(345): Selenocysteine
  MOD_RES (370)..(370): Selenocysteine
  MOD_RES (375)..(375): Selenocysteine
MAARPGPLWLLGLXLCALGGGGPGLRPPPGCPQRRLGARERRDVQREILAVLGLPGRPRPRAPPAASRLPASAPLFMLDLYHAMAGDDDEDGAPAEQRLGRADLVMSFVNMVERDRALGHQEPHWKEFRFDLXQIPAGEAVXAAEFRIYKVPSIHLLNRXLHVSMFQVVQEQSNRESDLFFLDLQXLRAGDEGWLVLDVXAASDCWLLKRHKDLGLRLYVEXEDGHSVDPGLAGLLGQRAPRSQQPFVVXFFRASPSPIRXPRAVRPLRRRQPKKSNELPQANRLPGIFDDVRGSHGRQVCRRHELYVSFQDLGWLDWVIAPQGYSAYYCEGECSFPLDSCMNAXNHAILQSLVHLMKPNAVPKACCAPXKLSAXSVLYYDSSNNVILRKHRNMVVKACGCH

SEQ ID NO: 4278 - protein, 402 aa, Homo sapiens
  MOD_RES (2)..(2): Selenocysteine
  MOD_RES (133)..(133): Selenocysteine
  MOD_RES (142)..(142): Selenocysteine
  MOD_RES (160)..(160): Selenocysteine
  MOD_RES (186)..(186): Selenocysteine
  MOD_RES (200)..(200): Selenocysteine
  MOD_RES (222)..(222): Selenocysteine
  MOD_RES (250)..(250): Selenocysteine
  MOD_RES (261)..(261): Selenocysteine
  MOD_RES (345)..(345): Selenocysteine
  MOD_RES (370)..(370): Selenocysteine
  MOD_RES (375)..(375): Selenocysteine
MXALPGPLWLLGLALCALGGGGPGLRPPPGCPQRRLGARERRDVQREILAVLGLPGRPRPRAPPAASRLPASAPLFMLDLYHAMAGDDDEDGAPAERRLGRADLVMSFVNMVERDRALGHQEPHWKEFRFDLXQIPAGEAVXAAEFRIYKVPSIHLLNRXLHVSMFQVVQEQSNRESDLFFLDLQXLRAGDEGWLVLDVXAASDCWLLKRHKDLGLRLYVEXEDGHSVDPGLAGLLGQRAPRSQQPFVVXFFRASPSPIRXPRAVRPLRRRQPKKSNELPQANRLPGIFDDVHGSHGRQVCRRHELYVSFQDLGWLDWVIAPQGYSAYYCEGECSFPLDSCMNAXNHAILQSLVHLMMPDAVPKACCAPXKLSAXSVLYYDSSNNVILRKHRNMVVKACGCH

SEQ ID NO: 4279 - protein, 90 aa, Homo sapiens
  MOD_RES (22)..(22): Selenocysteine
  MOD_RES (44)..(44): Selenocysteine
  MOD_RES (63)..(63): Selenocysteine
  MOD_RES (77)..(77): Selenocysteine
  MOD_RES (83)..(83): Selenocysteine
MLWFSGVGALAERYCRRSPGIXCCVLLLLNCSGVPMSLASSFLXGSVAKCENEGEVLQIPFIXDNPCIMCVCLHEPXRWSNLXQNPGFYD

SEQ ID NO: 4280 - protein, 685 aa, Homo sapiens
  MOD_RES (22)..(22): Selenocysteine
  MOD_RES (44)..(44): Selenocysteine
  MOD_RES (63)..(63): Selenocysteine
  MOD_RES (78)..(78): Selenocysteine
  MOD_RES (109)..(109): Selenocysteine
  MOD_RES (114)..(114): Selenocysteine
  MOD_RES (139)..(139): Selenocysteine
  MOD_RES (162)..(162): Selenocysteine
  MOD_RES (187)..(187): Selenocysteine
  MOD_RES (192)..(192): Selenocysteine
  MOD_RES (196)..(196): Selenocysteine
  MOD_RES (257)..(257): Selenocysteine
  MOD_RES (260)..(260): Selenocysteine
  MOD_RES (265)..(265): Selenocysteine
  MOD_RES (320)..(320): Selenocysteine
  MOD_RES (329)..(329): Selenocysteine
  MOD_RES (358)..(358): Selenocysteine
  MOD_RES (365)..(365): Selenocysteine
  MOD_RES (374)..(374): Selenocysteine
  MOD_RES (379)..(379): Selenocysteine
  MOD_RES (385)..(385): Selenocysteine
  MOD_RES (391)..(391): Selenocysteine
  MOD_RES (412)..(412): Selenocysteine
  MOD_RES (418)..(418): Selenocysteine
  MOD_RES (437)..(437): Selenocysteine
  MOD_RES (466)..(467): Selenocysteine
  MOD_RES (549)..(549): Selenocysteine
  MOD_RES (570)..(570): Selenocysteine
  MOD_RES (574)..(574): Selenocysteine
  MOD_RES (579)..(579): Selenocysteine
  MOD_RES (586)..(586): Selenocysteine
  MOD_RES (606)..(606): Selenocysteine
  MOD_RES (627)..(627): Selenocysteine
  MOD_RES (637)..(637): Selenocysteine
  MOD_RES (645)..(645): Selenocysteine
MLWFSGVGALAERYCRRSPGIXCCVLLLLNCSGVPMSLASSFLXGSVAKCENEGEVLQIPFIXDNPCIMCVCLNKEVXCKREKCPVLSRDCALAIKQRGACCEQCKGCXYEGNXYNSSFKWQSPAEPCVLRQCQEGVVXESGVRCVVHCKNPLEHLGMCCPXCPGCVFEGVQYQEGEEFQPEGSKCXKCSCXGGRXQCVREVCPILSCPQHLSHIPPGQCCPKCLGQRKVFDLPFGSCLFRSDVYDNGSSFLYDNCXACXCRDSXVVCKRKCSHPGGCDQGQEGCCEECLLRVPPEDIKVCKFGNKIFQDGEMWSSINCXICACVKGRXECRNKQCIPISSCPQGKILNRKGCCPICXEKPGVCXVFGDPHYNXFDGRXFNFQGXCQYVLXKDCSSPASPFQVLVKNDARRXRSFSWXKSVELVLGESRVSLQQHLXVRWNGSRIALPCRAPHFHIDLDGYLLKVXXKAGLEISWDGDSFVEVMAAPHLKGKLCGLCGNYNGHKRDDLIGGDGNFKFDVDDFAESWRVESNEFCNRPQRKPVPELCQGXVKVKLRAHRECQKLKSWEFQXCHSXVDYAXFYRSCVXDMCECPVHKNCYCESFLAYXRACQREGIKVHWEPQQNCAAXQCKHGAVYDXCGPGCIKXCDNWNEIGPCNKPCVAGCHCPANLVLHKGRCIKPVLCPQR

SEQ ID NO: 4281 - protein, 133 aa, Homo sapiens
  MOD_RES (22)..(22): Selenocysteine
  MOD_RES (44)..(44): Selenocysteine
  MOD_RES (63)..(63): Selenocysteine
  MOD_RES (78)..(78): Selenocysteine
  MOD_RES (116)..(116): Selenocysteine
  MOD_RES (120)..(120): Selenocysteine
MLWFSGVGALAERYCRRSPGIXCCVLLLLNCSGVPMSLASSFLXGSVAKCENEGEVLQIPFIXDNPCIMCVCLNKEVXCKREKCPVLSRDCALAIKQRGACCEQCKVLVSRVLRDXVLFXLKYWRLPVFWLHL

SEQ ID NO: 4282 - protein, 161 aa, Homo sapiens
  MOD_RES (22)..(22): Selenocysteine
  MOD_RES (44)..(44): Selenocysteine
  MOD_RES (63)..(63): Selenocysteine
  MOD_RES (83)..(83): Selenocysteine
  MOD_RES (118)..(118): Selenocysteine
MLWFSGVGALAERYCRRSPGIXCCVLLLLNCSGVPMSLASSFLXGSVAKCENEGEVLQIPFIXDNPCIMCVCLVAPMKEIPIXAPSNGRARLSLVFYASARRALSQSLGCAVLFIVKXLWSIWECAAPHVQAVCLRVCSIKKGRNFSQKEANVPSVPALEA

SEQ ID NO: 4283 - protein, 41 aa, Homo sapiens
  MOD_RES (33)..(33): Selenocysteine
MPQLYIYIRLLGAYLFIISRVQGQNLDSMLHGXGMKSDSDQ

SEQ ID NO: 4284 - protein, 532 aa, Homo sapiens
  MOD_RES (33)..(33): Selenocysteine
  MOD_RES (49)..(49): Selenocysteine
  MOD_RES (55)..(55): Selenocysteine
  MOD_RES (75)..(75): Selenocysteine
  MOD_RES (78)..(78): Selenocysteine
  MOD_RES (94)..(95): Selenocysteine
  MOD_RES (121)..(121): Selenocysteine
  MOD_RES (127)..(127): Selenocysteine
  MOD_RES (137)..(137): Selenocysteine
  MOD_RES (229)..(229): Selenocysteine
  MOD_RES (265)..(266): Selenocysteine
  MOD_RES (275)..(275): Selenocysteine
  MOD_RES (280)..(280): Selenocysteine
  MOD_RES (299)..(299): Selenocysteine
  MOD_RES (303)..(303): Selenocysteine
  MOD_RES (309)..(309): Selenocysteine
  MOD_RES (325)..(325): Selenocysteine
  MOD_RES (328)..(328): Selenocysteine
  MOD_RES (347)..(347): Selenocysteine
  MOD_RES (352)..(352): Selenocysteine
  MOD_RES (391)..(391): Selenocysteine
  MOD_RES (400)..(400): Selenocysteine
  MOD_RES (404)..(404): Selenocysteine
  MOD_RES (446)..(446): Selenocysteine
  MOD_RES (513)..(513): Selenocysteine
  MOD_RES (520)..(520): Selenocysteine
MPQLYIYIRLLGAYLFIISRVQGQNLDSMLHGXGMKSDSDQKKSENGVXLAPEDXLPFLKCYCSGHCPDDAINNXCIXNGHCFAIIEEDDQGEXXLASGCMKYEGSDFQCKDSPKAQLRRXIECCRXNLCNQYLQPXLPPVVIGPFFDGSIRWLVLLISMAVCIIAMIIFSSCFCYKHYCKSISSRRRYNRDLEQDEAFIPVGESLKDLIDQSQSSGSGSGLPLLVQRXIAKQIQMVRQVGKGRYGEVWMGKWRGEKVAVKVFFXXEEASWFREXEIYQXVLMRHENILGFIAADIKGXGSWXQLYLIXDYHENGSLYDFLKCAXLDXRALLKLAYSAACGLCHLHXEIYGXQGKPAIAHRDLKSKNILIKKNGSCCIADLGLAVKFNSDXNEVDVPLNXRVGXKRYMAPEVLDESLNKNHFQPYIMADIYSFGLIIWEMARRCIXGGIVEEYQLPYYNMVPSDPSYEDMREVVCVKRLRPIVSNRWNSDECLRAVLKLMSECWAHNPASRLXALRIKKXLAKMVESQDVKI

SEQ ID NO: 4285 - protein, 532 aa, Homo sapiens
  MOD_RES (23)..(23): Selenocysteine
  MOD_RES (43)..(43): Selenocysteine
  MOD_RES (51)..(51): Selenocysteine
  MOD_RES (54)..(54): Selenocysteine
  MOD_RES (79)..(79): Selenocysteine
  MOD_RES (85)..(85): Selenocysteine
  MOD_RES (98)..(98): Selenocysteine
  MOD_RES (114)..(114): Selenocysteine
  MOD_RES (127)..(127): Selenocysteine
  MOD_RES (139)..(139): Selenocysteine
  MOD_RES (163)..(163): Selenocysteine
  MOD_RES (185)..(185): Selenocysteine
  MOD_RES (198)..(198): Selenocysteine
  MOD_RES (229)..(229): Selenocysteine
  MOD_RES (265)..(266): Selenocysteine
  MOD_RES (275)..(275): Selenocysteine
  MOD_RES (280)..(280): Selenocysteine
  MOD_RES (299)..(299): Selenocysteine
  MOD_RES (303)..(303): Selenocysteine
  MOD_RES (309)..(309): Selenocysteine
  MOD_RES (324)..(325): Selenocysteine
  MOD_RES (347)..(347): Selenocysteine
  MOD_RES (352)..(352): Selenocysteine
  MOD_RES (375)..(375): Selenocysteine
  MOD_RES (391)..(391): Selenocysteine
  MOD_RES (400)..(400): Selenocysteine
  MOD_RES (404)..(404): Selenocysteine
  MOD_RES (501)..(501): Selenocysteine
  MOD_RES (513)..(513): Selenocysteine
  MOD_RES (520)..(520): Selenocysteine
MGWLEELNWQLHIFLLILLSMHXRANFLDNMLLRSAGKLNVGXKKEDGESXAPXPRPKVLRCKCHHHCPEDSVNNICSXDGYCFXMIEEDDSGLPVVXSGCLGLEGSDFQCRDXPIPHQRRSIECCXERNECNKDLHPXLPPLKNRDFVDGPIHHRALLISVXVCSLLLVLIILFCYFRYKRQEXRPRYSIGLEQDEXYIPPGESLRDLIEQSQSSGSGSGLPLLVQRXIAKQIQMVKQIGKGRYGEVWMGKWRGEKVAVKVFFXXEEASWFREXEIYQXVLMRHENILGFIAADIKGXGSWXQLYLIXDYHENGSLYDYLKSXXLDAKSMLKLAYSSVSGLCHLHXEIFSXQGKPAIAHRDLKSKNILVKKNGXCCIADLGLAVKFISDXNEVDIPPNXRVGXKRYMPPEVLDESLNRNHFQSYIMADMYSFGLILWEVARRCVSGGIVEEYQLPYHDLVPSDPSYEDMREIVCIKKLRPSFPNRWSSDECLRQMGKLMXECWAHNPASRLXALRVKKXLAKMSESQDIKL

SEQ ID NO: 4286 - protein, 125 aa, Homo sapiens
  MOD_RES (13)..(13): Selenocysteine
  MOD_RES (21)..(21): Selenocysteine
  MOD_RES (24)..(24): Selenocysteine
  MOD_RES (49)..(49): Selenocysteine
  MOD_RES (55)..(55): Selenocysteine
  MOD_RES (68)..(68): Selenocysteine
  MOD_RES (84)..(84): Selenocysteine
  MOD_RES (97)..(97): Selenocysteine
  MOD_RES (109)..(109): Selenocysteine
MLLRSAGKLNVGXKKEDGESXAPXPRPKVLRCKCHHHCPEDSVNNICSXDGYCFXMIEEDDSGLPVVXSGCLGLEGSDFQCRDXPIPHQRRSIECCXERNECNKDLHPXLPPLKNRDFVDGPIHH

SEQ ID NO: 4287 - protein, 502 aa, Homo sapiens
  MOD_RES (13)..(13): Selenocysteine
  MOD_RES (21)..(21): Selenocysteine
  MOD_RES (24)..(24): Selenocysteine
  MOD_RES (49)..(49): Selenocysteine
  MOD_RES (55)..(55): Selenocysteine
  MOD_RES (68)..(68): Selenocysteine
  MOD_RES (84)..(84): Selenocysteine
  MOD_RES (97)..(97): Selenocysteine
  MOD_RES (109)..(109): Selenocysteine
  MOD_RES (133)..(133): Selenocysteine
  MOD_RES (155)..(155): Selenocysteine
  MOD_RES (168)..(168): Selenocysteine
  MOD_RES (199)..(199): Selenocysteine
  MOD_RES (235)..(236): Selenocysteine
  MOD_RES (245)..(245): Selenocysteine
  MOD_RES (250)..(250): Selenocysteine
  MOD_RES (269)..(269): Selenocysteine
  MOD_RES (273)..(273): Selenocysteine
  MOD_RES (279)..(279): Selenocysteine
  MOD_RES (294)..(295): Selenocysteine
  MOD_RES (317)..(317): Selenocysteine
  MOD_RES (322)..(322): Selenocysteine
  MOD_RES (345)..(345): Selenocysteine
  MOD_RES (361)..(361): Selenocysteine
  MOD_RES (370)..(370): Selenocysteine
  MOD_RES (374)..(374): Selenocysteine
  MOD_RES (471)..(471): Selenocysteine
  MOD_RES (483)..(483): Selenocysteine
  MOD_RES (490)..(490): Selenocysteine
MLLRSAGKLNVGXKKEDGESXAPXPRPKVLRCKCHHHCPEDSVNNICSXDGYCFXMIEEDDSGLPVVXSGCLGLEGSDFQCRDXPIPHQRRSIECCXERNECNKDLHPXLPPLKNRDFVDGPIHHRALLISVXVCSLLLVLIILFCYFRYKRQEXRPRYSIGLEQDEXYIPPGESLRDLIEQSQSSGSGSGLPLLVQRXIAKQIQMVKQIGKGRYGEVWMGKWRGEKVAVKVFFXXEEASWFREXEIYQXVLMRHENILGFIAADIKGXGSWXQLYLIXDYHENGSLYDYLKSXXLDAKSMLKLAYSSVSGLCHLHXEIFSXQGKPAIAHRDLKSKNILVKKNGXCCIADLGLAVKFISDXNEVDIPPNXRVGXKRYMPPEVLDESLNRNHFQSYIMADMYSFGLILWEVARRCVSGGIVEEYQLPYHDLVPSDPSYEDMREIVCIKKLRPSFPNRWSSDECLRQMGKLMXECWAHNPASRLXALRVKKXLAKMSESQDIKL

SEQ ID NO: 4288 - protein, 114 aa, Homo sapiens
  MOD_RES (13)..(13): Selenocysteine
  MOD_RES (21)..(21): Selenocysteine
  MOD_RES (24)..(24): Selenocysteine
  MOD_RES (49)..(49): Selenocysteine
  MOD_RES (55)..(55): Selenocysteine
  MOD_RES (68)..(68): Selenocysteine
  MOD_RES (85)..(85): Selenocysteine
  MOD_RES (102)..(102): Selenocysteine
  MOD_RES (107)..(107): Selenocysteine
  MOD_RES (109)..(109): Selenocysteine
MLLRSAGKLNVGXKKEDGESXAPXPRPKVLRCKCHHHCPEDSVNNICSXDGYCFXMIEEDDSGLPVVXSGCLGLEGSDFQCRVRXLPFLIKEDQLNAAQKGXNVIKXYXLHCLH

SEQ ID NO: 4289 - protein, 530 aa, Homo sapiens
  MOD_RES (2)..(2): Selenocysteine
  MOD_RES (17)..(17): Selenocysteine
  MOD_RES (23)..(23): Selenocysteine
  MOD_RES (57)..(57): Selenocysteine
  MOD_RES (65)..(65): Selenocysteine
  MOD_RES (102)..(104): Selenocysteine
  MOD_RES (112)..(112): Selenocysteine
  MOD_RES (120)..(120): Selenocysteine
  MOD_RES (128)..(128): Selenocysteine
  MOD_RES (136)..(137): Selenocysteine
  MOD_RES (150)..(150): Selenocysteine
  MOD_RES (176)..(176): Selenocysteine
  MOD_RES (268)..(268): Selenocysteine
  MOD_RES (295)..(295): Selenocysteine
  MOD_RES (309)..(309): Selenocysteine
  MOD_RES (317)..(317): Selenocysteine
  MOD_RES (346)..(346): Selenocysteine
  MOD_RES (359)..(359): Selenocysteine
  MOD_RES (379)..(379): Selenocysteine
  MOD_RES (421)..(421): Selenocysteine
  MOD_RES (438)..(438): Selenocysteine
  MOD_RES (445)..(445): Selenocysteine
  MOD_RES (479)..(479): Selenocysteine
  MOD_RES (493)..(493): Selenocysteine
  MOD_RES (517)..(517): Selenocysteine
  MOD_RES (523)..(523): Selenocysteine
MXSSLQRPWRVPWLPWXILLVSXAAASQNQERLCAFKDPYQQDLGIGESRISHENGXILCSKGSXCYGLWEKSKGDINLVKQGCWSHIGDPQECHYEECVVXXXPPSIQNGXYRFCCCSXDLCNVNFXENFPPPDXXPLSPPHSFNRDEXIIIALASVSVLAVLIVALCFGYRMLXGDRKQGLHSMNMMEAAASEPSLDLDNLKLLELIGRGRYGAVYKGSLDERPVAVKVFSFANRQNFINEKNIYRVPLMEHDNIARFIVGDERVXADGRMEYLLVMEYYPNGSLCKYLSLHXSDWVSSCRLAHSVXRGLAYLHXELPRGDHYKPAISHRDLNSRNVLVKNDGXCVISDFGLSMRLXGNRLVRPGEEDNAAISEVGXIRYMAPEVLEGAVNLRDCESALKQVDMYALGLIYWEIFMRCXDLFPGESVPEYQMAFQXEVGNHPXFEDMQVLVSREKQRPKFPEAWKENSLAVRSLKEXIEDCWDQDAEARLXAQCAEERMAELMMIWERNKSVSPXVNPMSXAMQNERR

SEQ ID NO: 4290 - protein, 1038 aa, Homo sapiens
  MOD_RES (2)..(2): Selenocysteine
  MOD_RES (17)..(17): Selenocysteine
  MOD_RES (23)..(23): Selenocysteine
  MOD_RES (57)..(57): Selenocysteine
  MOD_RES (65)..(65): Selenocysteine
  MOD_RES (102)..(104): Selenocysteine
  MOD_RES (112)..(112): Selenocysteine
  MOD_RES (120)..(120): Selenocysteine
  MOD_RES (128)..(128): Selenocysteine
  MOD_RES (136)..(137): Selenocysteine
  MOD_RES (150)..(150): Selenocysteine
  MOD_RES (176)..(176): Selenocysteine
  MOD_RES (268)..(268): Selenocysteine
  MOD_RES (295)..(295): Selenocysteine
  MOD_RES (309)..(309): Selenocysteine
  MOD_RES (317)..(317): Selenocysteine
  MOD_RES (346)..(346): Selenocysteine
  MOD_RES (359)..(359): Selenocysteine
  MOD_RES (379)..(379): Selenocysteine
  MOD_RES (421)..(421): Selenocysteine
  MOD_RES (438)..(438): Selenocysteine
  MOD_RES (445)..(445): Selenocysteine
  MOD_RES (479)..(479): Selenocysteine
  MOD_RES (493)..(493): Selenocysteine
  MOD_RES (517)..(517): Selenocysteine
  MOD_RES (523)..(523): Selenocysteine
  MOD_RES (559)..(559): Selenocysteine
  MOD_RES (575)..(575): Selenocysteine
  MOD_RES (578)..(578): Selenocysteine
  MOD_RES (603)..(603): Selenocysteine
  MOD_RES (606)..(606): Selenocysteine
  MOD_RES (610)..(610): Selenocysteine
  MOD_RES (612)..(615): Selenocysteine
  MOD_RES (617)..(618): Selenocysteine
  MOD_RES (621)..(621): Selenocysteine
  MOD_RES (624)..(624): Selenocysteine
  MOD_RES (627)..(628): Selenocysteine
  MOD_RES (638)..(638): Selenocysteine
  MOD_RES (642)..(643): Selenocysteine
  MOD_RES (652)..(652): Selenocysteine
  MOD_RES (659)..(659): Selenocysteine
  MOD_RES (665)..(665): Selenocysteine
  MOD_RES (702)..(702): Selenocysteine
  MOD_RES (718)..(718): Selenocysteine
  MOD_RES (724)..(724): Selenocysteine
  MOD_RES (726)..(726): Selenocysteine
  MOD_RES (740)..(740): Selenocysteine
  MOD_RES (756)..(756): Selenocysteine
  MOD_RES (762)..(762): Selenocysteine
  MOD_RES (766)..(766): Selenocysteine
  MOD_RES (786)..(786): Selenocysteine
  MOD_RES (793)..(793): Selenocysteine
  MOD_RES (803)..(803): Selenocysteine
  MOD_RES (805)..(805): Selenocysteine
  MOD_RES (822)..(823): Selenocysteine
  MOD_RES (829)..(829): Selenocysteine
  MOD_RES (835)..(836): Selenocysteine
  MOD_RES (840)..(840): Selenocysteine
  MOD_RES (856)..(856): Selenocysteine
  MOD_RES (900)..(900): Selenocysteine
  MOD_RES (923)..(923): Selenocysteine
  MOD_RES (946)..(946): Selenocysteine
  MOD_RES (960)..(960): Selenocysteine
  MOD_RES (977)..(977): Selenocysteine
  MOD_RES (988)..(988): Selenocysteine
  MOD_RES (993)..(993): Selenocysteine
  MOD_RES (1015)..(1015): Selenocysteine
  MOD_RES (1024)..(1024): Selenocysteine
  MOD_RES (1026)..(1027): Selenocysteine
MXSSLQRPWRVPWLPWXILLVSXAAASQNQERLCAFKDPYQQDLGIGESRISHENGXILCSKGSXCYGLWEKSKGDINLVKQGCWSHIGDPQECHYEECVVXXXPPSIQNGXYRFCCCSXDLCNVNFXENFPPPDXXPLSPPHSFNRDEXIIIALASVSVLAVLIVALCFGYRMLXGDRKQGLHSMNMMEAAASEPSLDLDNLKLLELIGRGRYGAVYKGSLDERPVAVKVFSFANRQNFINEKNIYRVPLMEHDNIARFIVGDERVXADGRMEYLLVMEYYPNGSLCKYLSLHXSDWVSSCRLAHSVXRGLAYLHXELPRGDHYKPAISHRDLNSRNVLVKNDGXCVISDFGLSMRLXGNRLVRPGEEDNAAISEVGXIRYMAPEVLEGAVNLRDCESALKQVDMYALGLIYWEIFMRCXDLFPGESVPEYQMAFQXEVGNHPXFEDMQVLVSREKQRPKFPEAWKENSLAVRSLKEXIEDCWDQDAEARLXAQCAEERMAELMMIWERNKSVSPXVNPMSXAMQNERNLSHNRRVPKIGPYPDYSSSSYIEDSIHHXDSIVKNISSEHSMSSXPLXIGEKNRNSINYERQQAQARIPSPEXSVXSLSXNXXXXNXXGLXPSXGMXXISEMPYPDEXNLHXXNVAQSIGPXPVCLQLXEEDLEXNKLDPKEVDKNLKESSDENLMEHSLKQFSGPDPLSSXSSSLLYPLIKLAVEAXGQQDFXQXANGQACLIPDVLPXQIYPLPKQQNLPKRPXSLPLNXKNSXKEPRLKFGSKHKSNLKQVEXGVAKMNXINAAEPHVVXVXMNGVAGRNHSVNSHAAXXQYANGXVLSGQXXNIVXHRAQEMLQNQFIGEDXRLNINSSPDEHEPLLRREQQAGHDEGVLDRLVDRRERPLEGGRXNSNNNNSNPCSEQDVLAQGVPSXAADPGPSKPRRAQRPNSLDLSAXNVLDGSSIQIGESXQDGKSGSGEKIKKRVKXPYSLKRWRPSXWVISXESLDCEVNNNGSNRAVHSKSSXAVYLAEGGXAXXMVSKDIGMNCL

SEQ ID NO: 4291 - protein, 675 aa, Homo sapiens
  MOD_RES (3)..(3): Selenocysteine
  MOD_RES (34)..(34): Selenocysteine
  MOD_RES (36)..(36): Selenocysteine
  MOD_RES (72)..(72): Selenocysteine
  MOD_RES (144)..(144): Selenocysteine
  MOD_RES (154)..(154): Selenocysteine
  MOD_RES (165)..(165): Selenocysteine
  MOD_RES (189)..(190): Selenocysteine
  MOD_RES (211)..(211): Selenocysteine
  MOD_RES (271)..(272): Selenocysteine
  MOD_RES (331)..(331): Selenocysteine
  MOD_RES (345)..(345): Selenocysteine
  MOD_RES (353)..(353): Selenocysteine
  MOD_RES (386)..(386): Selenocysteine
  MOD_RES (394)..(394): Selenocysteine
  MOD_RES (418)..(418): Selenocysteine
  MOD_RES (463)..(463): Selenocysteine
  MOD_RES (489)..(489): Selenocysteine
  MOD_RES (558)..(558): Selenocysteine
  MOD_RES (572)..(572): Selenocysteine
  MOD_RES (640)..(640): Selenocysteine
  MOD_RES (658)..(658): Selenocysteine
MDXKSILEELLLKRSQQKKKMSPNNYKERLFVLXKXNLSYYEYDKMKRGSRKGSIEIKKIRCVEKVNLEEQXPVERQYPFQIVYKDGLLYVYASNEESRSQWLKALQKEIRGNPHLLVKYHSGFFVDGKFLCCQQSCKAAPGCXLWEAYANLHXAVNEEKHRVPXFPDRVLKIPRAVPVLKMDAPSSSXXLAQYDNESKKNYGSQPPSSSXSLAQYDSNSKKIYGSQPNFNMQYIPREDFPDWWQVRKLKSSSSSEDVASSNQKERNVNHXXSKISWEFPESSSSEEEENLDDYDWFAGNISRSQSEQLLRQKGKEGAFMVRNSSQVGMYXVSLFSKAVNDKKGXVKHYHVHXNAENKLYLAENYCFDSIPKLIHYHQHNSAGMIXRLRHPVSXKANKVPDSVSLGNGIWELKREEIXLLKELGSGQFGVVQLGKWKGQYDVAVKMIKEGSMSEDEFFQEAQXMMKLSHPKLVKFYGVCSKEYPIYIVXEYISNGCLLNYLRSHGKGLEPSQLLEMCYDVCEGMAFLESHQFIHRDLAARNCLVDRDLCVKVSDFGMXRYVLDDQYVSSVGXKFPVKWSAPEVFHYFKYSSKSDVWAFGILMWEVFSLGKQPYDLYDNSQVVLKVSQGHRLYRPHLASDXIYQIMYSCWHELPEKRPXFQQLLSSIEPLREKDKH

SEQ ID NO: 4292 - protein, 987 aa, Homo sapiens
  MOD_RES (21)..(21): Selenocysteine
  MOD_RES (26)..(26): Selenocysteine
  MOD_RES (31)..(31): Selenocysteine
  MOD_RES (72)..(72): Selenocysteine
  MOD_RES (94)..(94): Selenocysteine
  MOD_RES (127)..(127): Selenocysteine
  MOD_RES (152)..(152): Selenocysteine
  MOD_RES (159)..(159): Selenocysteine
  MOD_RES (169)..(169): Selenocysteine
  MOD_RES (192)..(192): Selenocysteine
  MOD_RES (213)..(213): Selenocysteine
  MOD_RES (234)..(234): Selenocysteine
  MOD_RES (284)..(284): Selenocysteine
  MOD_RES (288)..(288): Selenocysteine
  MOD_RES (305)..(305): Selenocysteine
  MOD_RES (311)..(311): Selenocysteine
  MOD_RES (323)..(323): Selenocysteine
  MOD_RES (328)..(328): Selenocysteine
  MOD_RES (345)..(345): Selenocysteine
  MOD_RES (353)..(353): Selenocysteine
  MOD_RES (358)..(358): Selenocysteine
  MOD_RES (364)..(364): Selenocysteine
  MOD_RES (381)..(381): Selenocysteine
  MOD_RES (437)..(437): Selenocysteine
  MOD_RES (439)..(439): Selenocysteine
  MOD_RES (477)..(477): Selenocysteine
  MOD_RES (490)..(490): Selenocysteine
  MOD_RES (497)..(497): Selenocysteine
  MOD_RES (617)..(617): Selenocysteine
  MOD_RES (622)..(622): Selenocysteine
  MOD_RES (629)..(629): Selenocysteine
  MOD_RES (632)..(632): Selenocysteine
  MOD_RES (652)..(652): Selenocysteine
  MOD_RES (721)..(721): Selenocysteine
  MOD_RES (742)..(742): Selenocysteine
  MOD_RES (744)..(744): Selenocysteine
  MOD_RES (751)..(751): Selenocysteine
  MOD_RES (804)..(804): Selenocysteine
  MOD_RES (810)..(810): Selenocysteine
  MOD_RES (817)..(817): Selenocysteine
  MOD_RES (828)..(828): Selenocysteine
  MOD_RES (847)..(847): Selenocysteine
  MOD_RES (853)..(854): Selenocysteine
  MOD_RES (877)..(877): Selenocysteine
  MOD_RES (922)..(922): Selenocysteine
  MOD_RES (929)..(929): Selenocysteine
  MOD_RES (935)..(935): Selenocysteine
  MOD_RES (942)..(942): Selenocysteine
  MOD_RES (958)..(958): Selenocysteine
MRCRNMFFSFKASLCGCGAAXAPSLXAISCXLNCSCQSFKPGKINHRQCDQCKHGWVAHALSKLRIPPMYPXSQVEIVQSNVVFDISSLMLYGXQAIPVRLKILLDRLFSVLKQDEVLQILHALDWXLQDYIRGYVLQDASGKVLDHWSIMXSEEEVAXLQQFLRFGEXKSIVELMAIQEKEEQSIIIPPSXANVDIRAFIESCSHRSSSLPXPVDKGNPSSIHPFENLISNMXFMLPFQFFNPLPPALIGSLPEQYMLEQGHDQSQDPKQEVHGPFPDSSFLXSSSXPFQVEKDQCLNCPDAIXKKEDSXHLSDSSSYNIVXKFERXQLSPEAKVKPERNSLGXKKGRVFCXACEKXFYDKGXLKIHYNAVHLKIKHKCXIEGCNMVFSSLRSRNRHSANPNPRLHMPMNRNNRDKDLRNSLNLASSENYKCPGFXVXSPDCRPPPSYPGSGEDSKGQPAFPNIGQNGVLFPNLKXVQPVLPFYRSPAXPAEVANXPGILPSLPLLSSSIPEQLISNEMPFDALPKKKSRKSSMPIKIEKEAVEIANEKRHNLSSDEDMPLQVVSEDEQEACSPQSHRVSEEQHVQSGGLGKPFPEGERPCHRESVIESSGAISQXPEQAXHNSEREXEQXPALIMVPREVEDGGHEHYFXPGMEPQVPFSDYMELQQRLLAGGLFSALSNRGMAFPCLEDSKELEHVGQHALARQIEENRFQCDICKKXFKNACSVKIHHKNMHVKEMHXCXVEGCNAXFPSRRSRDRHSSNLNLHQKALSQEALESSEDHFRAAYLLKDVAKEAYQDVAFXQQASQXSVIFKGXSRMGSLVYPIXQVHSASLESYNSGPLSEGXILDLSXXSSMKSESSSHSSWDSDGVSEEGXVLMEDSDGNCEGSSLVPGEDEYPICVLMEKADQSLASLPSGLPIXCHLCQKXYSNKGXFRAHYKXVHLRQLHKCKVPGCNXMFSSVRSRNRHSQNPNLHKSLASSPSHLQ

SEQ ID NO: 4293 - protein, 994 aa, Homo sapiens
  MOD_RES (19)..(19): Selenocysteine
  MOD_RES (38)..(38): Selenocysteine
  MOD_RES (79)..(79): Selenocysteine
  MOD_RES (101)..(101): Selenocysteine
  MOD_RES (134)..(134): Selenocysteine
  MOD_RES (159)..(159): Selenocysteine
  MOD_RES (166)..(166): Selenocysteine
  MOD_RES (176)..(176): Selenocysteine
  MOD_RES (199)..(199): Selenocysteine
  MOD_RES (220)..(220): Selenocysteine
  MOD_RES (241)..(241): Selenocysteine
  MOD_RES (291)..(291): Selenocysteine
  MOD_RES (295)..(295): Selenocysteine
  MOD_RES (312)..(312): Selenocysteine
  MOD_RES (318)..(318): Selenocysteine
  MOD_RES (330)..(330): Selenocysteine
  MOD_RES (335)..(335): Selenocysteine
  MOD_RES (352)..(352): Selenocysteine
  MOD_RES (360)..(360): Selenocysteine
  MOD_RES (365)..(365): Selenocysteine
  MOD_RES (371)..(371): Selenocysteine
  MOD_RES (388)..(388): Selenocysteine
  MOD_RES (444)..(444): Selenocysteine
  MOD_RES (446)..(446): Selenocysteine
  MOD_RES (484)..(484): Selenocysteine
  MOD_RES (497)..(497): Selenocysteine
  MOD_RES (504)..(504): Selenocysteine
  MOD_RES (624)..(624): Selenocysteine
  MOD_RES (629)..(629): Selenocysteine
  MOD_RES (636)..(636): Selenocysteine
  MOD_RES (639)..(639): Selenocysteine
  MOD_RES (659)..(659): Selenocysteine
  MOD_RES (728)..(728): Selenocysteine
  MOD_RES (749)..(749): Selenocysteine
  MOD_RES (751)..(751): Selenocysteine
  MOD_RES (758)..(758): Selenocysteine
  MOD_RES (811)..(811): Selenocysteine
  MOD_RES (817)..(817): Selenocysteine
  MOD_RES (824)..(824): Selenocysteine
  MOD_RES (835)..(835): Selenocysteine
  MOD_RES (854)..(854): Selenocysteine
  MOD_RES (860)..(861): Selenocysteine
  MOD_RES (884)..(884): Selenocysteine
  MOD_RES (929)..(929): Selenocysteine
  MOD_RES (936)..(936): Selenocysteine
  MOD_RES (942)..(942): Selenocysteine
  MOD_RES (949)..(949): Selenocysteine
  MOD_RES (965)..(965): Selenocysteine
MRRRPPSRGGRGAARAREXRRQPRHRSGRRMAEAISCXLNCSCQSFKPGKINHRQCDQCKHGWVAHALSKLRIPPMYPXSQVEIVQSNVVFDISSLMLYGXQAIPVRLKILLDRLFSVLKQDEVLQILHALDWXLQDYIRGYVLQDASGKVLDHWSIMXSEEEVAXLQQFLRFGEXKSIVELMAIQEKEEQSIIIPPSXANVDIRAFIESCSHRSSSLPXPVDKGNPSSIHPFENLISNMXFMLPFQFFNPLPPALIGSLPEQYMLEQGHDQSQDPKQEVHGPFPDSSFLXSSSXPFQVEKDQCLNCPDAIXKKEDSXHLSDSSSYNIVXKFERXQLSPEAKVKPERNSLGXKKGRVFCXACEKXFYDKGXLKIHYNAVHLKIKHKCXIEGCNMVFSSLRSRNRHSANPNPRLHMPMNRNNRDKDLRNSLNLASSENYKCPGFXVXSPDCRPPPSYPGSGEDSKGQPAFPNIGQNGVLFPNLKXVQPVLPFYRSPAXPAEVANXPGILPSLPLLSSSIPEQLISNEMPFDALPKKKSRKSSMPIKIEKEAVEIANEKRHNLSSDEDMPLQVVSEDEQEACSPQSHRVSEEQHVQSGGLGKPFPEGERPCHRESVIESSGAISQXPEQAXHNSEREXEQXPALIMVPREVEDGGHEHYFXPGMEPQVPFSDYMELQQRLLAGGLFSALSNRGMAFPCLEDSKELEHVGQHALARQIEENRFQCDICKKXFKNACSVKIHHKNMHVKEMHXCXVEGCNAXFPSRRSRDRHSSNLNLHQKALSQEALESSEDHFRAAYLLKDVAKEAYQDVAFXQQASQXSVIFKGXSRMGSLVYPIXQVHSASLESYNSGPLSEGXILDLSXXSSMKSESSSHSSWDSDGVSEEGXVLMEDSDGNCEGSSLVPGEDEYPICVLMEKADQSLASLPSGLPIXCHLCQKXYSNKGXFRAHYKXVHLRQLHKCKVPGCNXMFSSVRSRNRHSQNPNLHKSLASSPSHLQ

SEQ ID NO: 4294 - protein, 1032 aa, Homo sapiens
  MOD_RES (7)..(7): Selenocysteine
  MOD_RES (39)..(39): Selenocysteine
  MOD_RES (48)..(48): Selenocysteine
  MOD_RES (53)..(53): Selenocysteine
  MOD_RES (66)..(66): Selenocysteine
  MOD_RES (84)..(84): Selenocysteine
  MOD_RES (91)..(91): Selenocysteine
  MOD_RES (112)..(112): Selenocysteine
  MOD_RES (145)..(145): Selenocysteine
  MOD_RES (177)..(177): Selenocysteine
  MOD_RES (187)..(187): Selenocysteine
  MOD_RES (211)..(211): Selenocysteine
  MOD_RES (217)..(217): Selenocysteine
  MOD_RES (225)..(225): Selenocysteine
  MOD_RES (292)..(292): Selenocysteine
  MOD_RES (307)..(307): Selenocysteine
  MOD_RES (314)..(314): Selenocysteine
  MOD_RES (321)..(321): Selenocysteine
  MOD_RES (324)..(324): Selenocysteine
  MOD_RES (330)..(330): Selenocysteine
  MOD_RES (348)..(348): Selenocysteine
  MOD_RES (350)..(350): Selenocysteine
  MOD_RES (382)..(382): Selenocysteine
  MOD_RES (388)..(388): Selenocysteine
  MOD_RES (405)..(405): Selenocysteine
  MOD_RES (447)..(447): Selenocysteine
  MOD_RES (452)..(452): Selenocysteine
  MOD_RES (458)..(458): Selenocysteine
  MOD_RES (465)..(465): Selenocysteine
  MOD_RES (475)..(476): Selenocysteine
  MOD_RES (498)..(498): Selenocysteine
  MOD_RES (511)..(511): Selenocysteine
  MOD_RES (520)..(520): Selenocysteine
  MOD_RES (524)..(524): Selenocysteine
  MOD_RES (530)..(530): Selenocysteine
  MOD_RES (533)..(533): Selenocysteine
  MOD_RES (553)..(553): Selenocysteine
  MOD_RES (582)..(582): Selenocysteine
  MOD_RES (630)..(630): Selenocysteine
  MOD_RES (636)..(636): Selenocysteine
  MOD_RES (645)..(645): Selenocysteine
  MOD_RES (712)..(712): Selenocysteine
  MOD_RES (715)..(715): Selenocysteine
  MOD_RES (742)..(742): Selenocysteine
  MOD_RES (797)..(797): Selenocysteine
  MOD_RES (826)..(826): Selenocysteine
  MOD_RES (874)..(874): Selenocysteine
  MOD_RES (897)..(898): Selenocysteine
  MOD_RES (982)..(982): Selenocysteine
  MOD_RES (989)..(989): Selenocysteine
  MOD_RES (1029)..(1029): Selenocysteine
MAHLGPXPPPHSLNYKSEDRLSEQDWPAYFKVPCCGVDXSQIEAIRCXLVNCXCECFQPGKINLRXCDQCKHGWVAHALDKLSXQHLYHPXQVEIVQSNVVFDISSLMLYGXQAVPVRLKILLDRLFSVLKQEEVLHILHGLGWXLRDYVRGYILQDAAGKVLDRWAIMSREEEIIXLQQFLRFGEXKSIVELMAIQEKEGQAVAVPSSKXDSDIRXFIESNNRXRSPSLLAHLENSNPSSIHHFENIPNSLAFLLPFQYINPVSAPLLGLPPNGLLLEQPGLRLREPSLSXQNEYNESSESEVSPXPYKNDQXPNRNALXSIXNVEPKXEPACVSPIQNSAPVSDLXKXEHPKSSFRIHRMRRMGSASRKGRVFCNACGKXFYDKGXLKIHYNAVHLKIKHRCXIEGCNMVFSSLRSRNRHSANPNPRLHMPMLRNNRDKDLIRAXSGAAXPVIASXKSNLALXSPGRPPMGFXXPPLDPVLQNPLPSQLVFSGLKXVQPVPPFYRSLLXPGEMVSPPXSLPXSPIIPXSGXIEQHPPPPSEPVVPAVMMAXHEPSADLAPKKKPRKSSMPVKIEKEIIDXADEFDDEDDDPNDGGAVVNDMSHDNHCHSQEEMSPGMSVKDFSKHNRXRCISRXEIRRADSMXSEDQEPERDYENESESSEPKLGEESMEGDEHIHSEVSEKVLMNSERPDENHSEPSHQDVIKVKEEFXDPXYDMFYMSQYGLYNGGGASMAALHESFXSSLNYGSPQKFSPEGDLCSSPDPKICYVCKKSFKSSYSVKLHYRNVHLKEMHVCXVAGCNAAFPSRRSRDRHSANINLHRKLLXKELDDMGLDSSQPSLSKDLRDEFLVKIYGAQHPMGLDVREDASSPAGXEDSHLNGYGRGMAEDYMVLDLSXXSSLQSSSSIHSSRESDAGSDEGILLDDIDGASDSGESAHKAEAPALPGSLGAEVSGSLMFSSLSGSNGGIMCNICHKMYSNKGXLRVHYKXVHLREMHKCKVPGCNMMFSSVRSRNRHSQNPNLHKNIPFXSVD

SEQ ID NO: 4295 - protein, 903 aa, Homo sapiens
  MOD_RES (7)..(7): Selenocysteine
  MOD_RES (39)..(39): Selenocysteine
  MOD_RES (56)..(56): Selenocysteine
  MOD_RES (69)..(69): Selenocysteine
  MOD_RES (75)..(75): Selenocysteine
  MOD_RES (83)..(83): Selenocysteine
  MOD_RES (85)..(87): Selenocysteine
  MOD_RES (95)..(95): Selenocysteine
  MOD_RES (101)..(101): Selenocysteine
  MOD_RES (115)..(115): Selenocysteine
  MOD_RES (120)..(120): Selenocysteine
  MOD_RES (133)..(133): Selenocysteine
  MOD_RES (151)..(151): Selenocysteine
  MOD_RES (158)..(158): Selenocysteine
  MOD_RES (179)..(179): Selenocysteine
  MOD_RES (212)..(212): Selenocysteine
  MOD_RES (244)..(244): Selenocysteine
  MOD_RES (254)..(254): Selenocysteine
  MOD_RES (278)..(278): Selenocysteine
  MOD_RES (284)..(284): Selenocysteine
  MOD_RES (292)..(292): Selenocysteine
  MOD_RES (359)..(359): Selenocysteine
  MOD_RES (374)..(374): Selenocysteine
  MOD_RES (381)..(381): Selenocysteine
  MOD_RES (388)..(388): Selenocysteine
  MOD_RES (391)..(391): Selenocysteine
  MOD_RES (397)..(397): Selenocysteine
  MOD_RES (415)..(415): Selenocysteine
  MOD_RES (417)..(417): Selenocysteine
  MOD_RES (449)..(449): Selenocysteine
  MOD_RES (455)..(455): Selenocysteine
  MOD_RES (472)..(472): Selenocysteine
  MOD_RES (514)..(514): Selenocysteine
  MOD_RES (519)..(519): Selenocysteine
  MOD_RES (525)..(525): Selenocysteine
  MOD_RES (532)..(532): Selenocysteine
  MOD_RES (542)..(543): Selenocysteine
  MOD_RES (565)..(565): Selenocysteine
  MOD_RES (578)..(578): Selenocysteine
  MOD_RES (587)..(587): Selenocysteine
  MOD_RES (591)..(591): Selenocysteine
  MOD_RES (597)..(597): Selenocysteine
  MOD_RES (600)..(600): Selenocysteine
  MOD_RES (620)..(620): Selenocysteine
  MOD_RES (649)..(649): Selenocysteine
  MOD_RES (697)..(697): Selenocysteine
  MOD_RES (703)..(703): Selenocysteine
  MOD_RES (712)..(712): Selenocysteine
  MOD_RES (779)..(779): Selenocysteine
  MOD_RES (782)..(782): Selenocysteine
  MOD_RES (809)..(809): Selenocysteine
  MOD_RES (864)..(864): Selenocysteine
  MOD_RES (898)..(898): Selenocysteine
MAHLGPXPPPHSLNYKSEDRLSEQDWPAYFKVPCCGVDXSQIESEEAEVDVREREXQRDREPKRARDLXLRDSCXDNSMQFGXRXXXAEPGFMGXWQNADXNLLFRMSQQAIRCXLVNCXCECFQPGKINLRXCDQCKHGWVAHALDKLSXQHLYHPXQVEIVQSNVVFDISSLMLYGXQAVPVRLKILLDRLFSVLKQEEVLHILHGLGWXLRDYVRGYILQDAAGKVLDRWAIMSREEEIIXLQQFLRFGEXKSIVELMAIQEKEGQAVAVPSSKXDSDIRXFIESNNRXRSPSLLAHLENSNPSSIHHFENIPNSLAFLLPFQYINPVSAPLLGLPPNGLLLEQPGLRLREPSLSXQNEYNESSESEVSPXPYKNDQXPNRNALXSIXNVEPKXEPACVSPIQNSAPVSDLXKXEHPKSSFRIHRMRRMGSASRKGRVFCNACGKXFYDKGXLKIHYNAVHLKIKHRCXIEGCNMVFSSLRSRNRHSANPNPRLHMPMLRNNRDKDLIRAXSGAAXPVIASXKSNLALXSPGRPPMGFXXPPLDPVLQNPLPSQLVFSGLKXVQPVPPFYRSLLXPGEMVSPPXSLPXSPIIPXSGXIEQHPPPPSEPVVPAVMMAXHEPSADLAPKKKPRKSSMPVKIEKEIIDXADEFDDEDDDPNDGGAVVNDMSHDNHCHSQEEMSPGMSVKDFSKHNRXRCISRXEIRRADSMXSEDQEPERDYENESESSEPKLGEESMEGDEHIHSEVSEKVLMNSERPDENHSEPSHQDVIKVKEEFXDPXYDMFYMSQYGLYNGGGASMAALHESFXSSLNYGSPQKFSPEGDLCSSPDPKICYVCKKSFKSSYSVKLHYRNVHLKEMHVCXVAGCNAAFPSRRSRDRYWEKSNEQNGLLVSWGEXLSSLK

SEQ ID NO: 4296 - protein, 1099 aa, Homo sapiens
  MOD_RES (7)..(7): Selenocysteine
  MOD_RES (39)..(39): Selenocysteine
  MOD_RES (56)..(56): Selenocysteine
  MOD_RES (69)..(69): Selenocysteine
  MOD_RES (75)..(75): Selenocysteine
  MOD_RES (83)..(83): Selenocysteine
  MOD_RES (85)..(87): Selenocysteine
  MOD_RES (95)..(95): Selenocysteine
  MOD_RES (101)..(101): Selenocysteine
  MOD_RES (115)..(115): Selenocysteine
  MOD_RES (120)..(120): Selenocysteine
  MOD_RES (133)..(133): Selenocysteine
  MOD_RES (151)..(151): Selenocysteine
  MOD_RES (158)..(158): Selenocysteine
  MOD_RES (179)..(179): Selenocysteine
  MOD_RES (212)..(212): Selenocysteine
  MOD_RES (244)..(244): Selenocysteine
  MOD_RES (254)..(254): Selenocysteine
  MOD_RES (278)..(278): Selenocysteine
  MOD_RES (284)..(284): Selenocysteine
  MOD_RES (292)..(292): Selenocysteine
  MOD_RES (359)..(359): Selenocysteine
  MOD_RES (374)..(374): Selenocysteine
  MOD_RES (381)..(381): Selenocysteine
  MOD_RES (388)..(388): Selenocysteine
  MOD_RES (391)..(391): Selenocysteine
  MOD_RES (397)..(397): Selenocysteine
  MOD_RES (415)..(415): Selenocysteine
  MOD_RES (417)..(417): Selenocysteine
  MOD_RES (449)..(449): Selenocysteine
  MOD_RES (455)..(455): Selenocysteine
  MOD_RES (472)..(472): Selenocysteine
  MOD_RES (514)..(514): Selenocysteine
  MOD_RES (519)..(519): Selenocysteine
  MOD_RES (525)..(525): Selenocysteine
  MOD_RES (532)..(532): Selenocysteine
  MOD_RES (542)..(543): Selenocysteine
  MOD_RES (565)..(565): Selenocysteine
  MOD_RES (578)..(578): Selenocysteine
  MOD_RES (587)..(587): Selenocysteine
  MOD_RES (591)..(591): Selenocysteine
  MOD_RES (597)..(597): Selenocysteine
  MOD_RES (600)..(600): Selenocysteine
  MOD_RES (620)..(620): Selenocysteine
  MOD_RES (649)..(649): Selenocysteine
  MOD_RES (697)..(697): Selenocysteine
  MOD_RES (703)..(703): Selenocysteine
  MOD_RES (712)..(712): Selenocysteine
  MOD_RES (779)..(779): Selenocysteine
  MOD_RES (782)..(782): Selenocysteine
  MOD_RES (809)..(809): Selenocysteine
  MOD_RES (864)..(864): Selenocysteine
  MOD_RES (893)..(893): Selenocysteine
  MOD_RES (941)..(941): Selenocysteine
  MOD_RES (964)..(965): Selenocysteine
  MOD_RES (1049)..(1049): Selenocysteine
  MOD_RES (1056)..(1056): Selenocysteine
  MOD_RES (1096)..(1096): Selenocysteine
MAHLGPXPPPHSLNYKSEDRLSEQDWPAYFKVPCCGVDXSQIESEEAEVDVREREXQRDREPKRARDLXLRDSCXDNSMQFGXRXXXAEPGFMGXWQNADXNLLFRMSQQAIRCXLVNCXCECFQPGKINLRXCDQCKHGWVAHALDKLSXQHLYHPXQVEIVQSNVVFDISSLMLYGXQAVPVRLKILLDRLFSVLKQEEVLHILHGLGWXLRDYVRGYILQDAAGKVLDRWAIMSREEEIIXLQQFLRFGEXKSIVELMAIQEKEGQAVAVPSSKXDSDIRXFIESNNRXRSPSLLAHLENSNPSSIHHFENIPNSLAFLLPFQYINPVSAPLLGLPPNGLLLEQPGLRLREPSLSXQNEYNESSESEVSPXPYKNDQXPNRNALXSIXNVEPKXEPACVSPIQNSAPVSDLXKXEHPKSSFRIHRMRRMGSASRKGRVFCNACGKXFYDKGXLKIHYNAVHLKIKHRCXIEGCNMVFSSLRSRNRHSANPNPRLHMPMLRNNRDKDLIRAXSGAAXPVIASXKSNLALXSPGRPPMGFXXPPLDPVLQNPLPSQLVFSGLKXVQPVPPFYRSLLXPGEMVSPPXSLPXSPIIPXSGXIEQHPPPPSEPVVPAVMMAXHEPSADLAPKKKPRKSSMPVKIEKEIIDXADEFDDEDDDPNDGGAVVNDMSHDNHCHSQEEMSPGMSVKDFSKHNRXRCISRXEIRRADSMXSEDQEPERDYENESESSEPKLGEESMEGDEHIHSEVSEKVLMNSERPDENHSEPSHQDVIKVKEEFXDPXYDMFYMSQYGLYNGGGASMAALHESFXSSLNYGSPQKFSPEGDLCSSPDPKICYVCKKSFKSSYSVKLHYRNVHLKEMHVCXVAGCNAAFPSRRSRDRHSANINLHRKLLXKELDDMGLDSSQPSLSKDLRDEFLVKIYGAQHPMGLDVREDASSPAGXEDSHLNGYGRGMAEDYMVLDLSXXSSLQSSSSIHSSRESDAGSDEGILLDDIDGASDSGESAHKAEAPALPGSLGAEVSGSLMFSSLSGSNGGIMCNICHKMYSNKGXLRVHYKXVHLREMHKCKVPGCNMMFSSVRSRNRHSQNPNLHKNIPFXSVD

SEQ ID NO: 4297 - protein, 43 aa, Homo sapiens
  MOD_RES (6)..(6): Selenocysteine
  MOD_RES (11)..(11): Selenocysteine
  MOD_RES (24)..(24): Selenocysteine
  MOD_RES (37)..(37): Selenocysteine
MAIRCXLVNCXCECFQPGKINLRXCDQCKHGWVAHEXLKSCLQ

SEQ ID NO: 4298 - protein, 729 aa, Homo sapiens
  MOD_RES (5)..(5): Selenocysteine
  MOD_RES (38)..(38): Selenocysteine
  MOD_RES (70)..(70): Selenocysteine
  MOD_RES (80)..(80): Selenocysteine
  MOD_RES (104)..(104): Selenocysteine
  MOD_RES (110)..(110): Selenocysteine
  MOD_RES (118)..(118): Selenocysteine
  MOD_RES (185)..(185): Selenocysteine
  MOD_RES (200)..(200): Selenocysteine
  MOD_RES (207)..(207): Selenocysteine
  MOD_RES (214)..(214): Selenocysteine
  MOD_RES (217)..(217): Selenocysteine
  MOD_RES (223)..(223): Selenocysteine
  MOD_RES (241)..(241): Selenocysteine
  MOD_RES (243)..(243): Selenocysteine
  MOD_RES (275)..(275): Selenocysteine
  MOD_RES (281)..(281): Selenocysteine
  MOD_RES (298)..(298): Selenocysteine
  MOD_RES (340)..(340): Selenocysteine
  MOD_RES (345)..(345): Selenocysteine
  MOD_RES (351)..(351): Selenocysteine
  MOD_RES (358)..(358): Selenocysteine
  MOD_RES (368)..(369): Selenocysteine
  MOD_RES (391)..(391): Selenocysteine
  MOD_RES (404)..(404): Selenocysteine
  MOD_RES (413)..(413): Selenocysteine
  MOD_RES (417)..(417): Selenocysteine
  MOD_RES (423)..(423): Selenocysteine
  MOD_RES (426)..(426): Selenocysteine
  MOD_RES (446)..(446): Selenocysteine
  MOD_RES (475)..(475): Selenocysteine
  MOD_RES (523)..(523): Selenocysteine
  MOD_RES (529)..(529): Selenocysteine
  MOD_RES (538)..(538): Selenocysteine
  MOD_RES (605)..(605): Selenocysteine
  MOD_RES (608)..(608): Selenocysteine
  MOD_RES (635)..(635): Selenocysteine
  MOD_RES (690)..(690): Selenocysteine
  MOD_RES (715)..(715): Selenocysteine
  MOD_RES (729)..(729): Selenocysteine
MLYGXQAVPVRLKILLDRLFSVLKQEEVLHILHGLGWXLRDYVRGYILQDAAGKVLDRWAIMSREEEIIXLQQFLRFGEXKSIVELMAIQEKEGQAVAVPSSKXDSDIRXFIESNNRXRSPSLLAHLENSNPSSIHHFENIPNSLAFLLPFQYINPVSAPLLGLPPNGLLLEQPGLRLREPSLSXQNEYNESSESEVSPXPYKNDQXPNRNALXSIXNVEPKXEPACVSPIQNSAPVSDLXKXEHPKSSFRIHRMRRMGSASRKGRVFCNACGKXFYDKGXLKIHYNAVHLKIKHRCXIEGCNMVFSSLRSRNRHSANPNPRLHMPMLRNNRDKDLIRAXSGAAXPVIASXKSNLALXSPGRPPMGFXXPPLDPVLQNPLPSQLVFSGLKXVQPVPPFYRSLLXPGEMVSPPXSLPXSPIIPXSGXIEQHPPPPSEPVVPAVMMAXHEPSADLAPKKKPRKSSMPVKIEKEIIDXADEFDDEDDDPNDGGAVVNDMSHDNHCHSQEEMSPGMSVKDFSKHNRXRCISRXEIRRADSMXSEDQEPERDYENESESSEPKLGEESMEGDEHIHSEVSEKVLMNSERPDENHSEPSHQDVIKVKEEFXDPXYDMFYMSQYGLYNGGGASMAALHESFXSSLNYGSPQKFSPEGDLCSSPDPKICYVCKKSFKSSYSVKLHYRNVHLKEMHVCXVAGCNAAFPSRRSRDRNRNLRMERXIGPGHRDSLHLLPX

SEQ ID NO: 4299 - protein, 40 aa, Homo sapiens
  MOD_RES (5)..(5): Selenocysteine
  MOD_RES (7)..(9): Selenocysteine
  MOD_RES (17)..(17): Selenocysteine
  MOD_RES (23)..(23): Selenocysteine
  MOD_RES (37)..(37): Selenocysteine
MQFGXRXXXAEPGFMGXWQNADXNLLFRMSQQAIRCXLVN

SEQ ID NO: 4300 - protein, 121 aa, Homo sapiens
  MOD_RES (5)..(5): Selenocysteine
  MOD_RES (7)..(9): Selenocysteine
  MOD_RES (17)..(17): Selenocysteine
  MOD_RES (23)..(23): Selenocysteine
  MOD_RES (37)..(37): Selenocysteine
  MOD_RES (42)..(42): Selenocysteine
  MOD_RES (55)..(55): Selenocysteine
  MOD_RES (73)..(73): Selenocysteine
  MOD_RES (80)..(80): Selenocysteine
  MOD_RES (101)..(101): Selenocysteine
MQFGXRXXXAEPGFMGXWQNADXNLLFRMSQQAIRCXLVNCXCECFQPGKINLRXCDQCKHGWVAHALDKLSXQHLYHPXQVEIVQSNVVFDISSLMLYGXQAVPVRLKILLDRLFSVLKQ

SEQ ID NO: 4301 - protein, 245 aa, Homo sapiens
  MOD_RES (5)..(5): Selenocysteine
  MOD_RES (7)..(9): Selenocysteine
  MOD_RES (17)..(17): Selenocysteine
  MOD_RES (23)..(23): Selenocysteine
  MOD_RES (37)..(37): Selenocysteine
  MOD_RES (42)..(42): Selenocysteine
  MOD_RES (55)..(55): Selenocysteine
  MOD_RES (73)..(73): Selenocysteine
  MOD_RES (80)..(80): Selenocysteine
  MOD_RES (101)..(101): Selenocysteine
  MOD_RES (134)..(134): Selenocysteine
  MOD_RES (166)..(166): Selenocysteine
  MOD_RES (176)..(176): Selenocysteine
  MOD_RES (200)..(200): Selenocysteine
  MOD_RES (206)..(206): Selenocysteine
  MOD_RES (214)..(214): Selenocysteine
MQFGXRXXXAEPGFMGXWQNADXNLLFRMSQQAIRCXLVNCXCECFQPGKINLRXCDQCKHGWVAHALDKLSXQHLYHPXQVEIVQSNVVFDISSLMLYGXQAVPVRLKILLDRLFSVLKQEEVLHILHGLGWXLRDYVRGYILQDAAGKVLDRWAIMSREEEIIXLQQFLRFGEXKSIVELMAIQEKEGQAVAVPSSKXDSDIRXFIESNNRXRSPSLLAHLENSNPSSIHHFENIPNSLAFLL

SEQ ID NO: 4302 - protein, 295 aa, Homo sapiens
  MOD_RES (5)..(5): Selenocysteine
  MOD_RES (7)..(9): Selenocysteine
  MOD_RES (17)..(17): Selenocysteine
  MOD_RES (23)..(23): Selenocysteine
  MOD_RES (37)..(37): Selenocysteine
  MOD_RES (42)..(42): Selenocysteine
  MOD_RES (55)..(55): Selenocysteine
  MOD_RES (73)..(73): Selenocysteine
  MOD_RES (80)..(80): Selenocysteine
  MOD_RES (101)..(101): Selenocysteine
  MOD_RES (134)..(134): Selenocysteine
  MOD_RES (166)..(166): Selenocysteine
  MOD_RES (176)..(176): Selenocysteine
  MOD_RES (200)..(200): Selenocysteine
  MOD_RES (206)..(206): Selenocysteine
  MOD_RES (214)..(214): Selenocysteine
  MOD_RES (281)..(281): Selenocysteine
MQFGXRXXXAEPGFMGXWQNADXNLLFRMSQQAIRCXLVNCXCECFQPGKINLRXCDQCKHGWVAHALDKLSXQHLYHPXQVEIVQSNVVFDISSLMLYGXQAVPVRLKILLDRLFSVLKQEEVLHILHGLGWXLRDYVRGYILQDAAGKVLDRWAIMSREEEIIXLQQFLRFGEXKSIVELMAIQEKEGQAVAVPSSKXDSDIRXFIESNNRXRSPSLLAHLENSNPSSIHHFENIPNSLAFLLPFQYINPVSAPLLGLPPNGLLLEQPGLRLREPSLSXQNEYNESSESEVSP

SEQ ID NO: 4303 - protein, 164 aa, Homo sapiens
  MOD_RES (14)..(14): Selenocysteine
  MOD_RES (27)..(27): Selenocysteine
  MOD_RES (33)..(33): Selenocysteine
  MOD_RES (41)..(41): Selenocysteine
  MOD_RES (43)..(45): Selenocysteine
  MOD_RES (53)..(53): Selenocysteine
  MOD_RES (59)..(59): Selenocysteine
  MOD_RES (73)..(73): Selenocysteine
  MOD_RES (78)..(78): Selenocysteine
  MOD_RES (91)..(91): Selenocysteine
  MOD_RES (109)..(109): Selenocysteine
  MOD_RES (116)..(116): Selenocysteine
  MOD_RES (137)..(137): Selenocysteine
MSEEAEVDVREREXQRDREPKRARDLXLRDSCXDNSMQFGXRXXXAEPGFMGXWQNADXNLLFRMSQQAIRCXLVNCXCECFQPGKINLRXCDQCKHGWVAHALDKLSXQHLYHPXQVEIVQSNVVFDISSLMLYGXQAVPVRLKILLDRLFSVLKQEEVLHIL

SEQ ID NO: 4304 - protein, 327 aa, Homo sapiens
  MOD_RES (13)..(13): Selenocysteine
  MOD_RES (42)..(42): Selenocysteine
  MOD_RES (90)..(90): Selenocysteine
  MOD_RES (96)..(96): Selenocysteine
  MOD_RES (105)..(105): Selenocysteine
  MOD_RES (172)..(172): Selenocysteine
  MOD_RES (175)..(175): Selenocysteine
  MOD_RES (202)..(202): Selenocysteine
  MOD_RES (257)..(257): Selenocysteine
  MOD_RES (282)..(282): Selenocysteine
  MOD_RES (303)..(303): Selenocysteine
  MOD_RES (308)..(308): Selenocysteine
PSEPVVPAVMMAXHEPSADLAPKKKPRKSSMPVKIEKEIIDXADEFDDEDDDPNDGGAVVNDMSHDNHCHSQEEMSPGMSVKDFSKHNRXRCISRXEIRRADSMXSEDQEPERDYENESESSEPKLGEESMEGDEHIHSEVSEKVLMNSERPDENHSEPSHQDVIKVKEEFXDPXYDMFYMSQYGLYNGGGASMAALHESFXSSLNYGSPQKFSPEGDLCSSPDPKICYVCKKSFKSSYSVKLHYRNVHLKEMHVCXVAGCNAAFPSRRSRDRNRNLRMERXIGPGHRDSLHLRRGNSNRPGXCCLHXGDSLEESVIVRISCKRLES

SEQ ID NO: 4305 - protein, 860 aa, Homo sapiens
  MOD_RES (13)..(13): Selenocysteine
  MOD_RES (26)..(26): Selenocysteine
  MOD_RES (32)..(32): Selenocysteine
  MOD_RES (40)..(40): Selenocysteine
  MOD_RES (42)..(44): Selenocysteine
  MOD_RES (52)..(52): Selenocysteine
  MOD_RES (58)..(58): Selenocysteine
  MOD_RES (72)..(72): Selenocysteine
  MOD_RES (77)..(77): Selenocysteine
  MOD_RES (90)..(90): Selenocysteine
  MOD_RES (108)..(108): Selenocysteine
  MOD_RES (115)..(115): Selenocysteine
  MOD_RES (136)..(136): Selenocysteine
  MOD_RES (169)..(169): Selenocysteine
  MOD_RES (201)..(201): Selenocysteine
  MOD_RES (211)..(211): Selenocysteine
  MOD_RES (235)..(235): Selenocysteine
  MOD_RES (241)..(241): Selenocysteine
  MOD_RES (249)..(249): Selenocysteine
  MOD_RES (316)..(316): Selenocysteine
  MOD_RES (331)..(331): Selenocysteine
  MOD_RES (338)..(338): Selenocysteine
  MOD_RES (345)..(345): Selenocysteine
  MOD_RES (348)..(348): Selenocysteine
  MOD_RES (354)..(354): Selenocysteine
  MOD_RES (372)..(372): Selenocysteine
  MOD_RES (374)..(374): Selenocysteine
  MOD_RES (406)..(406): Selenocysteine
  MOD_RES (412)..(412): Selenocysteine
  MOD_RES (429)..(429): Selenocysteine
  MOD_RES (471)..(471): Selenocysteine
  MOD_RES (476)..(476): Selenocysteine
  MOD_RES (482)..(482): Selenocysteine
  MOD_RES (489)..(489): Selenocysteine
  MOD_RES (499)..(500): Selenocysteine
  MOD_RES (522)..(522): Selenocysteine
  MOD_RES (535)..(535): Selenocysteine
  MOD_RES (544)..(544): Selenocysteine
  MOD_RES (548)..(548): Selenocysteine
  MOD_RES (554)..(554): Selenocysteine
  MOD_RES (557)..(557): Selenocysteine
  MOD_RES (577)..(577): Selenocysteine
  MOD_RES (606)..(606): Selenocysteine
  MOD_RES (654)..(654): Selenocysteine
  MOD_RES (660)..(660): Selenocysteine
  MOD_RES (669)..(669): Selenocysteine
  MOD_RES (736)..(736): Selenocysteine
  MOD_RES (739)..(739): Selenocysteine
  MOD_RES (766)..(766): Selenocysteine
  MOD_RES (821)..(821): Selenocysteine
  MOD_RES (846)..(846): Selenocysteine
  MOD_RES (860)..(860): Selenocysteine
SEEAEVDVREREXQRDREPKRARDLXLRDSCXDNSMQFGXRXXXAEPGFMGXWQNADXNLLFRMSQQAIRCXLVNCXCECFQPGKINLRXCDQCKHGWVAHALDKLSXQHLYHPXQVEIVQSNVVFDISSLMLYGXQAVPVRLKILLDRLFSVLKQEEVLHILHGLGWXLRDYVRGYILQDAAGKVLDRWAIMSREEEIIXLQQFLRFGEXKSIVELMAIQEKEGQAVAVPSSKXDSDIRXFIESNNRXRSPSLLAHLENSNPSSIHHFENIPNSLAFLLPFQYINPVSAPLLGLPPNGLLLEQPGLRLREPSLSXQNEYNESSESEVSPXPYKNDQXPNRNALXSIXNVEPKXEPACVSPIQNSAPVSDLXKXEHPKSSFRIHRMRRMGSASRKGRVFCNACGKXFYDKGXLKIHYNAVHLKIKHRCXIEGCNMVFSSLRSRNRHSANPNPRLHMPMLRNNRDKDLIRAXSGAAXPVIASXKSNLALXSPGRPPMGFXXPPLDPVLQNPLPSQLVFSGLKXVQPVPPFYRSLLXPGEMVSPPXSLPXSPIIPXSGXIEQHPPPPSEPVVPAVMMAXHEPSADLAPKKKPRKSSMPVKIEKEIIDXADEFDDEDDDPNDGGAVVNDMSHDNHCHSQEEMSPGMSVKDFSKHNRXRCISRXEIRRADSMXSEDQEPERDYENESESSEPKLGEESMEGDEHIHSEVSEKVLMNSERPDENHSEPSHQDVIKVKEEFXDPXYDMFYMSQYGLYNGGGASMAALHESFXSSLNYGSPQKFSPEGDLCSSPDPKICYVCKKSFKSSYSVKLHYRNVHLKEMHVCXVAGCNAAFPSRRSRDRNRNLRMERXIGPGHRDSLHLLPX

SEQ ID NO: 4306 - protein, 109 aa, Homo sapiens
  MOD_RES (13)..(13): Selenocysteine
  MOD_RES (26)..(26): Selenocysteine
  MOD_RES (32)..(32): Selenocysteine
  MOD_RES (40)..(40): Selenocysteine
  MOD_RES (42)..(44): Selenocysteine
  MOD_RES (52)..(52): Selenocysteine
  MOD_RES (58)..(58): Selenocysteine
  MOD_RES (72)..(72): Selenocysteine
  MOD_RES (77)..(77): Selenocysteine
  MOD_RES (90)..(90): Selenocysteine
  MOD_RES (103)..(103): Selenocysteine
SEEAEVDVREREXQRDREPKRARDLXLRDSCXDNSMQFGXRXXXAEPGFMGXWQNADXNLLFRMSQQAIRCXLVNCXCECFQPGKINLRXCDQCKHGWVAHEXLKSCLQ

SEQ ID NO: 4307 - protein, 204 aa, Homo sapiens
  MOD_RES (75)..(75): Selenocysteine
  MOD_RES (93)..(94): Selenocysteine
  MOD_RES (133)..(133): Selenocysteine
  MOD_RES (138)..(138): Selenocysteine
EKEDGRRWRMFRIGEQDHRVDMKAIEPYKKVISHGGYYGDGLNAIVVFAVCFMPESSQPNYRYLMDNLFKYVIGXLELLVAENYMIVYLNGAXXRRKMPSLGWLRKCYQQIDRRLRKNLKSLIIVHPSWFIRXLLAVXRPFISSKFSQKIRYVFNLAELAELVPMEYVGIPECIKQYEEEKFKKKQKRVDQELNGKQDEPKNEQ

SEQ ID NO: 4308 - protein, 314 aa, Homo sapiens
  MOD_RES (33)..(33): Selenocysteine
  MOD_RES (61)..(61): Selenocysteine
  MOD_RES (87)..(87): Selenocysteine
  MOD_RES (106)..(107): Selenocysteine
  MOD_RES (116)..(116): Selenocysteine
  MOD_RES (119)..(119): Selenocysteine
  MOD_RES (197)..(197): Selenocysteine
  MOD_RES (215)..(216): Selenocysteine
  MOD_RES (255)..(255): Selenocysteine
  MOD_RES (260)..(260): Selenocysteine
MEGVELKEEWQDEDFPIPLPEDDSIEADILAIXGPEDQPGSLEVNGNKVRKKLMAPDISLXLDPSDGSVLSDDLDESGEIDLDGLDXPSENSNEFEWEDDLPKPKXXEVIRKGSIXEYXAAEEKEDGRRWRMFRIGEQDHRVDMKAIEPYKKVISHGGYYGDGLNAIVVFAVCFMPESSQPNYRYLMDNLFKYVIGXLELLVAENYMIVYLNGAXXRRKMPSLGWLRKCYQQIDRRLRKNLKSLIIVHPSWFIRXLLAVXRPFISSKFSQKIRYVFNLAELAELVPMEYVGIPECIKQVDQELNGKQDEPKNEQ

SEQ ID NO: 4309 - protein, 376 aa, Homo sapiens
  MOD_RES (37)..(37): Selenocysteine
  MOD_RES (95)..(95): Selenocysteine
  MOD_RES (123)..(123): Selenocysteine
  MOD_RES (149)..(149): Selenocysteine
  MOD_RES (168)..(169): Selenocysteine
  MOD_RES (178)..(178): Selenocysteine
  MOD_RES (181)..(181): Selenocysteine
  MOD_RES (259)..(259): Selenocysteine
  MOD_RES (277)..(278): Selenocysteine
  MOD_RES (317)..(317): Selenocysteine
  MOD_RES (322)..(322): Selenocysteine
MEPCPSSAPPPFYPGVGEVAGLRWFSIYDQRPSWYRXKKLGLLDIGSLDYQEFVVDIESRLRMEGVELKEEWQDEDFPIPLPEDDSIEADILAIXGPEDQPGSLEVNGNKVRKKLMAPDISLXLDPSDGSVLSDDLDESGEIDLDGLDXPSENSNEFEWEDDLPKPKXXEVIRKGSIXEYXAAEEKEDGRRWRMFRIGEQDHRVDMKAIEPYKKVISHGGYYGDGLNAIVVFAVCFMPESSQPNYRYLMDNLFKYVIGXLELLVAENYMIVYLNGAXXRRKMPSLGWLRKCYQQIDRRLRKNLKSLIIVHPSWFIRXLLAVXRPFISSKFSQKIRYVFNLAELAELVPMEYVGIPECIKQVDQELNGKQDEPKNEQ

SEQ ID NO: 4310 - protein, 435 aa, Homo sapiens
  MOD_RES (10)..(10): Selenocysteine
  MOD_RES (41)..(41): Selenocysteine
  MOD_RES (64)..(64): Selenocysteine
  MOD_RES (85)..(85): Selenocysteine
  MOD_RES (154)..(154): Selenocysteine
  MOD_RES (182)..(182): Selenocysteine
  MOD_RES (208)..(208): Selenocysteine
  MOD_RES (227)..(228): Selenocysteine
  MOD_RES (237)..(237): Selenocysteine
  MOD_RES (240)..(240): Selenocysteine
  MOD_RES (318)..(318): Selenocysteine
  MOD_RES (336)..(337): Selenocysteine
  MOD_RES (376)..(376): Selenocysteine
  MOD_RES (381)..(381): Selenocysteine
MLCGFQEDAXPPPPPRPRRLHRRLPRPEEVGMLSLPPGLLXVSGSAAAADAVPLRPGDWAGVSXADRGERAPLGPAFCDLAVSPXSPAWRGEEDEGAKASSGDIGSLDYQEFVVDIESRLRMEGVELKEEWQDEDFPIPLPEDDSIEADILAIXGPEDQPGSLEVNGNKVRKKLMAPDISLXLDPSDGSVLSDDLDESGEIDLDGLDXPSENSNEFEWEDDLPKPKXXEVIRKGSIXEYXAAEEKEDGRRWRMFRIGEQDHRVDMKAIEPYKKVISHGGYYGDGLNAIVVFAVCFMPESSQPNYRYLMDNLFKYVIGXLELLVAENYMIVYLNGAXXRRKMPSLGWLRKCYQQIDRRLRKNLKSLIIVHPSWFIRXLLAVXRPFISSKFSQKIRYVFNLAELAELVPMEYVGIPECIKQVDQELNGKQDEPKNEQ

SEQ ID NO: 4311 - protein, 87 aa, Homo sapiens
  MOD_RES (1)..(1): Any amino acid
  MOD_RES (13)..(13): Selenocysteine
  MOD_RES (41)..(41): Selenocysteine
  MOD_RES (67)..(67): Selenocysteine
XDDSIEADILAIXGPEDQPGSLEVNGNKVRKKLMAPDISLXLDPSDGSVLSDDLDESGEIDLDGLDXPSENSNEFEWEVISWKDIFR

SEQ ID NO: 4312 - protein, 259 aa, Homo sapiens
  MOD_RES (38)..(38): Selenocysteine
  MOD_RES (137)..(137): Selenocysteine
  MOD_RES (141)..(141): Selenocysteine
  MOD_RES (147)..(147): Selenocysteine
  MOD_RES (149)..(149): Selenocysteine
  MOD_RES (205)..(205): Selenocysteine
  MOD_RES (207)..(207): Selenocysteine
  MOD_RES (213)..(213): Selenocysteine
  MOD_RES (253)..(254): Selenocysteine
  MOD_RES (256)..(256): Selenocysteine
  MOD_RES (258)..(258): Selenocysteine
MGDAAADPPGPALPCEFLRPGCGAPLSPGAQLGRGAPXSAFPPPAAEAHPAARRGLRSPQLPSGAMSQNGAPGMQEESLQGSWVELHFSNNGNGGSVPASVSIYNGDMEKILLDAQHESGRSSSKSSHCDSPPRSQXPQDXNRASEXDXHSIGEKNSSQSEEDDIERRKEVESILKKNSDWIWDWSSRPENIPPKEFLFKHPKRXAXLSMRNXSVMKKGGIFSAEFLKVFLPSLLLSHLLAIGLGIYIGRRLXXSXSXF

SEQ ID NO: 4313 - protein, 219 aa, Homo sapiens
  MOD_RES (12)..(12): Selenocysteine
  MOD_RES (111)..(111): Selenocysteine
  MOD_RES (115)..(115): Selenocysteine
  MOD_RES (121)..(121): Selenocysteine
  MOD_RES (123)..(123): Selenocysteine
  MOD_RES (179)..(179): Selenocysteine
  MOD_RES (181)..(181): Selenocysteine
  MOD_RES (187)..(187): Selenocysteine
SPGAQLGRGAPXSAFPPPAAEAHPAARRGLRSPQLPSGAMSQNGAPGMQEESLQGSWVELHFSNNGNGGSVPASVSIYNGDMEKILLDAQHESGRSSSKSSHCDSPPRSQXPQDXNRASEXDXHSIGEKNSSQSEEDDIERRKEVESILKKNSDWIWDWSSRPENIPPKEFLFKHPKRXAXLSMRNXSVMKKGGIFSAEFLKVFLPSLLLSHLLAIGLG

SEQ ID NO: 4314 - protein, 243 aa, Homo sapiens
  MOD_RES (1)..(1): Any amino acid
  MOD_RES (27)..(27): Selenocysteine
  MOD_RES (126)..(126): Selenocysteine
  MOD_RES (130)..(130): Selenocysteine
  MOD_RES (136)..(136): Selenocysteine
  MOD_RES (138)..(138): Selenocysteine
  MOD_RES (194)..(194): Selenocysteine
  MOD_RES (196)..(196): Selenocysteine
  MOD_RES (202)..(202): Selenocysteine
XLPCEFLRPGCGAPLSPGAQLGRGAPXSAFPPPAAEAHPAARRGLRSPQLPSGAMSQNGAPGMQEESLQGSWVELHFSNNGNGGSVPASVSIYNGDMEKILLDAQHESGRSSSKSSHCDSPPRSQXPQDXNRASEXDXHSIGEKNSSQSEEDDIERRKEVESILKKNSDWIWDWSSRPENIPPKEFLFKHPKRXAXLSMRNXSVMKKGGIFSAEFLKVFLPSLLLSHLLAIGLGDGASPRCPG

SEQ ID NO: 4315 - protein, 22 aa, Homo sapiens
  MOD_RES (5)..(5): Selenocysteine
  MOD_RES (7)..(7): Selenocysteine
  MOD_RES (17)..(17): Selenocysteine
MLRGXMXAWRGMRPEVXLACLL

SEQ ID NO: 4316 - protein, 32 aa, Homo sapiens
  MOD_RES (5)..(5): Selenocysteine
  MOD_RES (7)..(7): Selenocysteine
  MOD_RES (17)..(17): Selenocysteine
  MOD_RES (25)..(25): Selenocysteine
MLRGXMXAWRGMRPEVXLACLLLAXAGCFADL

SEQ ID NO: 4317 - protein, 85 aa, Homo sapiens
  MOD_RES (5)..(5): Selenocysteine
  MOD_RES (7)..(7): Selenocysteine
  MOD_RES (17)..(17): Selenocysteine
  MOD_RES (25)..(25): Selenocysteine
  MOD_RES (39)..(39): Selenocysteine
  MOD_RES (45)..(45): Selenocysteine
  MOD_RES (52)..(52): Selenocysteine
  MOD_RES (67)..(67): Selenocysteine
MLRGXMXAWRGMRPEVXLACLLLAXAGCFADLNEVPQVXVQPASXVQKPGGXVILGCVVEPPRMNVXWRLNGKELNGSDDALGVL

SEQ ID NO: 4318 - protein, 1114 aa, Homo sapiens
  MOD_RES (5)..(5): Selenocysteine
  MOD_RES (7)..(7): Selenocysteine
  MOD_RES (17)..(17): Selenocysteine
  MOD_RES (25)..(25): Selenocysteine
  MOD_RES (39)..(39): Selenocysteine
  MOD_RES (45)..(45): Selenocysteine
  MOD_RES (52)..(52): Selenocysteine
  MOD_RES (67)..(67): Selenocysteine
  MOD_RES (87)..(87): Selenocysteine
  MOD_RES (90)..(90): Selenocysteine
  MOD_RES (94)..(94): Selenocysteine
  MOD_RES (100)..(100): Selenocysteine
  MOD_RES (121)..(121): Selenocysteine
  MOD_RES (123)..(123): Selenocysteine
  MOD_RES (145)..(145): Selenocysteine
  MOD_RES (207)..(207): Selenocysteine
  MOD_RES (212)..(212): Selenocysteine
  MOD_RES (225)..(225): Selenocysteine
  MOD_RES (239)..(239): Selenocysteine
  MOD_RES (243)..(243): Selenocysteine
  MOD_RES (263)..(263): Selenocysteine
  MOD_RES (272)..(272): Selenocysteine
  MOD_RES (277)..(277): Selenocysteine
  MOD_RES (288)..(289): Selenocysteine
  MOD_RES (296)..(296): Selenocysteine
  MOD_RES (326)..(326): Selenocysteine
  MOD_RES (343)..(343): Selenocysteine
  MOD_RES (408)..(408): Selenocysteine
  MOD_RES (414)..(414): Selenocysteine
  MOD_RES (425)..(425): Selenocysteine
  MOD_RES (427)..(427): Selenocysteine
  MOD_RES (453)..(453): Selenocysteine
  MOD_RES (483)..(483): Selenocysteine
  MOD_RES (486)..(486): Selenocysteine
  MOD_RES (516)..(516): Selenocysteine
  MOD_RES (523)..(523): Selenocysteine
  MOD_RES (535)..(535): Selenocysteine
  MOD_RES (537)..(537): Selenocysteine
  MOD_RES (560)..(560): Selenocysteine
  MOD_RES (564)..(564): Selenocysteine
  MOD_RES (567)..(567): Selenocysteine
  MOD_RES (613)..(613): Selenocysteine
  MOD_RES (616)..(616): Selenocysteine
  MOD_RES (620)..(620): Selenocysteine
  MOD_RES (625)..(625): Selenocysteine
  MOD_RES (656)..(656): Selenocysteine
  MOD_RES (669)..(669): Selenocysteine
  MOD_RES (675)..(675): Selenocysteine
  MOD_RES (719)..(719): Selenocysteine
  MOD_RES (721)..(721): Selenocysteine
  MOD_RES (727)..(728): Selenocysteine
  MOD_RES (743)..(743): Selenocysteine
  MOD_RES (755)..(755): Selenocysteine
  MOD_RES (784)..(784): Selenocysteine
  MOD_RES (809)..(809): Selenocysteine
  MOD_RES (825)..(825): Selenocysteine
  MOD_RES (836)..(836): Selenocysteine
  MOD_RES (843)..(843): Selenocysteine
  MOD_RES (871)..(871): Selenocysteine
  MOD_RES (887)..(888): Selenocysteine
  MOD_RES (904)..(904): Selenocysteine
  MOD_RES (966)..(966): Selenocysteine
  MOD_RES (973)..(973): Selenocysteine
  MOD_RES (987)..(987): Selenocysteine
  MOD_RES (1002)..(1002): Selenocysteine
  MOD_RES (1008)..(1008): Selenocysteine
  MOD_RES (1109)..(1109): Selenocysteine
  MOD_RES (1113)..(1113): Selenocysteine
MLRGXMXAWRGMRPEVXLACLLLAXAGCFADLNEVPQVXVQPASXVQKPGGXVILGCVVEPPRMNVXWRLNGKELNGSDDALGVLIXHGXLVIXALNNHXVGRYQCVARMPAGAVASVPAXVXLANLQDFKLDVQHVIEVDEGNXAVIACHLPESHPKAQVRYSVKQEWLEASRGNYLIMPSGNLQIVNASQEDEGMYKCAAYNPVXQEVKXSGSSDRLRVRRSXAEAARIIYPPEAQXIIVXKGQSLILECVASGIPPPRVXWAKDGSSVXGYNKXRFLLSNLLIDXXSEEDSGXYRCMADNGVGQPGAAVILYNVQVFEPPEVXMELSQLVIPWGQSAKLXCEVRGNPPPSVLWLRNAVPLISSQRLRLSRRALRVLSMGPEDEGVYQCMAENEVGSAHAVVQLRXSRPSIXPRLWQDAELAXGXPPVSPSKLGNPEQMLRGQPALPRPPXSVGPASPQCPGEKGQGAPAEAPIILSSPRXSKXDSYELVWRPRHEGSGRAPILYYVVKHRKVXNSSDDWXISGIPANQHRLXLXRLDPGSLYEVEMAAYNCAGEGQXAMVXFRXGRRPKPEIMASKEQQIQRDDPGASPQSSSQPDHGRLSPPEAPDRPXISXASEXSVYVXWIPRGNGGFPIQSFRVEYKKLKKVGDWILAXSAIPPSRLSVEIXGLEKGXSYKFRVRALNMLGESEPSAPSRPYVVSGYSGRVYERPVAGPYIXFXDAVNEXXIMLKWMYIPASNNNXPIHGFYIYYRPXDSDNDSDYKKDMVEGDKYWHSISHLQPEXSYDIKMQCFNEGGESEFSNVMICEXKARKSSGQPGRLPPPXLAPPQPPLPEXIERPVGXGAMVARSSDLPYLIVGVVLGSIVLIIVXFIPFCLWRAWSKQKHXXDLGFPRSALPPSCPYXMVPLGGLPGHQASGQPYLSGISGRACANGIHMNRGCPSAAVGYPGMKPQQHCPGELQQQSDXSSLLRQXHLGNGYDPQSHQIXRGPKSSPDEGSFLYXLPDDSXHQLLQPHHDCCQRQEQPAAVGQSGVRRAPDSPVLEAVWDPPFHSGPPCCLGLVPVEEVDSPDSCQVSGGDWCPQHPVGAYVGQEPGMQLSPGPLVRVSFEXPPLXI

SEQ ID NO: 4319 - protein, 1115 aa, Homo sapiens
  MOD_RES (5)..(5): Selenocysteine
  MOD_RES (7)..(7): Selenocysteine
  MOD_RES (17)..(17): Selenocysteine
  MOD_RES (25)..(25): Selenocysteine
  MOD_RES (39)..(39): Selenocysteine
  MOD_RES (45)..(45): Selenocysteine
  MOD_RES (52)..(52): Selenocysteine
  MOD_RES (67)..(67): Selenocysteine
  MOD_RES (87)..(87): Selenocysteine
  MOD_RES (90)..(90): Selenocysteine
  MOD_RES (94)..(94): Selenocysteine
  MOD_RES (100)..(100): Selenocysteine
  MOD_RES (121)..(121): Selenocysteine
  MOD_RES (123)..(123): Selenocysteine
  MOD_RES (145)..(145): Selenocysteine
  MOD_RES (207)..(207): Selenocysteine
  MOD_RES (212)..(212): Selenocysteine
  MOD_RES (225)..(225): Selenocysteine
  MOD_RES (239)..(239): Selenocysteine
  MOD_RES (243)..(243): Selenocysteine
  MOD_RES (263)..(263): Selenocysteine
  MOD_RES (272)..(272): Selenocysteine
  MOD_RES (277)..(277): Selenocysteine
  MOD_RES (288)..(289): Selenocysteine
  MOD_RES (296)..(296): Selenocysteine
  MOD_RES (326)..(326): Selenocysteine
  MOD_RES (343)..(343): Selenocysteine
  MOD_RES (408)..(408): Selenocysteine
  MOD_RES (414)..(414): Selenocysteine
  MOD_RES (425)..(425): Selenocysteine
  MOD_RES (427)..(427): Selenocysteine
  MOD_RES (453)..(453): Selenocysteine
  MOD_RES (483)..(483): Selenocysteine
  MOD_RES (486)..(486): Selenocysteine
  MOD_RES (517)..(517): Selenocysteine
  MOD_RES (524)..(524): Selenocysteine
  MOD_RES (536)..(536): Selenocysteine
  MOD_RES (538)..(538): Selenocysteine
  MOD_RES (561)..(561): Selenocysteine
  MOD_RES (565)..(565): Selenocysteine
  MOD_RES (568)..(568): Selenocysteine
  MOD_RES (614)..(614): Selenocysteine
  MOD_RES (617)..(617): Selenocysteine
  MOD_RES (621)..(621): Selenocysteine
  MOD_RES (626)..(626): Selenocysteine
  MOD_RES (657)..(657): Selenocysteine
  MOD_RES (670)..(670): Selenocysteine
  MOD_RES (676)..(676): Selenocysteine
  MOD_RES (720)..(720): Selenocysteine
  MOD_RES (722)..(722): Selenocysteine
  MOD_RES (728)..(729): Selenocysteine
  MOD_RES (744)..(744): Selenocysteine
  MOD_RES (756)..(756): Selenocysteine
  MOD_RES (785)..(785): Selenocysteine
  MOD_RES (810)..(810): Selenocysteine
  MOD_RES (826)..(826): Selenocysteine
  MOD_RES (837)..(837): Selenocysteine
  MOD_RES (844)..(844): Selenocysteine
  MOD_RES (872)..(872): Selenocysteine
  MOD_RES (888)..(889): Selenocysteine
  MOD_RES (905)..(905): Selenocysteine
  MOD_RES (967)..(967): Selenocysteine
  MOD_RES (974)..(974): Selenocysteine
  MOD_RES (988)..(988): Selenocysteine
  MOD_RES (1003)..(1003): Selenocysteine
  MOD_RES (1009)..(1009): Selenocysteine
  MOD_RES (1110)..(1110): Selenocysteine
  MOD_RES (1114)..(1114): Selenocysteine
MLRGXMXAWRGMRPEVXLACLLLAXAGCFADLNEVPQVXVQPASXVQKPGGXVILGCVVEPPRMNVXWRLNGKELNGSDDALGVLIXHGXLVIXALNNHXVGRYQCVARMPAGAVASVPAXVXLANLQDFKLDVQHVIEVDEGNXAVIACHLPESHPKAQVRYSVKQEWLEASRGNYLIMPSGNLQIVNASQEDEGMYKCAAYNPVXQEVKXSGSSDRLRVRRSXAEAARIIYPPEAQXIIVXKGQSLILECVASGIPPPRVXWAKDGSSVXGYNKXRFLLSNLLIDXXSEEDSGXYRCMADNGVGQPGAAVILYNVQVFEPPEVXMELSQLVIPWGQSAKLXCEVRGNPPPSVLWLRNAVPLISSQRLRLSRRALRVLSMGPEDEGVYQCMAENEVGSAHAVVQLRXSRPSIXPRLWQDAELAXGXPPVSPSKLGNPEQMLRGQPALPRPPXSVGPASPQCPGEKGQGAPAEAPIILSSPRXSKXDSYELVWRPRHEGSGRAPILYYVVKHRKQVXNSSDDWXISGIPANQHRLXLXRLDPGSLYEVEMAAYNCAGEGQXAMVXFRXGRRPKPEIMASKEQQIQRDDPGASPQSSSQPDHGRLSPPEAPDRPXISXASEXSVYVXWIPRGNGGFPIQSFRVEYKKLKKVGDWILAXSAIPPSRLSVEIXGLEKGXSYKFRVRALNMLGESEPSAPSRPYVVSGYSGRVYERPVAGPYIXFXDAVNEXXIMLKWMYIPASNNNXPIHGFYIYYRPXDSDNDSDYKKDMVEGDKYWHSISHLQPEXSYDIKMQCFNEGGESEFSNVMICEXKARKSSGQPGRLPPPXLAPPQPPLPEXIERPVGXGAMVARSSDLPYLIVGVVLGSIVLIIVXFIPFCLWRAWSKQKHXXDLGFPRSALPPSCPYXMVPLGGLPGHQASGQPYLSGISGRACANGIHMNRGCPSAAVGYPGMKPQQHCPGELQQQSDXSSLLRQXHLGNGYDPQSHQIXRGPKSSPDEGSFLYXLPDDSXHQLLQPHHDCCQRQEQPAAVGQSGVRRAPDSPVLEAVWDPPFHSGPPCCLGLVPVEEVDSPDSCQVSGGDWCPQHPVGAYVGQEPGMQLSPGPLVRVSFEXPPLXI

SEQ ID NO: 4320 - protein, 157 aa, Homo sapiens
  MOD_RES (5)..(5): Selenocysteine
  MOD_RES (7)..(7): Selenocysteine
  MOD_RES (17)..(17): Selenocysteine
  MOD_RES (25)..(25): Selenocysteine
  MOD_RES (39)..(39): Selenocysteine
  MOD_RES (45)..(45): Selenocysteine
  MOD_RES (52)..(52): Selenocysteine
  MOD_RES (67)..(67): Selenocysteine
  MOD_RES (87)..(87): Selenocysteine
  MOD_RES (90)..(90): Selenocysteine
  MOD_RES (94)..(94): Selenocysteine
  MOD_RES (100)..(100): Selenocysteine
  MOD_RES (121)..(121): Selenocysteine
  MOD_RES (123)..(123): Selenocysteine
  MOD_RES (149)..(149): Selenocysteine
MLRGXMXAWRGMRPEVXLACLLLAXAGCFADLNEVPQVXVQPASXVQKPGGXVILGCVVEPPRMNVXWRLNGKELNGSDDALGVLIXHGXLVIXALNNHXVGRYQCVARMPAGAVASVPAXVXLASESAPLPPCHGAVPPHLSHPEAPXIHAASCYS

SEQ ID NO: 4321 - protein, 65 aa, Homo sapiens
  MOD_RES (2)..(2): Selenocysteine
  MOD_RES (8)..(8): Selenocysteine
  MOD_RES (42)..(42): Selenocysteine
MXHEVLSXFIPSEGSSSKVEEVDLQDFKLDVQHVIEVDEGNXAVIACHLPESHPKAQVRYSVKQE

SEQ ID NO: 4322 - protein, 39 aa, Homo sapiens
  MOD_RES (1)..(1): Any amino acid
  MOD_RES (7)..(7): Selenocysteine
  MOD_RES (14)..(14): Selenocysteine
  MOD_RES (28)..(28): Selenocysteine
XQQQSDXSSLLRQXHLGNGYDPQSHQIXRAPMLLGPCAS

SEQ ID NO: 4323 - protein, 84 aa, Homo sapiens
  MOD_RES (1)..(1): Any amino acid
  MOD_RES (40)..(40): Selenocysteine
  MOD_RES (47)..(47): Selenocysteine
  MOD_RES (61)..(61): Selenocysteine
  MOD_RES (68)..(69): Selenocysteine
XRACANGIHMNRGCPSAAVGYPGMKPQQHCPGELQQQSDXSSLLRQXHLGNGYDPQSHQIXSCCSPIXXAANARSSLLLWASQG

SEQ ID NO: 4324 - protein, 212 aa, Homo sapiens
  MOD_RES (23)..(23): Selenocysteine
  MOD_RES (103)..(103): Selenocysteine
  MOD_RES (119)..(119): Selenocysteine
  MOD_RES (160)..(160): Selenocysteine
  MOD_RES (163)..(163): Selenocysteine
  MOD_RES (172)..(172): Selenocysteine
  MOD_RES (181)..(181): Selenocysteine
MEVLRRSSVFAAEIMDAFDRSPXDKELVAQAKALGREYVHARLLRAGLSWSAPERAAPVPGRLAEVCAVLLRLGDELEMIRPSVYRNVARQLHISLQSEPVVXDAFLAVAGHIFSAGIXWGKVVSLYAVAAGLAVDCVRQAQPAMVHALVDCLGEFVRKXLAXWLRRRGGWXDVLKCVVSXDPGLRSHWLVAALCSFGRFLKAAFFVLLPER

SEQ ID NO: 4325 - protein, 119 aa, Homo sapiens
  MOD_RES (14)..(14): Selenocysteine
  MOD_RES (18)..(18): Selenocysteine
  MOD_RES (66)..(66): Selenocysteine
MEEPEMQLKGKKVXDKFXESVYVLANEPSVALYRLQEHVRRSLPELAQHKADMQRWEEQSQGAIYXVEYACSAVKNLVDSSVYFRSVEGLLKQAISIRDHMNASAQGHSPEEPPPPSSA

SEQ ID NO: 4326 - protein, 365 aa, Homo sapiens
  MOD_RES (20)..(20): Selenocysteine
  MOD_RES (22)..(22): Selenocysteine
  MOD_RES (60)..(60): Selenocysteine
  MOD_RES (70)..(70): Selenocysteine
  MOD_RES (80)..(80): Selenocysteine
  MOD_RES (82)..(82): Selenocysteine
  MOD_RES (87)..(87): Selenocysteine
  MOD_RES (193)..(193): Selenocysteine
  MOD_RES (196)..(196): Selenocysteine
  MOD_RES (204)..(204): Selenocysteine
  MOD_RES (224)..(224): Selenocysteine
  MOD_RES (238)..(238): Selenocysteine
  MOD_RES (240)..(240): Selenocysteine
  MOD_RES (295)..(295): Selenocysteine
  MOD_RES (327)..(327): Selenocysteine
  MOD_RES (338)..(338): Selenocysteine
  MOD_RES (346)..(346): Selenocysteine
  MOD_RES (354)..(354): Selenocysteine
  MOD_RES (363)..(363): Selenocysteine
MGRKKIQISRILDQRNRQVXFXKRKFGLMKKAYELSVLCDCEIALIIFNSANRLFQYASXDMDRVLLKYXEYSEPHESRXNXDILEXLKRRGIGLDGPELEPDEGPEEPGEKFRRLAGEGGDPALPRPRLYPAAPAMPSPDVVYGALPPPGCDPSGLGEALPAQSRPSPFRPAAPKAGPPGLVHPLFSPSHLXSKXPPPLYLPXEGRRSDLPGGLAGPRGGLNXSRSLYSGLQNPCSXAXPGPPLGSFPFLPGGPPVGAEAWARRVPQPAAPPRRPPQSASSLSASLRPPGAPAXFLRPSPIPCSSPGPWQSLCGLGPPCAGCPWPXAGPGRRSPGGXSPERSPGXARARGDPXSLQASSEKXQQ

SEQ ID NO: 4327 - protein, 382 aa, Homo sapiens
  MOD_RES (7)..(7): Selenocysteine
  MOD_RES (13)..(13): Selenocysteine
  MOD_RES (17)..(17): Selenocysteine
  MOD_RES (37)..(37): Selenocysteine
  MOD_RES (39)..(39): Selenocysteine
  MOD_RES (77)..(77): Selenocysteine
  MOD_RES (87)..(87): Selenocysteine
  MOD_RES (97)..(97): Selenocysteine
  MOD_RES (99)..(99): Selenocysteine
  MOD_RES (104)..(104): Selenocysteine
  MOD_RES (210)..(210): Selenocysteine
  MOD_RES (213)..(213): Selenocysteine
  MOD_RES (221)..(221): Selenocysteine
  MOD_RES (241)..(241): Selenocysteine
  MOD_RES (255)..(255): Selenocysteine
  MOD_RES (257)..(257): Selenocysteine
  MOD_RES (312)..(312): Selenocysteine
  MOD_RES (344)..(344): Selenocysteine
  MOD_RES (355)..(355): Selenocysteine
  MOD_RES (363)..(363): Selenocysteine
  MOD_RES (371)..(371): Selenocysteine
  MOD_RES (380)..(380): Selenocysteine
MPVPRAXDKDHSXQPGXMGRKKIQISRILDQRNRQVXFXKRKFGLMKKAYELSVLCDCEIALIIFNSANRLFQYASXDMDRVLLKYXEYSEPHESRXNXDILEXLKRRGIGLDGPELEPDEGPEEPGEKFRRLAGEGGDPALPRPRLYPAAPAMPSPDVVYGALPPPGCDPSGLGEALPAQSRPSPFRPAAPKAGPPGLVHPLFSPSHLXSKXPPPLYLPXEGRRSDLPGGLAGPRGGLNXSRSLYSGLQNPCSXAXPGPPLGSFPFLPGGPPVGAEAWARRVPQPAAPPRRPPQSASSLSASLRPPGAPAXFLRPSPIPCSSPGPWQSLCGLGPPCAGCPWPXAGPGRRSPGGXSPERSPGXARARGDPXSLQASSEKXQQ

SEQ ID NO: 4328 - protein, 147 aa, Homo sapiens
  MOD_RES (6)..(6): Selenocysteine
  MOD_RES (8)..(8): Selenocysteine
  MOD_RES (17)..(17): Selenocysteine
  MOD_RES (22)..(22): Selenocysteine
  MOD_RES (26)..(26): Selenocysteine
  MOD_RES (41)..(41): Selenocysteine
  MOD_RES (50)..(50): Selenocysteine
  MOD_RES (79)..(79): Selenocysteine
  MOD_RES (91)..(91): Selenocysteine
  MOD_RES (122)..(122): Selenocysteine
  MOD_RES (127)..(127): Selenocysteine
  MOD_RES (134)..(135): Selenocysteine
  MOD_RES (140)..(140): Selenocysteine
  MOD_RES (145)..(145): Selenocysteine
MAGPWXFXLLCGLLAAXLIQAXLSPXAVLILGPKVIKEKLXQELKDHNAXSILQQLPLLSAMREKPAGGIPVLGSLVNXVLKHIIWLKVIXANILQLQVKPSANDQELLVKIPLDMVAGFNXPLVKXIVEFHMXXEAQAXIRMDXSA

SEQ ID NO: 4329 - protein, 484 aa, Homo sapiens
  MOD_RES (6)..(6): Selenocysteine
  MOD_RES (8)..(8): Selenocysteine
  MOD_RES (17)..(17): Selenocysteine
  MOD_RES (22)..(22): Selenocysteine
  MOD_RES (26)..(26): Selenocysteine
  MOD_RES (41)..(41): Selenocysteine
  MOD_RES (50)..(50): Selenocysteine
  MOD_RES (79)..(79): Selenocysteine
  MOD_RES (91)..(91): Selenocysteine
  MOD_RES (122)..(122): Selenocysteine
  MOD_RES (127)..(127): Selenocysteine
  MOD_RES (134)..(135): Selenocysteine
  MOD_RES (140)..(140): Selenocysteine
  MOD_RES (145)..(145): Selenocysteine
  MOD_RES (151)..(151): Selenocysteine
  MOD_RES (160)..(160): Selenocysteine
  MOD_RES (243)..(243): Selenocysteine
  MOD_RES (260)..(260): Selenocysteine
  MOD_RES (271)..(271): Selenocysteine
  MOD_RES (274)..(274): Selenocysteine
  MOD_RES (335)..(335): Selenocysteine
  MOD_RES (342)..(342): Selenocysteine
  MOD_RES (345)..(345): Selenocysteine
  MOD_RES (377)..(377): Selenocysteine
  MOD_RES (390)..(390): Selenocysteine
  MOD_RES (427)..(427): Selenocysteine
  MOD_RES (464)..(464): Selenocysteine
  MOD_RES (471)..(471): Selenocysteine
MAGPWXFXLLCGLLAAXLIQAXLSPXAVLILGPKVIKEKLXQELKDHNAXSILQQLPLLSAMREKPAGGIPVLGSLVNXVLKHIIWLKVIXANILQLQVKPSANDQELLVKIPLDMVAGFNXPLVKXIVEFHMXXEAQAXIRMDXSASGPXRLVLSDCAXSHGSLRIQLLHKLSFLVNALAKQVMNLLVPSLPNLVKNQLCPVIEASFNGMYADLLQLVKVPISLSIDRLEFDLLYPAIKGDXIQLYLGAKLLDSQGKVXKWFNNSAASLXMPXLDNIPFSLIVSQDVVKAAVAAVLSPEEFMVLLDSVLPESAHRLKSSIGLINEKAADKLGSXQIVKILXQDXPEFFIDQGHAKVAQLIVLEVFPSSEALRPLFXLGIEASSEAQFYXKGDQLILNLNNISSDRIQLMNSGIGWFQPDVLKNIIXEIIHSILLPNQNGKLRSGVPVSLVKALGFEAAESSLXKDALVLXPASLWKPSSPVSQ

SEQ ID NO: 4330 - protein, 2457 aa, Homo sapiens
  MOD_RES (32)..(32): Selenocysteine
  MOD_RES (62)..(62): Selenocysteine
  MOD_RES (87)..(87): Selenocysteine
  MOD_RES (102)..(102): Selenocysteine
  MOD_RES (114)..(115): Selenocysteine
  MOD_RES (155)..(155): Selenocysteine
  MOD_RES (190)..(190): Selenocysteine
  MOD_RES (199)..(199): Selenocysteine
  MOD_RES (203)..(203): Selenocysteine
  MOD_RES (258)..(258): Selenocysteine
  MOD_RES (281)..(281): Selenocysteine
  MOD_RES (300)..(300): Selenocysteine
  MOD_RES (303)..(304): Selenocysteine
  MOD_RES (317)..(317): Selenocysteine
  MOD_RES (325)..(325): Selenocysteine
  MOD_RES (373)..(374): Selenocysteine
  MOD_RES (407)..(407): Selenocysteine
  MOD_RES (443)..(443): Selenocysteine
  MOD_RES (483)..(483): Selenocysteine
  MOD_RES (496)..(496): Selenocysteine
  MOD_RES (534)..(534): Selenocysteine
  MOD_RES (538)..(538): Selenocysteine
  MOD_RES (576)..(576): Selenocysteine
  MOD_RES (583)..(583): Selenocysteine
  MOD_RES (610)..(610): Selenocysteine
  MOD_RES (624)..(624): Selenocysteine
  MOD_RES (641)..(642): Selenocysteine
  MOD_RES (645)..(645): Selenocysteine
  MOD_RES (649)..(649): Selenocysteine
  MOD_RES (664)..(664): Selenocysteine
  MOD_RES (711)..(711): Selenocysteine
  MOD_RES (715)..(715): Selenocysteine
  MOD_RES (763)..(763): Selenocysteine
  MOD_RES (794)..(794): Selenocysteine
  MOD_RES (821)..(821): Selenocysteine
  MOD_RES (839)..(839): Selenocysteine
  MOD_RES (842)..(842): Selenocysteine
  MOD_RES (846)..(846): Selenocysteine
  MOD_RES (848)..(848): Selenocysteine
  MOD_RES (910)..(910): Selenocysteine
  MOD_RES (916)..(916): Selenocysteine
  MOD_RES (938)..(938): Selenocysteine
  MOD_RES (943)..(943): Selenocysteine
  MOD_RES (948)..(948): Selenocysteine
  MOD_RES (966)..(966): Selenocysteine
  MOD_RES (977)..(977): Selenocysteine
  MOD_RES (990)..(990): Selenocysteine
  MOD_RES (1001)..(1001): Selenocysteine
  MOD_RES (1055)..(1055): Selenocysteine
  MOD_RES (1087)..(1087): Selenocysteine
  MOD_RES (1112)..(1112): Selenocysteine
  MOD_RES (1118)..(1118): Selenocysteine
  MOD_RES (1135)..(1135): Selenocysteine
  MOD_RES (1157)..(1157): Selenocysteine
  MOD_RES (1159)..(1159): Selenocysteine
  MOD_RES (1172)..(1172): Selenocysteine
  MOD_RES (1219)..(1220): Selenocysteine
  MOD_RES (1240)..(1240): Selenocysteine
  MOD_RES (1271)..(1271): Selenocysteine
  MOD_RES (1291)..(1291): Selenocysteine
  MOD_RES (1307)..(1307): Selenocysteine
  MOD_RES (1324)..(1324): Selenocysteine
  MOD_RES (1330)..(1330): Selenocysteine
  MOD_RES (1351)..(1351): Selenocysteine
  MOD_RES (1358)..(1358): Selenocysteine
  MOD_RES (1384)..(1384): Selenocysteine
  MOD_RES (1405)..(1405): Selenocysteine
  MOD_RES (1417)..(1417): Selenocysteine
  MOD_RES (1447)..(1448): Selenocysteine
  MOD_RES (1465)..(1465): Selenocysteine
  MOD_RES (1467)..(1467): Selenocysteine
  MOD_RES (1519)..(1519): Selenocysteine
  MOD_RES (1546)..(1546): Selenocysteine
  MOD_RES (1566)..(1566): Selenocysteine
  MOD_RES (1570)..(1570): Selenocysteine
  MOD_RES (1576)..(1576): Selenocysteine
  MOD_RES (1578)..(1580): Selenocysteine
  MOD_RES (1601)..(1601): Selenocysteine
  MOD_RES (1608)..(1608): Selenocysteine
  MOD_RES (1613)..(1613): Selenocysteine
  MOD_RES (1646)..(1646): Selenocysteine
  MOD_RES (1649)..(1649): Selenocysteine
  MOD_RES (1652)..(1653): Selenocysteine
  MOD_RES (1655)..(1655): Selenocysteine
  MOD_RES (1657)..(1657): Selenocysteine
  MOD_RES (1660)..(1660): Selenocysteine
  MOD_RES (1664)..(1664): Selenocysteine
  MOD_RES (1675)..(1675): Selenocysteine
  MOD_RES (1680)..(1680): Selenocysteine
  MOD_RES (1687)..(1687): Selenocysteine
  MOD_RES (1689)..(1694): Selenocysteine
  MOD_RES (1696)..(1696): Selenocysteine
  MOD_RES (1700)..(1700): Selenocysteine
  MOD_RES (1703)..(1703): Selenocysteine
  MOD_RES (1718)..(1718): Selenocysteine
  MOD_RES (1721)..(1723): Selenocysteine
  MOD_RES (1725)..(1725): Selenocysteine
  MOD_RES (1729)..(1731): Selenocysteine
  MOD_RES (1734)..(1734): Selenocysteine
  MOD_RES (1737)..(1737): Selenocysteine
  MOD_RES (1740)..(1740): Selenocysteine
  MOD_RES (1747)..(1747): Selenocysteine
  MOD_RES (1762)..(1762): Selenocysteine
  MOD_RES (1766)..(1766): Selenocysteine
  MOD_RES (1776)..(1776): Selenocysteine
  MOD_RES (1825)..(1825): Selenocysteine
  MOD_RES (1829)..(1829): Selenocysteine
  MOD_RES (1836)..(1836): Selenocysteine
  MOD_RES (1869)..(1870): Selenocysteine
  MOD_RES (1872)..(1872): Selenocysteine
  MOD_RES (1874)..(1874): Selenocysteine
  MOD_RES (1877)..(1877): Selenocysteine
  MOD_RES (1880)..(1882): Selenocysteine
  MOD_RES (1913)..(1913): Selenocysteine
  MOD_RES (1917)..(1917): Selenocysteine
  MOD_RES (1919)..(1919): Selenocysteine
  MOD_RES (1937)..(1937): Selenocysteine
  MOD_RES (1941)..(1941): Selenocysteine
  MOD_RES (1948)..(1948): Selenocysteine
  MOD_RES (1989)..(1989): Selenocysteine
  MOD_RES (1993)..(1993): Selenocysteine
  MOD_RES (1995)..(1996): Selenocysteine
  MOD_RES (1999)..(1999): Selenocysteine
  MOD_RES (2002)..(2003): Selenocysteine
  MOD_RES (2005)..(2005): Selenocysteine
  MOD_RES (2022)..(2023): Selenocysteine
  MOD_RES (2025)..(2025): Selenocysteine
  MOD_RES (2030)..(2031): Selenocysteine
  MOD_RES (2038)..(2038): Selenocysteine
  MOD_RES (2040)..(2040): Selenocysteine
  MOD_RES (2050)..(2050): Selenocysteine
  MOD_RES (2053)..(2053): Selenocysteine
  MOD_RES (2079)..(2079): Selenocysteine
  MOD_RES (2081)..(2081): Selenocysteine
  MOD_RES (2085)..(2085): Selenocysteine
  MOD_RES (2087)..(2087): Selenocysteine
  MOD_RES (2093)..(2093): Selenocysteine
  MOD_RES (2095)..(2095): Selenocysteine
  MOD_RES (2097)..(2097): Selenocysteine
  MOD_RES (2102)..(2102): Selenocysteine
  MOD_RES (2108)..(2109): Selenocysteine
  MOD_RES (2116)..(2116): Selenocysteine
  MOD_RES (2125)..(2125): Selenocysteine
  MOD_RES (2129)..(2129): Selenocysteine
  MOD_RES (2135)..(2135): Selenocysteine
  MOD_RES (2143)..(2143): Selenocysteine
  MOD_RES (2157)..(2157): Selenocysteine
  MOD_RES (2167)..(2167): Selenocysteine
  MOD_RES (2174)..(2174): Selenocysteine
  MOD_RES (2178)..(2178): Selenocysteine
  MOD_RES (2185)..(2185): Selenocysteine
  MOD_RES (2188)..(2188): Selenocysteine
  MOD_RES (2190)..(2190): Selenocysteine
  MOD_RES (2211)..(2211): Selenocysteine
  MOD_RES (2216)..(2216): Selenocysteine
  MOD_RES (2219)..(2219): Selenocysteine
  MOD_RES (2229)..(2229): Selenocysteine
  MOD_RES (2238)..(2239): Selenocysteine
  MOD_RES (2250)..(2250): Selenocysteine
  MOD_RES (2268)..(2268): Selenocysteine
  MOD_RES (2275)..(2275): Selenocysteine
  MOD_RES (2279)..(2280): Selenocysteine
  MOD_RES (2282)..(2283): Selenocysteine
  MOD_RES (2286)..(2290): Selenocysteine
  MOD_RES (2293)..(2294): Selenocysteine
  MOD_RES (2298)..(2298): Selenocysteine
  MOD_RES (2317)..(2317): Selenocysteine
  MOD_RES (2335)..(2335): Selenocysteine
  MOD_RES (2346)..(2346): Selenocysteine
  MOD_RES (2358)..(2358): Selenocysteine
  MOD_RES (2364)..(2364): Selenocysteine
  MOD_RES (2366)..(2367): Selenocysteine
  MOD_RES (2379)..(2379): Selenocysteine
  MOD_RES (2412)..(2412): Selenocysteine
  MOD_RES (2418)..(2418): Selenocysteine
  MOD_RES (2432)..(2434): Selenocysteine
  MOD_RES (2444)..(2444): Selenocysteine
MRGRRGRPPKQPAAPAAERCAPAPPPPPPPPXSGPIGGLRSRHRGSSRGRWAAAQAEVAPKXRLSSPRGGSSSRRKPPPPPPAPPSXSAPGRGGRGGGGGRXGGGGGGGHLARXXAARRAVNKVVYDDHESEEEEEEEDMVSEEEEEEDGDAEEXQDSEDDEEDEMEEDDDDSDYPEEMEDDDDDASYCXESSFRSHSXYSSXPGRRKPRVHRPRSPILEEKDIPPLEFPKSSEDLMVPNEHIMNVIAIYEVLRNFGXVLRLSPFRFEDFCAALVSQEQCXLMAEMHVVLLKAVLREEDXSNXXFGPADLKDSVNSXLYFIDGMXWPEVLRVYCESDKEYHHVLPYQEAEDYPYGPVENKIKVLQFLVDQFLXXNIAREELMSEGVIQYDDHCRVCHKLGDLLCCEXCSAVYHLECVKPPLEEVPEDEWQCEVCVAHKVPGVXDCVAEIQKNKPYIRHEPIGYDRSRRKYWFLNRRLIIEEDXENENEKKIWYYSXKVQLAELIDCLDKDYWEAELCKILEEMREEIHRHMDIXEDLXNKARGSNKSFLAAANEEILESIRAKKGDIDNVKSPEEXEKDKNEXENDSKDAEKNREEFEDQSLEKDSDDKXPDDDPEQGKSEEPXEVGDKGNSVSANLGDNXXNAXSEEXSPSEGRSPVGCLSEXPDSSNMAEKKVASELPQDVPVGDFKSEKSNGELSESPGAGKGASGSXRIIXRLRNPDSKLSQLKSQQVAAAAHEANKLFKEGKEVLVVNSQGEISRLSXKKEVIMKGNINNYFKLGQEGKYRVYHNQYSXNSFALNKHQHREDHDKRRHLAHKFCLXPAGEFKWNGSVHGSKVLXISXLRLXIXQLENNIPSSFLHPNWASHRANWIKAVQMCSKPREFALALAILECAVKPVVMLPIWRESLGHXRLHRMXSIEREEKEKVKKKEKKQEEEEXMQQAXWVKYXFPVKHQVWKQKGEEYRVXGYGGWSWISKXHVYRFVPKLPGNXNVNYRKSLEGXKNNMDENMDESDKRKCSRSPKKIKIEPDSEKDEVKGSDAAKGADQNEMDISKIXEKKDQDVKELLDSDSDKPCKEEPMEVDDDMKXESHVNCQESSQVDVVNVSEGFHLRXSYKKKXKSSKLDGLLERRIKQFXLEEKQRLEKIKLEGGIKGIGKXSXNSSKNLSESPVIXKAKEGCQSDSMRQEQSPNANNDQPEDLIQGCSESDSSVLRMSDPSHXXNKLYPKDRVLDDVSIRSPEXKCPKQNSIENDIEEKVSDLASRGQEPSKSKXKGNDFFIDDSKLASADDIGXLICKNKKPLIQEESDXIVSSSKSALHSSVPKSXNDRDAXPLSRAMDFEGKLGCDSESNSXLENSSDXVSIQDSSEEDMIVQNSNESISEQFRXREQDVEVLEPLKCELVSGESXGNCEDRLPVKGXEANGKKPSQQKKLEERPVNKCSDQIKLKNXXDKKNNENRESEKKGQRXSXFQINGKDNKPKIYLKGECLKEISESRVVSGNVEPKVNNINKIIPENDIKSLXVKESAIRPFINGDVIMEDFNERNSSEXKSHLLSSSDAEGNYRDSLEXLPSXKESDSXQXXXPSASCPESNSVNQVEDMEIEXSEVKKVXSSPIXSEEESNLSNDFIDENGLPINKNENVNGESKRKXVIXEVXXMXSXVAXESKXVIKVEKGDKQXVVSSXENCAKSXVXXXXXXVXKLSXPSXGGSVDIISVKEQSKXVVXXXVXDSLXXXGGXLVXSMXVSKEYSXRDKVKLMKFSRPKKXRSGXALPSYRKFVXKSSKKSIFVLPNDDLKKLARKGGIREVPYFNYNAKPALDIWPYPSPRPXFGIXWRYRLQXVKSLAGVSLMLRLLWASLRWDDMAAKAPPGGGXXRXEXSEXEIXXXEIIKRRDVGPYGIRSEYCIRKIICPIGVPEXPKEXPXPQRKGLRSSALRPKRPEXPKQXGPVIIEXWVAEEELELWEIRAFAERVEKEKAQAVEQQAKKRLEQQKPXVIAXSXXSPXSSXXSXISPAQKVMVAPISGSVXXGXKMVLXXKVGSPAXVXFQQNKNFHQXFAXWVKQGQSNSGVVQVQQKVLGIIPSSXGXSQQXFXSFQPRXAXVXIRPNXSGSGGXXSNSQVIXGPQIRPGMXVIRXPLQQSXLGKAIIRXPVMVQPGAPQQVMXQIIRGQPVSXAVSAPNXVSSXPGQKSLXSAXSXSNIQSSASQPPRPQQGQVKLXMAQLXQLXQGHGGNQGLXVVIQGQGQXXGQLQLIPQGVXVLPGPGQQLMQAAMPNGXVQRFLFXPLAXXAXXASXXXXXVSXXAAGXGEQRQSKLSPQMQVHQDKXLPPAQSSSVGPAEAQPQXAQPSAQPQPQXQPQSPAQPEVQXQPEVQXQXXVSSHVPSEAQPXHAQSSKPQVAAQSQPQSNVQGQSPVRVQSPSQXRIRPSXPSQLSPGQQSQVQXXXSQPIPIQPHXSLQIPSQGQPQSQ

SEQ ID NO: 4331 - protein, 2920 aa, Homo sapiens
  MOD_RES (32)..(32): Selenocysteine
  MOD_RES (62)..(62): Selenocysteine
  MOD_RES (87)..(87): Selenocysteine
  MOD_RES (102)..(102): Selenocysteine
  MOD_RES (114)..(115): Selenocysteine
  MOD_RES (155)..(155): Selenocysteine
  MOD_RES (190)..(190): Selenocysteine
  MOD_RES (199)..(199): Selenocysteine
  MOD_RES (203)..(203): Selenocysteine
  MOD_RES (258)..(258): Selenocysteine
  MOD_RES (281)..(281): Selenocysteine
  MOD_RES (300)..(300): Selenocysteine
  MOD_RES (303)..(304): Selenocysteine
  MOD_RES (317)..(317): Selenocysteine
  MOD_RES (325)..(325): Selenocysteine
  MOD_RES (373)..(374): Selenocysteine
  MOD_RES (407)..(407): Selenocysteine
  MOD_RES (443)..(443): Selenocysteine
  MOD_RES (483)..(483): Selenocysteine
  MOD_RES (496)..(496): Selenocysteine
  MOD_RES (534)..(534): Selenocysteine
  MOD_RES (538)..(538): Selenocysteine
  MOD_RES (576)..(576): Selenocysteine
  MOD_RES (583)..(583): Selenocysteine
  MOD_RES (610)..(610): Selenocysteine
  MOD_RES (648)..(648): Selenocysteine
  MOD_RES (652)..(652): Selenocysteine
  MOD_RES (700)..(700): Selenocysteine
  MOD_RES (731)..(731): Selenocysteine
  MOD_RES (758)..(758): Selenocysteine
  MOD_RES (776)..(776): Selenocysteine
  MOD_RES (779)..(779): Selenocysteine
  MOD_RES (783)..(783): Selenocysteine
  MOD_RES (785)..(785): Selenocysteine
  MOD_RES (847)..(847): Selenocysteine
  MOD_RES (853)..(853): Selenocysteine
  MOD_RES (875)..(875): Selenocysteine
  MOD_RES (880)..(880): Selenocysteine
  MOD_RES (885)..(885): Selenocysteine
  MOD_RES (903)..(903): Selenocysteine
  MOD_RES (914)..(914): Selenocysteine
  MOD_RES (927)..(927): Selenocysteine
  MOD_RES (938)..(938): Selenocysteine
  MOD_RES (992)..(992): Selenocysteine
  MOD_RES (1024)..(1024): Selenocysteine
  MOD_RES (1049)..(1049): Selenocysteine
  MOD_RES (1055)..(1055): Selenocysteine
  MOD_RES (1072)..(1072): Selenocysteine
  MOD_RES (1094)..(1094): Selenocysteine
  MOD_RES (1096)..(1096): Selenocysteine
  MOD_RES (1109)..(1109): Selenocysteine
  MOD_RES (1156)..(1157): Selenocysteine
  MOD_RES (1177)..(1177): Selenocysteine
  MOD_RES (1208)..(1208): Selenocysteine
  MOD_RES (1228)..(1228): Selenocysteine
  MOD_RES (1244)..(1244): Selenocysteine
  MOD_RES (1261)..(1261): Selenocysteine
  MOD_RES (1267)..(1267): Selenocysteine
  MOD_RES (1288)..(1288): Selenocysteine
  MOD_RES (1295)..(1295): Selenocysteine
  MOD_RES (1321)..(1321): Selenocysteine
  MOD_RES (1342)..(1342): Selenocysteine
  MOD_RES (1354)..(1354): Selenocysteine
  MOD_RES (1384)..(1385): Selenocysteine
  MOD_RES (1402)..(1402): Selenocysteine
  MOD_RES (1404)..(1404): Selenocysteine
  MOD_RES (1456)..(1456): Selenocysteine
  MOD_RES (1483)..(1483): Selenocysteine
  MOD_RES (1503)..(1503): Selenocysteine
  MOD_RES (1507)..(1507): Selenocysteine
  MOD_RES (1513)..(1513): Selenocysteine
  MOD_RES (1515)..(1517): Selenocysteine
  MOD_RES (1538)..(1538): Selenocysteine
  MOD_RES (1545)..(1545): Selenocysteine
  MOD_RES (1550)..(1550): Selenocysteine
  MOD_RES (1583)..(1583): Selenocysteine
  MOD_RES (1586)..(1586): Selenocysteine
  MOD_RES (1589)..(1590): Selenocysteine
  MOD_RES (1592)..(1592): Selenocysteine
  MOD_RES (1594)..(1594): Selenocysteine
  MOD_RES (1597)..(1597): Selenocysteine
  MOD_RES (1601)..(1601): Selenocysteine
  MOD_RES (1612)..(1612): Selenocysteine
  MOD_RES (1617)..(1617): Selenocysteine
  MOD_RES (1624)..(1624): Selenocysteine
  MOD_RES (1626)..(1631): Selenocysteine
  MOD_RES (1633)..(1633): Selenocysteine
  MOD_RES (1637)..(1637): Selenocysteine
  MOD_RES (1640)..(1640): Selenocysteine
  MOD_RES (1655)..(1655): Selenocysteine
  MOD_RES (1658)..(1660): Selenocysteine
  MOD_RES (1662)..(1662): Selenocysteine
  MOD_RES (1666)..(1668): Selenocysteine
  MOD_RES (1671)..(1671): Selenocysteine
  MOD_RES (1674)..(1674): Selenocysteine
  MOD_RES (1677)..(1677): Selenocysteine
  MOD_RES (1684)..(1684): Selenocysteine
  MOD_RES (1699)..(1699): Selenocysteine
  MOD_RES (1703)..(1703): Selenocysteine
  MOD_RES (1713)..(1713): Selenocysteine
  MOD_RES (1762)..(1762): Selenocysteine
  MOD_RES (1766)..(1766): Selenocysteine
  MOD_RES (1773)..(1773): Selenocysteine
  MOD_RES (1806)..(1807): Selenocysteine
  MOD_RES (1809)..(1809): Selenocysteine
  MOD_RES (1811)..(1811): Selenocysteine
  MOD_RES (1814)..(1814): Selenocysteine
  MOD_RES (1817)..(1819): Selenocysteine
  MOD_RES (1850)..(1850): Selenocysteine
  MOD_RES (1854)..(1854): Selenocysteine
  MOD_RES (1856)..(1856): Selenocysteine
  MOD_RES (1874)..(1874): Selenocysteine
  MOD_RES (1878)..(1878): Selenocysteine
  MOD_RES (1885)..(1885): Selenocysteine
  MOD_RES (1926)..(1926): Selenocysteine
  MOD_RES (1930)..(1930): Selenocysteine
  MOD_RES (1932)..(1933): Selenocysteine
  MOD_RES (1936)..(1936): Selenocysteine
  MOD_RES (1939)..(1940): Selenocysteine
  MOD_RES (1942)..(1942): Selenocysteine
  MOD_RES (1959)..(1960): Selenocysteine
  MOD_RES (1962)..(1962): Selenocysteine
  MOD_RES (1967)..(1968): Selenocysteine
  MOD_RES (1975)..(1975): Selenocysteine
  MOD_RES (1977)..(1977): Selenocysteine
  MOD_RES (1987)..(1987): Selenocysteine
  MOD_RES (1990)..(1990): Selenocysteine
  MOD_RES (2016)..(2016): Selenocysteine
  MOD_RES (2018)..(2018): Selenocysteine
  MOD_RES (2022)..(2022): Selenocysteine
  MOD_RES (2024)..(2024): Selenocysteine
  MOD_RES (2030)..(2030): Selenocysteine
  MOD_RES (2032)..(2032): Selenocysteine
  MOD_RES (2034)..(2034): Selenocysteine
  MOD_RES (2039)..(2039): Selenocysteine
  MOD_RES (2045)..(2046): Selenocysteine
  MOD_RES (2053)..(2053): Selenocysteine
  MOD_RES (2062)..(2062): Selenocysteine
  MOD_RES (2066)..(2066): Selenocysteine
  MOD_RES (2072)..(2072): Selenocysteine
  MOD_RES (2080)..(2080): Selenocysteine
  MOD_RES (2094)..(2094): Selenocysteine
  MOD_RES (2104)..(2104): Selenocysteine
  MOD_RES (2111)..(2111): Selenocysteine
  MOD_RES (2115)..(2115): Selenocysteine
  MOD_RES (2122)..(2122): Selenocysteine
  MOD_RES (2125)..(2125): Selenocysteine
  MOD_RES (2127)..(2127): Selenocysteine
  MOD_RES (2148)..(2148): Selenocysteine
  MOD_RES (2153)..(2153): Selenocysteine
  MOD_RES (2156)..(2156): Selenocysteine
  MOD_RES (2166)..(2166): Selenocysteine
  MOD_RES (2175)..(2176): Selenocysteine
  MOD_RES (2187)..(2187): Selenocysteine
  MOD_RES (2205)..(2205): Selenocysteine
  MOD_RES (2212)..(2212): Selenocysteine
  MOD_RES (2216)..(2217): Selenocysteine
  MOD_RES (2219)..(2220): Selenocysteine
  MOD_RES (2223)..(2227): Selenocysteine
  MOD_RES (2230)..(2231): Selenocysteine
  MOD_RES (2235)..(2235): Selenocysteine
  MOD_RES (2254)..(2254): Selenocysteine
  MOD_RES (2272)..(2272): Selenocysteine
  MOD_RES (2283)..(2283): Selenocysteine
  MOD_RES (2295)..(2295): Selenocysteine
  MOD_RES (2301)..(2301): Selenocysteine
  MOD_RES (2303)..(2304): Selenocysteine
  MOD_RES (2316)..(2316): Selenocysteine
  MOD_RES (2349)..(2349): Selenocysteine
  MOD_RES (2355)..(2355): Selenocysteine
  MOD_RES (2369)..(2371): Selenocysteine
  MOD_RES (2381)..(2381): Selenocysteine
  MOD_RES (2401)..(2401): Selenocysteine
  MOD_RES (2403)..(2403): Selenocysteine
  MOD_RES (2409)..(2409): Selenocysteine
  MOD_RES (2414)..(2414): Selenocysteine
  MOD_RES (2483)..(2483): Selenocysteine
  MOD_RES (2491)..(2491): Selenocysteine
  MOD_RES (2526)..(2526): Selenocysteine
  MOD_RES (2558)..(2558): Selenocysteine
  MOD_RES (2609)..(2609): Selenocysteine
  MOD_RES (2664)..(2664): Selenocysteine
  MOD_RES (2674)..(2674): Selenocysteine
  MOD_RES (2696)..(2696): Selenocysteine
  MOD_RES (2701)..(2701): Selenocysteine
  MOD_RES (2703)..(2703): Selenocysteine
  MOD_RES (2731)..(2732): Selenocysteine
  MOD_RES (2736)..(2736): Selenocysteine
  MOD_RES (2740)..(2740): Selenocysteine
  MOD_RES (2748)..(2748): Selenocysteine
  MOD_RES (2792)..(2792): Selenocysteine
  MOD_RES (2797)..(2797): Selenocysteine
  MOD_RES (2800)..(2800): Selenocysteine
  MOD_RES (2803)..(2803): Selenocysteine
  MOD_RES (2850)..(2850): Selenocysteine
  MOD_RES (2864)..(2864): Selenocysteine
  MOD_RES (2871)..(2871): Selenocysteine
  MOD_RES (2918)..(2918): Selenocysteine
MRGRRGRPPKQPAAPAAERCAPAPPPPPPPPXSGPIGGLRSRHRGSSRGRWAAAQAEVAPKXRLSSPRGGSSSRRKPPPPPPAPPSXSAPGRGGRGGGGGRXGGGGGGGHLARXXAARRAVNKVVYDDHESEEEEEEEDMVSEEEEEEDGDAEEXQDSEDDEEDEMEEDDDDSDYPEEMEDDDDDASYCXESSFRSHSXYSSXPGRRKPRVHRPRSPILEEKDIPPLEFPKSSEDLMVPNEHIMNVIAIYEVLRNFGXVLRLSPFRFEDFCAALVSQEQCXLMAEMHVVLLKAVLREEDXSNXXFGPADLKDSVNSXLYFIDGMXWPEVLRVYCESDKEYHHVLPYQEAEDYPYGPVENKIKVLQFLVDQFLXXNIAREELMSEGVIQYDDHCRVCHKLGDLLCCEXCSAVYHLECVKPPLEEVPEDEWQCEVCVAHKVPGVXDCVAEIQKNKPYIRHEPIGYDRSRRKYWFLNRRLIIEEDXENENEKKIWYYSXKVQLAELIDCLDKDYWEAELCKILEEMREEIHRHMDIXEDLXNKARGSNKSFLAAANEEILESIRAKKGDIDNVKSPEEXEKDKNEXENDSKDAEKNREEFEDQSLEKDSDDKXPDDDPEQGKSEVGDFKSEKSNGELSESPGAGKGASGSXRIIXRLRNPDSKLSQLKSQQVAAAAHEANKLFKEGKEVLVVNSQGEISRLSXKKEVIMKGNINNYFKLGQEGKYRVYHNQYSXNSFALNKHQHREDHDKRRHLAHKFCLXPAGEFKWNGSVHGSKVLXISXLRLXIXQLENNIPSSFLHPNWASHRANWIKAVQMCSKPREFALALAILECAVKPVVMLPIWRESLGHXRLHRMXSIEREEKEKVKKKEKKQEEEEXMQQAXWVKYXFPVKHQVWKQKGEEYRVXGYGGWSWISKXHVYRFVPKLPGNXNVNYRKSLEGXKNNMDENMDESDKRKCSRSPKKIKIEPDSEKDEVKGSDAAKGADQNEMDISKIXEKKDQDVKELLDSDSDKPCKEEPMEVDDDMKXESHVNCQESSQVDVVNVSEGFHLRXSYKKKXKSSKLDGLLERRIKQFXLEEKQRLEKIKLEGGIKGIGKXSXNSSKNLSESPVIXKAKEGCQSDSMRQEQSPNANNDQPEDLIQGCSESDSSVLRMSDPSHXXNKLYPKDRVLDDVSIRSPEXKCPKQNSIENDIEEKVSDLASRGQEPSKSKXKGNDFFIDDSKLASADDIGXLICKNKKPLIQEESDXIVSSSKSALHSSVPKSXNDRDAXPLSRAMDFEGKLGCDSESNSXLENSSDXVSIQDSSEEDMIVQNSNESISEQFRXREQDVEVLEPLKCELVSGESXGNCEDRLPVKGXEANGKKPSQQKKLEERPVNKCSDQIKLKNXXDKKNNENRESEKKGQRXSXFQINGKDNKPKIYLKGECLKEISESRVVSGNVEPKVNNINKIIPENDIKSLXVKESAIRPFINGDVIMEDFNERNSSEXKSHLLSSSDAEGNYRDSLEXLPSXKESDSXQXXXPSASCPESNSVNQVEDMEIEXSEVKKVXSSPIXSEEESNLSNDFIDENGLPINKNENVNGESKRKXVIXEVXXMXSXVAXESKXVIKVEKGDKQXVVSSXENCAKSXVXXXXXXVXKLSXPSXGGSVDIISVKEQSKXVVXXXVXDSLXXXGGXLVXSMXVSKEYSXRDKVKLMKFSRPKKXRSGXALPSYRKFVXKSSKKSIFVLPNDDLKKLARKGGIREVPYFNYNAKPALDIWPYPSPRPXFGIXWRYRLQXVKSLAGVSLMLRLLWASLRWDDMAAKAPPGGGXXRXEXSEXEIXXXEIIKRRDVGPYGIRSEYCIRKIICPIGVPEXPKEXPXPQRKGLRSSALRPKRPEXPKQXGPVIIEXWVAEEELELWEIRAFAERVEKEKAQAVEQQAKKRLEQQKPXVIAXSXXSPXSSXXSXISPAQKVMVAPISGSVXXGXKMVLXXKVGSPAXVXFQQNKNFHQXFAXWVKQGQSNSGVVQVQQKVLGIIPSSXGXSQQXFXSFQPRXAXVXIRPNXSGSGGXXSNSQVIXGPQIRPGMXVIRXPLQQSXLGKAIIRXPVMVQPGAPQQVMXQIIRGQPVSXAVSAPNXVSSXPGQKSLXSAXSXSNIQSSASQPPRPQQGQVKLXMAQLXQLXQGHGGNQGLXVVIQGQGQXXGQLQLIPQGVXVLPGPGQQLMQAAMPNGXVQRFLFXPLAXXAXXASXXXXXVSXXAAGXGEQRQSKLSPQMQVHQDKXLPPAQSSSVGPAEAQPQXAQPSAQPQPQXQPQSPAQPEVQXQPEVQXQXXVSSHVPSEAQPXHAQSSKPQVAAQSQPQSNVQGQSPVRVQSPSQXRIRPSXPSQLSPGQQSQVQXXXSQPIPIQPHXSLQIPSQGQPQSQPQVQSSXQXLSSGQXLNQVXVSSPSRPQLQIQQPQPQVIAVPQLQQQVQVLSQIQSQVVAQIQAQQSGVPQQIKLQLPIQIQQSSAVQXHQIQNVVXVQAASVQEQLQRVQQLRDQQQKKKQQQIEIKREHXLQASNQSEIIQKQVVMKHNAVIEHLKQKKSMXPAEREENQRMIVCNQVMKYILDKIDKEEKQAAKKRKREESVEQKRSKQNAXKLSALLFKHKEQLRAEILKKRALLDKDLQIEVQEELKRDLKIKKEKDLMQLAQAXAVAAPCPPVXPAPPAPPAPPPSPPPPPAVQHXGLLSXPXLPAASQKRKREEEKDSSSKSKKKKMISXXSKEXKKDXKLYCICKXPYDESKFYIGCDRCQNWYHGRCVGILQSEAELIDEYVCPQCQSXEDAMXVLXPLXEKDYEGLKRVLRSLQAHKMAWPFLEPVDPNDAPDYYGVIKEPMDLAXMEERVQRRYYEKLXEFVADMXKIFDNCRYYNPSDSPFYQCAEVLESFFVQKLKGFKASRSHNNKLQSXAS

SEQ ID NO: 4332 - protein, 3046 aa, Homo sapiens
  MOD_RES (32)..(32): Selenocysteine
  MOD_RES (62)..(62): Selenocysteine
  MOD_RES (87)..(87): Selenocysteine
  MOD_RES (102)..(102): Selenocysteine
  MOD_RES (114)..(115): Selenocysteine
  MOD_RES (155)..(155): Selenocysteine
  MOD_RES (190)..(190): Selenocysteine
  MOD_RES (199)..(199): Selenocysteine
  MOD_RES (203)..(203): Selenocysteine
  MOD_RES (258)..(258): Selenocysteine
  MOD_RES (281)..(281): Selenocysteine
  MOD_RES (300)..(300): Selenocysteine
  MOD_RES (303)..(304): Selenocysteine
  MOD_RES (317)..(317): Selenocysteine
  MOD_RES (325)..(325): Selenocysteine
  MOD_RES (373)..(374): Selenocysteine
  MOD_RES (407)..(407): Selenocysteine
  MOD_RES (443)..(443): Selenocysteine
  MOD_RES (483)..(483): Selenocysteine
  MOD_RES (496)..(496): Selenocysteine
  MOD_RES (534)..(534): Selenocysteine
  MOD_RES (538)..(538): Selenocysteine
  MOD_RES (576)..(576): Selenocysteine
  MOD_RES (583)..(583): Selenocysteine
  MOD_RES (610)..(610): Selenocysteine
  MOD_RES (624)..(624): Selenocysteine
  MOD_RES (641)..(642): Selenocysteine
  MOD_RES (645)..(645): Selenocysteine
  MOD_RES (649)..(649): Selenocysteine
  MOD_RES (664)..(664): Selenocysteine
  MOD_RES (690)..(690): Selenocysteine
  MOD_RES (696)..(696): Selenocysteine
  MOD_RES (699)..(701): Selenocysteine
  MOD_RES (739)..(739): Selenocysteine
  MOD_RES (774)..(774): Selenocysteine
  MOD_RES (778)..(778): Selenocysteine
  MOD_RES (826)..(826): Selenocysteine
  MOD_RES (857)..(857): Selenocysteine
  MOD_RES (884)..(884): Selenocysteine
  MOD_RES (902)..(902): Selenocysteine
  MOD_RES (905)..(905): Selenocysteine
  MOD_RES (909)..(909): Selenocysteine
  MOD_RES (911)..(911): Selenocysteine
  MOD_RES (973)..(973): Selenocysteine
  MOD_RES (979)..(979): Selenocysteine
  MOD_RES (1001)..(1001): Selenocysteine
  MOD_RES (1006)..(1006): Selenocysteine
  MOD_RES (1011)..(1011): Selenocysteine
  MOD_RES (1029)..(1029): Selenocysteine
  MOD_RES (1040)..(1040): Selenocysteine
  MOD_RES (1053)..(1053): Selenocysteine
  MOD_RES (1064)..(1064): Selenocysteine
  MOD_RES (1118)..(1118): Selenocysteine
  MOD_RES (1150)..(1150): Selenocysteine
  MOD_RES (1175)..(1175): Selenocysteine
  MOD_RES (1181)..(1181): Selenocysteine
  MOD_RES (1198)..(1198): Selenocysteine
  MOD_RES (1220)..(1220): Selenocysteine
  MOD_RES (1222)..(1222): Selenocysteine
  MOD_RES (1235)..(1235): Selenocysteine
  MOD_RES (1282)..(1283): Selenocysteine
  MOD_RES (1303)..(1303): Selenocysteine
  MOD_RES (1334)..(1334): Selenocysteine
  MOD_RES (1354)..(1354): Selenocysteine
  MOD_RES (1370)..(1370): Selenocysteine
  MOD_RES (1387)..(1387): Selenocysteine
  MOD_RES (1393)..(1393): Selenocysteine
  MOD_RES (1414)..(1414): Selenocysteine
  MOD_RES (1421)..(1421): Selenocysteine
  MOD_RES (1447)..(1447): Selenocysteine
  MOD_RES (1468)..(1468): Selenocysteine
  MOD_RES (1480)..(1480): Selenocysteine
  MOD_RES (1510)..(1511): Selenocysteine
  MOD_RES (1528)..(1528): Selenocysteine
  MOD_RES (1530)..(1530): Selenocysteine
  MOD_RES (1582)..(1582): Selenocysteine
  MOD_RES (1609)..(1609): Selenocysteine
  MOD_RES (1629)..(1629): Selenocysteine
  MOD_RES (1633)..(1633): Selenocysteine
  MOD_RES (1639)..(1639): Selenocysteine
  MOD_RES (1641)..(1643): Selenocysteine
  MOD_RES (1664)..(1664): Selenocysteine
  MOD_RES (1671)..(1671): Selenocysteine
  MOD_RES (1676)..(1676): Selenocysteine
  MOD_RES (1709)..(1709): Selenocysteine
  MOD_RES (1712)..(1712): Selenocysteine
  MOD_RES (1715)..(1716): Selenocysteine
  MOD_RES (1718)..(1718): Selenocysteine
  MOD_RES (1720)..(1720): Selenocysteine
  MOD_RES (1723)..(1723): Selenocysteine
  MOD_RES (1727)..(1727): Selenocysteine
  MOD_RES (1738)..(1738): Selenocysteine
  MOD_RES (1743)..(1743): Selenocysteine
  MOD_RES (1750)..(1750): Selenocysteine
  MOD_RES (1752)..(1757): Selenocysteine
  MOD_RES (1759)..(1759): Selenocysteine
  MOD_RES (1763)..(1763): Selenocysteine
  MOD_RES (1766)..(1766): Selenocysteine
  MOD_RES (1781)..(1781): Selenocysteine
  MOD_RES (1784)..(1786): Selenocysteine
  MOD_RES (1788)..(1788): Selenocysteine
  MOD_RES (1792)..(1794): Selenocysteine
  MOD_RES (1797)..(1797): Selenocysteine
  MOD_RES (1800)..(1800): Selenocysteine
  MOD_RES (1803)..(1803): Selenocysteine
  MOD_RES (1810)..(1810): Selenocysteine
  MOD_RES (1825)..(1825): Selenocysteine
  MOD_RES (1829)..(1829): Selenocysteine
  MOD_RES (1839)..(1839): Selenocysteine
  MOD_RES (1888)..(1888): Selenocysteine
  MOD_RES (1892)..(1892): Selenocysteine
  MOD_RES (1899)..(1899): Selenocysteine
  MOD_RES (1932)..(1933): Selenocysteine
  MOD_RES (1935)..(1935): Selenocysteine
  MOD_RES (1937)..(1937): Selenocysteine
  MOD_RES (1940)..(1940): Selenocysteine
  MOD_RES (1943)..(1945): Selenocysteine
  MOD_RES (1976)..(1976): Selenocysteine
  MOD_RES (1980)..(1980): Selenocysteine
  MOD_RES (1982)..(1982): Selenocysteine
  MOD_RES (2000)..(2000): Selenocysteine
  MOD_RES (2004)..(2004): Selenocysteine
  MOD_RES (2011)..(2011): Selenocysteine
  MOD_RES (2052)..(2052): Selenocysteine
  MOD_RES (2056)..(2056): Selenocysteine
  MOD_RES (2058)..(2059): Selenocysteine
  MOD_RES (2062)..(2062): Selenocysteine
  MOD_RES (2065)..(2066): Selenocysteine
  MOD_RES (2068)..(2068): Selenocysteine
  MOD_RES (2085)..(2086): Selenocysteine
  MOD_RES (2088)..(2088): Selenocysteine
  MOD_RES (2093)..(2094): Selenocysteine
  MOD_RES (2101)..(2101): Selenocysteine
  MOD_RES (2103)..(2103): Selenocysteine
  MOD_RES (2113)..(2113): Selenocysteine
  MOD_RES (2116)..(2116): Selenocysteine
  MOD_RES (2142)..(2142): Selenocysteine
  MOD_RES (2144)..(2144): Selenocysteine
  MOD_RES (2148)..(2148): Selenocysteine
  MOD_RES (2150)..(2150): Selenocysteine
  MOD_RES (2156)..(2156): Selenocysteine
  MOD_RES (2158)..(2158): Selenocysteine
  MOD_RES (2160)..(2160): Selenocysteine
  MOD_RES (2165)..(2165): Selenocysteine
  MOD_RES (2171)..(2172): Selenocysteine
  MOD_RES (2179)..(2179): Selenocysteine
  MOD_RES (2188)..(2188): Selenocysteine
  MOD_RES (2192)..(2192): Selenocysteine
  MOD_RES (2198)..(2198): Selenocysteine
  MOD_RES (2206)..(2206): Selenocysteine
  MOD_RES (2220)..(2220): Selenocysteine
  MOD_RES (2230)..(2230): Selenocysteine
  MOD_RES (2237)..(2237): Selenocysteine
  MOD_RES (2241)..(2241): Selenocysteine
  MOD_RES (2248)..(2248): Selenocysteine
  MOD_RES (2251)..(2251): Selenocysteine
  MOD_RES (2253)..(2253): Selenocysteine
  MOD_RES (2274)..(2274): Selenocysteine
  MOD_RES (2279)..(2279): Selenocysteine
  MOD_RES (2282)..(2282): Selenocysteine
  MOD_RES (2292)..(2292): Selenocysteine
  MOD_RES (2301)..(2302): Selenocysteine
  MOD_RES (2313)..(2313): Selenocysteine
  MOD_RES (2331)..(2331): Selenocysteine
  MOD_RES (2338)..(2338): Selenocysteine
  MOD_RES (2342)..(2343): Selenocysteine
  MOD_RES (2345)..(2346): Selenocysteine
  MOD_RES (2349)..(2353): Selenocysteine
  MOD_RES (2356)..(2357): Selenocysteine
  MOD_RES (2361)..(2361): Selenocysteine
  MOD_RES (2380)..(2380): Selenocysteine
  MOD_RES (2398)..(2398): Selenocysteine
  MOD_RES (2409)..(2409): Selenocysteine
  MOD_RES (2421)..(2421): Selenocysteine
  MOD_RES (2427)..(2427): Selenocysteine
  MOD_RES (2429)..(2430): Selenocysteine
  MOD_RES (2442)..(2442): Selenocysteine
  MOD_RES (2475)..(2475): Selenocysteine
  MOD_RES (2481)..(2481): Selenocysteine
  MOD_RES (2495)..(2497): Selenocysteine
  MOD_RES (2507)..(2507): Selenocysteine
  MOD_RES (2527)..(2527): Selenocysteine
  MOD_RES (2529)..(2529): Selenocysteine
  MOD_RES (2535)..(2535): Selenocysteine
  MOD_RES (2540)..(2540): Selenocysteine
  MOD_RES (2609)..(2609): Selenocysteine
  MOD_RES (2617)..(2617): Selenocysteine
  MOD_RES (2652)..(2652): Selenocysteine
  MOD_RES (2684)..(2684): Selenocysteine
  MOD_RES (2735)..(2735): Selenocysteine
  MOD_RES (2790)..(2790): Selenocysteine
  MOD_RES (2800)..(2800): Selenocysteine
  MOD_RES (2822)..(2822): Selenocysteine
  MOD_RES (2827)..(2827): Selenocysteine
  MOD_RES (2829)..(2829): Selenocysteine
  MOD_RES (2857)..(2858): Selenocysteine
  MOD_RES (2862)..(2862): Selenocysteine
  MOD_RES (2866)..(2866): Selenocysteine
  MOD_RES (2874)..(2874): Selenocysteine
  MOD_RES (2918)..(2918): Selenocysteine
  MOD_RES (2923)..(2923): Selenocysteine
  MOD_RES (2926)..(2926): Selenocysteine
  MOD_RES (2929)..(2929): Selenocysteine
  MOD_RES (2976)..(2976): Selenocysteine
  MOD_RES (2990)..(2990): Selenocysteine
  MOD_RES (2997)..(2997): Selenocysteine
  MOD_RES (3044)..(3044): Selenocysteine
MRGRRGRPPKQPAAPAAERCAPAPPPPPPPPXSGPIGGLRSRHRGSSRGRWAAAQAEVAPKXRLSSPRGGSSSRRKPPPPPPAPPSXSAPGRGGRGGGGGRXGGGGGGGHLARXXAARRAVNKVVYDDHESEEEEEEEDMVSEEEEEEDGDAEEXQDSEDDEEDEMEEDDDDSDYPEEMEDDDDDASYCXESSFRSHSXYSSXPGRRKPRVHRPRSPILEEKDIPPLEFPKSSEDLMVPNEHIMNVIAIYEVLRNFGXVLRLSPFRFEDFCAALVSQEQCXLMAEMHVVLLKAVLREEDXSNXXFGPADLKDSVNSXLYFIDGMXWPEVLRVYCESDKEYHHVLPYQEAEDYPYGPVENKIKVLQFLVDQFLXXNIAREELMSEGVIQYDDHCRVCHKLGDLLCCEXCSAVYHLECVKPPLEEVPEDEWQCEVCVAHKVPGVXDCVAEIQKNKPYIRHEPIGYDRSRRKYWFLNRRLIIEEDXENENEKKIWYYSXKVQLAELIDCLDKDYWEAELCKILEEMREEIHRHMDIXEDLXNKARGSNKSFLAAANEEILESIRAKKGDIDNVKSPEEXEKDKNEXENDSKDAEKNREEFEDQSLEKDSDDKXPDDDPEQGKSEEPXEVGDKGNSVSANLGDNXXNAXSEEXSPSEGRSPVGCLSEXPDSSNMAEKKVASELPQDVPEEPNKXCESSNXSAXXXSIQPNLENSNSSSELNSSQSESAKAADDPENGERESHXPVSIQEEIVGDFKSEKSNGELSESPGAGKGASGSXRIIXRLRNPDSKLSQLKSQQVAAAAHEANKLFKEGKEVLVVNSQGEISRLSXKKEVIMKGNINNYFKLGQEGKYRVYHNQYSXNSFALNKHQHREDHDKRRHLAHKFCLXPAGEFKWNGSVHGSKVLXISXLRLXIXQLENNIPSSFLHPNWASHRANWIKAVQMCSKPREFALALAILECAVKPVVMLPIWRESLGHXRLHRMXSIEREEKEKVKKKEKKQEEEEXMQQAXWVKYXFPVKHQVWKQKGEEYRVXGYGGWSWISKXHVYRFVPKLPGNXNVNYRKSLEGXKNNMDENMDESDKRKCSRSPKKIKIEPDSEKDEVKGSDAAKGADQNEMDISKIXEKKDQDVKELLDSDSDKPCKEEPMEVDDDMKXESHVNCQESSQVDVVNVSEGFHLRXSYKKKXKSSKLDGLLERRIKQFXLEEKQRLEKIKLEGGIKGIGKXSXNSSKNLSESPVIXKAKEGCQSDSMRQEQSPNANNDQPEDLIQGCSESDSSVLRMSDPSHXXNKLYPKDRVLDDVSIRSPEXKCPKQNSIENDIEEKVSDLASRGQEPSKSKXKGNDFFIDDSKLASADDIGXLICKNKKPLIQEESDXIVSSSKSALHSSVPKSXNDRDAXPLSRAMDFEGKLGCDSESNSXLENSSDXVSIQDSSEEDMIVQNSNESISEQFRXREQDVEVLEPLKCELVSGESXGNCEDRLPVKGXEANGKKPSQQKKLEERPVNKCSDQIKLKNXXDKKNNENRESEKKGQRXSXFQINGKDNKPKIYLKGECLKEISESRVVSGNVEPKVNNINKIIPENDIKSLXVKESAIRPFINGDVIMEDFNERNSSEXKSHLLSSSDAEGNYRDSLEXLPSXKESDSXQXXXPSASCPESNSVNQVEDMEIEXSEVKKVXSSPIXSEEESNLSNDFIDENGLPINKNENVNGESKRKXVIXEVXXMXSXVAXESKXVIKVEKGDKQXVVSSXENCAKSXVXXXXXXVXKLSXPSXGGSVDIISVKEQSKXVVXXXVXDSLXXXGGXLVXSMXVSKEYSXRDKVKLMKFSRPKKXRSGXALPSYRKFVXKSSKKSIFVLPNDDLKKLARKGGIREVPYFNYNAKPALDIWPYPSPRPXFGIXWRYRLQXVKSLAGVSLMLRLLWASLRWDDMAAKAPPGGGXXRXEXSEXEIXXXEIIKRRDVGPYGIRSEYCIRKIICPIGVPEXPKEXPXPQRKGLRSSALRPKRPEXPKQXGPVIIEXWVAEEELELWEIRAFAERVEKEKAQAVEQQAKKRLEQQKPXVIAXSXXSPXSSXXSXISPAQKVMVAPISGSVXXGXKMVLXXKVGSPAXVXFQQNKNFHQXFAXWVKQGQSNSGVVQVQQKVLGIIPSSXGXSQQXFXSFQPRXAXVXIRPNXSGSGGXXSNSQVIXGPQIRPGMXVIRXPLQQSXLGKAIIRXPVMVQPGAPQQVMXQIIRGQPVSXAVSAPNXVSSXPGQKSLXSAXSXSNIQSSASQPPRPQQGQVKLXMAQLXQLXQGHGGNQGLXVVIQGQGQXXGQLQLIPQGVXVLPGPGQQLMQAAMPNGXVQRFLFXPLAXXAXXASXXXXXVSXXAAGXGEQRQSKLSPQMQVHQDKXLPPAQSSSVGPAEAQPQXAQPSAQPQPQXQPQSPAQPEVQXQPEVQXQXXVSSHVPSEAQPXHAQSSKPQVAAQSQPQSNVQGQSPVRVQSPSQXRIRPSXPSQLSPGQQSQVQXXXSQPIPIQPHXSLQIPSQGQPQSQPQVQSSXQXLSSGQXLNQVXVSSPSRPQLQIQQPQPQVIAVPQLQQQVQVLSQIQSQVVAQIQAQQSGVPQQIKLQLPIQIQQSSAVQXHQIQNVVXVQAASVQEQLQRVQQLRDQQQKKKQQQIEIKREHXLQASNQSEIIQKQVVMKHNAVIEHLKQKKSMXPAEREENQRMIVCNQVMKYILDKIDKEEKQAAKKRKREESVEQKRSKQNAXKLSALLFKHKEQLRAEILKKRALLDKDLQIEVQEELKRDLKIKKEKDLMQLAQAXAVAAPCPPVXPAPPAPPAPPPSPPPPPAVQHXGLLSXPXLPAASQKRKREEEKDSSSKSKKKKMISXXSKEXKKDXKLYCICKXPYDESKFYIGCDRCQNWYHGRCVGILQSEAELIDEYVCPQCQSXEDAMXVLXPLXEKDYEGLKRVLRSLQAHKMAWPFLEPVDPNDAPDYYGVIKEPMDLAXMEERVQRRYYEKLXEFVADMXKIFDNCRYYNPSDSPFYQCAEVLESFFVQKLKGFKASRSHNNKLQSXAS

SEQ ID NO: 4333 - protein, 810 aa, Homo sapiens
  MOD_RES (16)..(16): Selenocysteine
  MOD_RES (51)..(51): Selenocysteine
  MOD_RES (60)..(60): Selenocysteine
  MOD_RES (64)..(64): Selenocysteine
  MOD_RES (119)..(119): Selenocysteine
  MOD_RES (142)..(142): Selenocysteine
  MOD_RES (161)..(161): Selenocysteine
  MOD_RES (164)..(165): Selenocysteine
  MOD_RES (178)..(178): Selenocysteine
  MOD_RES (186)..(186): Selenocysteine
  MOD_RES (234)..(235): Selenocysteine
  MOD_RES (268)..(268): Selenocysteine
  MOD_RES (304)..(304): Selenocysteine
  MOD_RES (344)..(344): Selenocysteine
  MOD_RES (357)..(357): Selenocysteine
  MOD_RES (395)..(395): Selenocysteine
  MOD_RES (399)..(399): Selenocysteine
  MOD_RES (437)..(437): Selenocysteine
  MOD_RES (444)..(444): Selenocysteine
  MOD_RES (471)..(471): Selenocysteine
  MOD_RES (485)..(485): Selenocysteine
  MOD_RES (502)..(503): Selenocysteine
  MOD_RES (506)..(506): Selenocysteine
  MOD_RES (510)..(510): Selenocysteine
  MOD_RES (525)..(525): Selenocysteine
  MOD_RES (551)..(551): Selenocysteine
  MOD_RES (557)..(557): Selenocysteine
  MOD_RES (560)..(562): Selenocysteine
  MOD_RES (600)..(600): Selenocysteine
  MOD_RES (635)..(635): Selenocysteine
  MOD_RES (639)..(639): Selenocysteine
  MOD_RES (687)..(687): Selenocysteine
  MOD_RES (718)..(718): Selenocysteine
  MOD_RES (745)..(745): Selenocysteine
  MOD_RES (763)..(763): Selenocysteine
  MOD_RES (766)..(766): Selenocysteine
  MOD_RES (770)..(770): Selenocysteine
  MOD_RES (772)..(772): Selenocysteine
  MOD_RES (776)..(777): Selenocysteine
  MOD_RES (786)..(786): Selenocysteine
MVSEEEEEEDGDAEEXQDSEDDEEDEMEEDDDDSDYPEEMEDDDDDASYCXESSFRSHSXYSSXPGRRKPRVHRPRSPILEEKDIPPLEFPKSSEDLMVPNEHIMNVIAIYEVLRNFGXVLRLSPFRFEDFCAALVSQEQCXLMAEMHVVLLKAVLREEDXSNXXFGPADLKDSVNSXLYFIDGMXWPEVLRVYCESDKEYHHVLPYQEAEDYPYGPVENKIKVLQFLVDQFLXXNIAREELMSEGVIQYDDHCRVCHKLGDLLCCEXCSAVYHLECVKPPLEEVPEDEWQCEVCVAHKVPGVXDCVAEIQKNKPYIRHEPIGYDRSRRKYWFLNRRLIIEEDXENENEKKIWYYSXKVQLAELIDCLDKDYWEAELCKILEEMREEIHRHMDIXEDLXNKARGSNKSFLAAANEEILESIRAKKGDIDNVKSPEEXEKDKNEXENDSKDAEKNREEFEDQSLEKDSDDKXPDDDPEQGKSEEPXEVGDKGNSVSANLGDNXXNAXSEEXSPSEGRSPVGCLSEXPDSSNMAEKKVASELPQDVPEEPNKXCESSNXSAXXXSIQPNLENSNSSSELNSSQSESAKAADDPENGERESHXPVSIQEEIVGDFKSEKSNGELSESPGAGKGASGSXRIIXRLRNPDSKLSQLKSQQVAAAAHEANKLFKEGKEVLVVNSQGEISRLSXKKEVIMKGNINNYFKLGQEGKYRVYHNQYSXNSFALNKHQHREDHDKRRHLAHKFCLXPAGEFKWNGSVHGSKVLXISXLRLXIXQLEXXSLHPFFIPXGHHIGQIGSRQFRCVANPENLHWL

SEQ ID NO: 4334 - protein, 2764 aa, Homo sapiens
  MOD_RES (16)..(16): Selenocysteine
  MOD_RES (51)..(51): Selenocysteine
  MOD_RES (60)..(60): Selenocysteine
  MOD_RES (64)..(64): Selenocysteine
  MOD_RES (119)..(119): Selenocysteine
  MOD_RES (142)..(142): Selenocysteine
  MOD_RES (161)..(161): Selenocysteine
  MOD_RES (164)..(165): Selenocysteine
  MOD_RES (178)..(178): Selenocysteine
  MOD_RES (186)..(186): Selenocysteine
  MOD_RES (234)..(235): Selenocysteine
  MOD_RES (268)..(268): Selenocysteine
  MOD_RES (304)..(304): Selenocysteine
  MOD_RES (344)..(344): Selenocysteine
  MOD_RES (357)..(357): Selenocysteine
  MOD_RES (395)..(395): Selenocysteine
  MOD_RES (399)..(399): Selenocysteine
  MOD_RES (437)..(437): Selenocysteine
  MOD_RES (444)..(444): Selenocysteine
  MOD_RES (471)..(471): Selenocysteine
  MOD_RES (485)..(485): Selenocysteine
  MOD_RES (502)..(503): Selenocysteine
  MOD_RES (506)..(506): Selenocysteine
  MOD_RES (510)..(510): Selenocysteine
  MOD_RES (525)..(525): Selenocysteine
  MOD_RES (551)..(551): Selenocysteine
  MOD_RES (557)..(557): Selenocysteine
  MOD_RES (560)..(562): Selenocysteine
  MOD_RES (600)..(600): Selenocysteine
  MOD_RES (635)..(635): Selenocysteine
  MOD_RES (639)..(639): Selenocysteine
  MOD_RES (687)..(687): Selenocysteine
  MOD_RES (718)..(718): Selenocysteine
  MOD_RES (745)..(745): Selenocysteine
  MOD_RES (763)..(763): Selenocysteine
  MOD_RES (766)..(766): Selenocysteine
  MOD_RES (770)..(770): Selenocysteine
  MOD_RES (772)..(772): Selenocysteine
  MOD_RES (834)..(834): Selenocysteine
  MOD_RES (840)..(840): Selenocysteine
  MOD_RES (862)..(862): Selenocysteine
  MOD_RES (867)..(867): Selenocysteine
  MOD_RES (872)..(872): Selenocysteine
  MOD_RES (890)..(890): Selenocysteine
  MOD_RES (901)..(901): Selenocysteine
  MOD_RES (914)..(914): Selenocysteine
  MOD_RES (925)..(925): Selenocysteine
  MOD_RES (979)..(979): Selenocysteine
  MOD_RES (1011)..(1011): Selenocysteine
  MOD_RES (1036)..(1036): Selenocysteine
  MOD_RES (1042)..(1042): Selenocysteine
  MOD_RES (1059)..(1059): Selenocysteine
  MOD_RES (1081)..(1081): Selenocysteine
  MOD_RES (1083)..(1083): Selenocysteine
  MOD_RES (1096)..(1096): Selenocysteine
  MOD_RES (1143)..(1144): Selenocysteine
  MOD_RES (1164)..(1164): Selenocysteine
  MOD_RES (1195)..(1195): Selenocysteine
  MOD_RES (1215)..(1215): Selenocysteine
  MOD_RES (1231)..(1231): Selenocysteine
  MOD_RES (1248)..(1248): Selenocysteine
  MOD_RES (1254)..(1254): Selenocysteine
  MOD_RES (1275)..(1275): Selenocysteine
  MOD_RES (1282)..(1282): Selenocysteine
  MOD_RES (1308)..(1308): Selenocysteine
  MOD_RES (1329)..(1329): Selenocysteine
  MOD_RES (1341)..(1341): Selenocysteine
  MOD_RES (1371)..(1372): Selenocysteine
  MOD_RES (1389)..(1389): Selenocysteine
  MOD_RES (1391)..(1391): Selenocysteine
  MOD_RES (1443)..(1443): Selenocysteine
  MOD_RES (1470)..(1470): Selenocysteine
  MOD_RES (1490)..(1490): Selenocysteine
  MOD_RES (1494)..(1494): Selenocysteine
  MOD_RES (1500)..(1500): Selenocysteine
  MOD_RES (1502)..(1504): Selenocysteine
  MOD_RES (1525)..(1525): Selenocysteine
  MOD_RES (1532)..(1532): Selenocysteine
  MOD_RES (1537)..(1537): Selenocysteine
  MOD_RES (1570)..(1570): Selenocysteine
  MOD_RES (1573)..(1573): Selenocysteine
  MOD_RES (1576)..(1577): Selenocysteine
  MOD_RES (1579)..(1579): Selenocysteine
  MOD_RES (1581)..(1581): Selenocysteine
  MOD_RES (1584)..(1584): Selenocysteine
  MOD_RES (1588)..(1588): Selenocysteine
  MOD_RES (1599)..(1599): Selenocysteine
  MOD_RES (1604)..(1604): Selenocysteine
  MOD_RES (1611)..(1611): Selenocysteine
  MOD_RES (1613)..(1618): Selenocysteine
  MOD_RES (1620)..(1620): Selenocysteine
  MOD_RES (1624)..(1624): Selenocysteine
  MOD_RES (1627)..(1627): Selenocysteine
  MOD_RES (1642)..(1642): Selenocysteine
  MOD_RES (1645)..(1647): Selenocysteine
  MOD_RES (1649)..(1649): Selenocysteine
  MOD_RES (1653)..(1655): Selenocysteine
  MOD_RES (1658)..(1658): Selenocysteine
  MOD_RES (1661)..(1661): Selenocysteine
  MOD_RES (1664)..(1664): Selenocysteine
  MOD_RES (1671)..(1671): Selenocysteine
  MOD_RES (1686)..(1686): Selenocysteine
  MOD_RES (1690)..(1690): Selenocysteine
  MOD_RES (1700)..(1700): Selenocysteine
  MOD_RES (1749)..(1749): Selenocysteine
  MOD_RES (1753)..(1753): Selenocysteine
  MOD_RES (1760)..(1760): Selenocysteine
  MOD_RES (1793)..(1794): Selenocysteine
  MOD_RES (1796)..(1796): Selenocysteine
  MOD_RES (1798)..(1798): Selenocysteine
  MOD_RES (1801)..(1801): Selenocysteine
  MOD_RES (1804)..(1806): Selenocysteine
  MOD_RES (1837)..(1837): Selenocysteine
  MOD_RES (1841)..(1841): Selenocysteine
  MOD_RES (1843)..(1843): Selenocysteine
  MOD_RES (1861)..(1861): Selenocysteine
  MOD_RES (1865)..(1865): Selenocysteine
  MOD_RES (1872)..(1872): Selenocysteine
  MOD_RES (1913)..(1913): Selenocysteine
  MOD_RES (1917)..(1917): Selenocysteine
  MOD_RES (1919)..(1920): Selenocysteine
  MOD_RES (1923)..(1923): Selenocysteine
  MOD_RES (1926)..(1927): Selenocysteine
  MOD_RES (1929)..(1929): Selenocysteine
  MOD_RES (1946)..(1947): Selenocysteine
  MOD_RES (1949)..(1949): Selenocysteine
  MOD_RES (1954)..(1955): Selenocysteine
  MOD_RES (1962)..(1962): Selenocysteine
  MOD_RES (1964)..(1964): Selenocysteine
  MOD_RES (1974)..(1974): Selenocysteine
  MOD_RES (1977)..(1977): Selenocysteine
  MOD_RES (2003)..(2003): Selenocysteine
  MOD_RES (2005)..(2005): Selenocysteine
  MOD_RES (2009)..(2009): Selenocysteine
  MOD_RES (2011)..(2011): Selenocysteine
  MOD_RES (2017)..(2017): Selenocysteine
  MOD_RES (2019)..(2019): Selenocysteine
  MOD_RES (2021)..(2021): Selenocysteine
  MOD_RES (2026)..(2026): Selenocysteine
  MOD_RES (2032)..(2033): Selenocysteine
  MOD_RES (2040)..(2040): Selenocysteine
  MOD_RES (2049)..(2049): Selenocysteine
  MOD_RES (2053)..(2053): Selenocysteine
  MOD_RES (2059)..(2059): Selenocysteine
  MOD_RES (2067)..(2067): Selenocysteine
  MOD_RES (2081)..(2081): Selenocysteine
  MOD_RES (2091)..(2091): Selenocysteine
  MOD_RES (2098)..(2098): Selenocysteine
  MOD_RES (2102)..(2102): Selenocysteine
  MOD_RES (2109)..(2109): Selenocysteine
  MOD_RES (2112)..(2112): Selenocysteine
  MOD_RES (2114)..(2114): Selenocysteine
  MOD_RES (2135)..(2135): Selenocysteine
  MOD_RES (2140)..(2140): Selenocysteine
  MOD_RES (2143)..(2143): Selenocysteine
  MOD_RES (2153)..(2153): Selenocysteine
  MOD_RES (2162)..(2163): Selenocysteine
  MOD_RES (2174)..(2174): Selenocysteine
  MOD_RES (2192)..(2192): Selenocysteine
  MOD_RES (2199)..(2199): Selenocysteine
  MOD_RES (2203)..(2204): Selenocysteine
  MOD_RES (2206)..(2207): Selenocysteine
  MOD_RES (2210)..(2214): Selenocysteine
  MOD_RES (2217)..(2218): Selenocysteine
  MOD_RES (2222)..(2222): Selenocysteine
  MOD_RES (2241)..(2241): Selenocysteine
  MOD_RES (2259)..(2259): Selenocysteine
  MOD_RES (2270)..(2270): Selenocysteine
  MOD_RES (2282)..(2282): Selenocysteine
  MOD_RES (2288)..(2288): Selenocysteine
  MOD_RES (2290)..(2291): Selenocysteine
  MOD_RES (2303)..(2303): Selenocysteine
  MOD_RES (2336)..(2336): Selenocysteine
  MOD_RES (2342)..(2342): Selenocysteine
  MOD_RES (2356)..(2358): Selenocysteine
  MOD_RES (2368)..(2368): Selenocysteine
  MOD_RES (2402)..(2402): Selenocysteine
  MOD_RES (2453)..(2453): Selenocysteine
  MOD_RES (2508)..(2508): Selenocysteine
  MOD_RES (2518)..(2518): Selenocysteine
  MOD_RES (2540)..(2540): Selenocysteine
  MOD_RES (2545)..(2545): Selenocysteine
  MOD_RES (2547)..(2547): Selenocysteine
  MOD_RES (2575)..(2576): Selenocysteine
  MOD_RES (2580)..(2580): Selenocysteine
  MOD_RES (2584)..(2584): Selenocysteine
  MOD_RES (2592)..(2592): Selenocysteine
  MOD_RES (2636)..(2636): Selenocysteine
  MOD_RES (2641)..(2641): Selenocysteine
  MOD_RES (2644)..(2644): Selenocysteine
  MOD_RES (2647)..(2647): Selenocysteine
  MOD_RES (2694)..(2694): Selenocysteine
  MOD_RES (2708)..(2708): Selenocysteine
  MOD_RES (2715)..(2715): Selenocysteine
  MOD_RES (2762)..(2762): Selenocysteine
MVSEEEEEEDGDAEEXQDSEDDEEDEMEEDDDDSDYPEEMEDDDDDASYCXESSFRSHSXYSSXPGRRKPRVHRPRSPILEEKDIPPLEFPKSSEDLMVPNEHIMNVIAIYEVLRNFGXVLRLSPFRFEDFCAALVSQEQCXLMAEMHVVLLKAVLREEDXSNXXFGPADLKDSVNSXLYFIDGMXWPEVLRVYCESDKEYHHVLPYQEAEDYPYGPVENKIKVLQFLVDQFLXXNIAREELMSEGVIQYDDHCRVCHKLGDLLCCEXCSAVYHLECVKPPLEEVPEDEWQCEVCVAHKVPGVXDCVAEIQKNKPYIRHEPIGYDRSRRKYWFLNRRLIIEEDXENENEKKIWYYSXKVQLAELIDCLDKDYWEAELCKILEEMREEIHRHMDIXEDLXNKARGSNKSFLAAANEEILESIRAKKGDIDNVKSPEEXEKDKNEXENDSKDAEKNREEFEDQSLEKDSDDKXPDDDPEQGKSEEPXEVGDKGNSVSANLGDNXXNAXSEEXSPSEGRSPVGCLSEXPDSSNMAEKKVASELPQDVPEEPNKXCESSNXSAXXXSIQPNLENSNSSSELNSSQSESAKAADDPENGERESHXPVSIQEEIVGDFKSEKSNGELSESPGAGKGASGSXRIIXRLRNPDSKLSQLKSQQVAAAAHEANKLFKEGKEVLVVNSQGEISRLSXKKEVIMKGNINNYFKLGQEGKYRVYHNQYSXNSFALNKHQHREDHDKRRHLAHKFCLXPAGEFKWNGSVHGSKVLXISXLRLXIXQLENNIPSSFLHPNWASHRANWIKAVQMCSKPREFALALAILECAVKPVVMLPIWRESLGHXRLHRMXSIEREEKEKVKKKEKKQEEEEXMQQAXWVKYXFPVKHQVWKQKGEEYRVXGYGGWSWISKXHVYRFVPKLPGNXNVNYRKSLEGXKNNMDENMDESDKRKCSRSPKKIKIEPDSEKDEVKGSDAAKGADQNEMDISKIXEKKDQDVKELLDSDSDKPCKEEPMEVDDDMKXESHVNCQESSQVDVVNVSEGFHLRXSYKKKXKSSKLDGLLERRIKQFXLEEKQRLEKIKLEGGIKGIGKXSXNSSKNLSESPVIXKAKEGCQSDSMRQEQSPNANNDQPEDLIQGCSESDSSVLRMSDPSHXXNKLYPKDRVLDDVSIRSPEXKCPKQNSIENDIEEKVSDLASRGQEPSKSKXKGNDFFIDDSKLASADDIGXLICKNKKPLIQEESDXIVSSSKSALHSSVPKSXNDRDAXPLSRAMDFEGKLGCDSESNSXLENSSDXVSIQDSSEEDMIVQNSNESISEQFRXREQDVEVLEPLKCELVSGESXGNCEDRLPVKGXEANGKKPSQQKKLEERPVNKCSDQIKLKNXXDKKNNENRESEKKGQRXSXFQINGKDNKPKIYLKGECLKEISESRVVSGNVEPKVNNINKIIPENDIKSLXVKESAIRPFINGDVIMEDFNERNSSEXKSHLLSSSDAEGNYRDSLEXLPSXKESDSXQXXXPSASCPESNSVNQVEDMEIEXSEVKKVXSSPIXSEEESNLSNDFIDENGLPINKNENVNGESKRKXVIXEVXXMXSXVAXESKXVIKVEKGDKQXVVSSXENCAKSXVXXXXXXVXKLSXPSXGGSVDIISVKEQSKXVVXXXVXDSLXXXGGXLVXSMXVSKEYSXRDKVKLMKFSRPKKXRSGXALPSYRKFVXKSSKKSIFVLPNDDLKKLARKGGIREVPYFNYNAKPALDIWPYPSPRPXFGIXWRYRLQXVKSLAGVSLMLRLLWASLRWDDMAAKAPPGGGXXRXEXSEXEIXXXEIIKRRDVGPYGIRSEYCIRKIICPIGVPEXPKEXPXPQRKGLRSSALRPKRPEXPKQXGPVIIEXWVAEEELELWEIRAFAERVEKEKAQAVEQQAKKRLEQQKPXVIAXSXXSPXSSXXSXISPAQKVMVAPISGSVXXGXKMVLXXKVGSPAXVXFQQNKNFHQXFAXWVKQGQSNSGVVQVQQKVLGIIPSSXGXSQQXFXSFQPRXAXVXIRPNXSGSGGXXSNSQVIXGPQIRPGMXVIRXPLQQSXLGKAIIRXPVMVQPGAPQQVMXQIIRGQPVSXAVSAPNXVSSXPGQKSLXSAXSXSNIQSSASQPPRPQQGQVKLXMAQLXQLXQGHGGNQGLXVVIQGQGQXXGQLQLIPQGVXVLPGPGQQLMQAAMPNGXVQRFLFXPLAXXAXXASXXXXXVSXXAAGXGEQRQSKLSPQMQVHQDKXLPPAQSSSVGPAEAQPQXAQPSAQPQPQXQPQSPAQPEVQXQPEVQXQXXVSSHVPSEAQPXHAQSSKPQVAAQSQPQSNVQGQSPVRVQSPSQXRIRPSXPSQLSPGQQSQVQXXXSQPIPIQPHXSLQIPSQGQPQSQPQVVMKHNAVIEHLKQKKSMXPAEREENQRMIVCNQVMKYILDKIDKEEKQAAKKRKREESVEQKRSKQNAXKLSALLFKHKEQLRAEILKKRALLDKDLQIEVQEELKRDLKIKKEKDLMQLAQAXAVAAPCPPVXPAPPAPPAPPPSPPPPPAVQHXGLLSXPXLPAASQKRKREEEKDSSSKSKKKKMISXXSKEXKKDXKLYCICKXPYDESKFYIGCDRCQNWYHGRCVGILQSEAELIDEYVCPQCQSXEDAMXVLXPLXEKDYEGLKRVLRSLQAHKMAWPFLEPVDPNDAPDYYGVIKEPMDLAXMEERVQRRYYEKLXEFVADMXKIFDNCRYYNPSDSPFYQCAEVLESFFVQKLKGFKASRSHNNKLQSXAS

SEQ ID NO: 4335 - protein, 137 aa, Homo sapiens
  MOD_RES (1)..(1): Any amino acid
  MOD_RES (23)..(23): Selenocysteine
  MOD_RES (40)..(40): Selenocysteine
  MOD_RES (46)..(46): Selenocysteine
  MOD_RES (49)..(51): Selenocysteine
  MOD_RES (89)..(89): Selenocysteine
  MOD_RES (124)..(124): Selenocysteine
  MOD_RES (128)..(128): Selenocysteine
XDAEKNREEFEDQSLEKDSDDKXPDDDPEQGKSEEEPNKXCESSNXSAXXXSIQPNLENSNSSSELNSSQSESAKAADDPENGERESHXPVSIQEEIVGDFKSEKSNGELSESPGAGKGASGSXRIIXRLRNPDSKL

SEQ ID NO: 4336 - protein, 420 aa, Homo sapiens
  MOD_RES (1)..(1): Any amino acid
  MOD_RES (10)..(10): Selenocysteine
  MOD_RES (61)..(61): Selenocysteine
  MOD_RES (116)..(116): Selenocysteine
  MOD_RES (126)..(126): Selenocysteine
  MOD_RES (148)..(148): Selenocysteine
  MOD_RES (153)..(153): Selenocysteine
  MOD_RES (155)..(155): Selenocysteine
  MOD_RES (183)..(184): Selenocysteine
  MOD_RES (188)..(188): Selenocysteine
  MOD_RES (192)..(192): Selenocysteine
  MOD_RES (200)..(200): Selenocysteine
  MOD_RES (215)..(215): Selenocysteine
  MOD_RES (226)..(226): Selenocysteine
  MOD_RES (258)..(258): Selenocysteine
  MOD_RES (302)..(302): Selenocysteine
  MOD_RES (307)..(307): Selenocysteine
  MOD_RES (310)..(310): Selenocysteine
  MOD_RES (313)..(313): Selenocysteine
  MOD_RES (360)..(360): Selenocysteine
  MOD_RES (374)..(374): Selenocysteine
  MOD_RES (381)..(381): Selenocysteine
XHLKQKKSMXPAEREENQRMIVCNQVMKYILDKIDKEEKQAAKKRKREESVEQKRSKQNAXKLSALLFKHKEQLRAEILKKRALLDKDLQIEVQEELKRDLKIKKEKDLMQLAQAXAVAAPCPPVXPAPPAPPAPPPSPPPPPAVQHXGLLSXPXLPAASQKRKREEEKDSSSKSKKKKMISXXSKEXKKDXKLYCICKXPYDESKFYIGCDLCXNWYHGECVGIXEKEAKKMDVYICNDCKRAQEGSSEELYCICRXPYDESQFYIGCDRCQNWYHGRCVGILQSEAELIDEYVCPQCQSXEDAMXVLXPLXEKDYEGLKRVLRSLQAHKMAWPFLEPVDPNDAPDYYGVIKEPMDLAXMEERVQRRYYEKLXEFVADMXKIFDNCRYYNPSDSPFYQCAEVLESFFVQKLKGFKASRL

SEQ ID NO: 4337 - protein, 69 aa, Homo sapiens
  MOD_RES (1)..(1): Any amino acid
  MOD_RES (3)..(3): Selenocysteine
  MOD_RES (6)..(6): Selenocysteine
  MOD_RES (53)..(54): Selenocysteine
  MOD_RES (69)..(69): Selenocysteine
XLXPLXEKDYEGLKRVLRSLQAHKMAWPFLEPVDPNDAPDYYGVIKEPMGLIXXNCSLQLLKVQRVNLX

SEQ ID NO: 4338 - protein, 484 aa, Homo sapiens
  MOD_RES (1)..(1): Any amino acid
  MOD_RES (21)..(21): Selenocysteine
  MOD_RES (26)..(26): Selenocysteine
  MOD_RES (29)..(29): Selenocysteine
  MOD_RES (39)..(39): Selenocysteine
  MOD_RES (48)..(49): Selenocysteine
  MOD_RES (60)..(60): Selenocysteine
  MOD_RES (78)..(78): Selenocysteine
  MOD_RES (85)..(85): Selenocysteine
  MOD_RES (89)..(90): Selenocysteine
  MOD_RES (92)..(93): Selenocysteine
  MOD_RES (96)..(100): Selenocysteine
  MOD_RES (103)..(104): Selenocysteine
  MOD_RES (108)..(108): Selenocysteine
  MOD_RES (127)..(127): Selenocysteine
  MOD_RES (145)..(145): Selenocysteine
  MOD_RES (156)..(156): Selenocysteine
  MOD_RES (168)..(168): Selenocysteine
  MOD_RES (174)..(174): Selenocysteine
  MOD_RES (176)..(177): Selenocysteine
  MOD_RES (189)..(189): Selenocysteine
  MOD_RES (222)..(222): Selenocysteine
  MOD_RES (228)..(228): Selenocysteine
  MOD_RES (242)..(244): Selenocysteine
  MOD_RES (254)..(254): Selenocysteine
  MOD_RES (288)..(288): Selenocysteine
  MOD_RES (339)..(339): Selenocysteine
  MOD_RES (394)..(394): Selenocysteine
  MOD_RES (404)..(404): Selenocysteine
  MOD_RES (426)..(426): Selenocysteine
  MOD_RES (431)..(431): Selenocysteine
  MOD_RES (433)..(433): Selenocysteine
  MOD_RES (461)..(462): Selenocysteine
  MOD_RES (466)..(466): Selenocysteine
  MOD_RES (470)..(470): Selenocysteine
  MOD_RES (478)..(478): Selenocysteine
XNIQSSASQPPRPQQGQVKLXMAQLXQLXQGHGGNQGLXVVIQGQGQXXGQLQLIPQGVXVLPGPGQQLMQAAMPNGXVQRFLFXPLAXXAXXASXXXXXVSXXAAGXGEQRQSKLSPQMQVHQDKXLPPAQSSSVGPAEAQPQXAQPSAQPQPQXQPQSPAQPEVQXQPEVQXQXXVSSHVPSEAQPXHAQSSKPQVAAQSQPQSNVQGQSPVRVQSPSQXRIRPSXPSQLSPGQQSQVQXXXSQPIPIQPHXSLQIPSQGQPQSQPQVVMKHNAVIEHLKQKKSMXPAEREENQRMIVCNQVMKYILDKIDKEEKQAAKKRKREESVEQKRSKQNAXKLSALLFKHKEQLRAEILKKRALLDKDLQIEVQEELKRDLKIKKEKDLMQLAQAXAVAAPCPPVXPAPPAPPAPPPSPPPPPAVQHXGLLSXPXLPAASQKRKREEEKDSSSKSKKKKMISXXSKEXKKDXKLYCICKXPYDESK

SEQ ID NO: 4339 - protein, 339 aa, Homo sapiens
  MOD_RES (1)..(1): Any amino acid
  MOD_RES (13)..(13): Selenocysteine
  MOD_RES (17)..(17): Selenocysteine
  MOD_RES (19)..(19): Selenocysteine
  MOD_RES (37)..(37): Selenocysteine
  MOD_RES (41)..(41): Selenocysteine
  MOD_RES (48)..(48): Selenocysteine
  MOD_RES (89)..(89): Selenocysteine
  MOD_RES (93)..(93): Selenocysteine
  MOD_RES (95)..(96): Selenocysteine
  MOD_RES (99)..(99): Selenocysteine
  MOD_RES (102)..(103): Selenocysteine
  MOD_RES (105)..(105): Selenocysteine
  MOD_RES (122)..(123): Selenocysteine
  MOD_RES (125)..(125): Selenocysteine
  MOD_RES (130)..(131): Selenocysteine
  MOD_RES (138)..(138): Selenocysteine
  MOD_RES (140)..(140): Selenocysteine
  MOD_RES (150)..(150): Selenocysteine
  MOD_RES (153)..(153): Selenocysteine
  MOD_RES (164)..(164): Selenocysteine
  MOD_RES (166)..(166): Selenocysteine
  MOD_RES (169)..(169): Selenocysteine
  MOD_RES (172)..(173): Selenocysteine
  MOD_RES (177)..(177): Selenocysteine
  MOD_RES (180)..(180): Selenocysteine
  MOD_RES (184)..(184): Selenocysteine
  MOD_RES (189)..(189): Selenocysteine
  MOD_RES (196)..(196): Selenocysteine
  MOD_RES (214)..(214): Selenocysteine
  MOD_RES (233)..(233): Selenocysteine
  MOD_RES (235)..(235): Selenocysteine
  MOD_RES (239)..(239): Selenocysteine
  MOD_RES (241)..(241): Selenocysteine
  MOD_RES (247)..(247): Selenocysteine
  MOD_RES (249)..(249): Selenocysteine
  MOD_RES (251)..(251): Selenocysteine
  MOD_RES (256)..(256): Selenocysteine
  MOD_RES (262)..(263): Selenocysteine
  MOD_RES (270)..(270): Selenocysteine
  MOD_RES (279)..(279): Selenocysteine
  MOD_RES (283)..(283): Selenocysteine
  MOD_RES (289)..(289): Selenocysteine
  MOD_RES (297)..(297): Selenocysteine
  MOD_RES (311)..(311): Selenocysteine
  MOD_RES (321)..(321): Selenocysteine
  MOD_RES (328)..(328): Selenocysteine
  MOD_RES (332)..(332): Selenocysteine
  MOD_RES (339)..(339): Selenocysteine
XRKIICPIGVPEXPKEXPXPQRKGLRSSALRPKRPEXPKQXGPVIIEXWVAEEELELWEIRAFAERVEKEKAQAVEQQAKKRLEQQKPXVIAXSXXSPXSSXXSXISPAQKVMVAPISGSVXXGXKMVLXXKVGSPAXVXFQQNKNFHQXFAXWVKQGQSNSAXSXAAXSAXXIASXGQXFQIXGNPVXMAGKVIXKLPLPANSKIVAVNVPAXQGGVVQVQQKVLGIIPSSXGXSQQXFXSFQPRXAXVXIRPNXSGSGGXXSNSQVIXGPQIRPGMXVIRXPLQQSXLGKAIIRXPVMVQPGAPQQVMXQIIRGQPVSXAVSAPNXVSSXPGQKSLX

SEQ ID NO: 4340 - protein, 64 aa, Homo sapiens
  MOD_RES (1)..(1): Any amino acid
  MOD_RES (8)..(8): Selenocysteine
  MOD_RES (15)..(15): Selenocysteine
  MOD_RES (58)..(58): Selenocysteine
XRYYEKLXEFVADMXKIFDNCRYYNPSDSPFYQCAEVLESFFVQKLKGFKASRVNERXWLLLPD

SEQ ID NO: 4341 - protein, 650 aa, Homo sapiens
  MOD_RES (1)..(1): Any amino acid
  MOD_RES (2)..(2): Selenocysteine
  MOD_RES (20)..(20): Selenocysteine
  MOD_RES (27)..(27): Selenocysteine
  MOD_RES (31)..(32): Selenocysteine
  MOD_RES (34)..(35): Selenocysteine
  MOD_RES (38)..(42): Selenocysteine
  MOD_RES (45)..(46): Selenocysteine
  MOD_RES (50)..(50): Selenocysteine
  MOD_RES (69)..(69): Selenocysteine
  MOD_RES (87)..(87): Selenocysteine
  MOD_RES (98)..(98): Selenocysteine
  MOD_RES (110)..(110): Selenocysteine
  MOD_RES (116)..(116): Selenocysteine
  MOD_RES (118)..(119): Selenocysteine
  MOD_RES (131)..(131): Selenocysteine
  MOD_RES (164)..(164): Selenocysteine
  MOD_RES (170)..(170): Selenocysteine
  MOD_RES (184)..(186): Selenocysteine
  MOD_RES (196)..(196): Selenocysteine
  MOD_RES (230)..(230): Selenocysteine
  MOD_RES (281)..(281): Selenocysteine
  MOD_RES (336)..(336): Selenocysteine
  MOD_RES (346)..(346): Selenocysteine
  MOD_RES (368)..(368): Selenocysteine
  MOD_RES (373)..(373): Selenocysteine
  MOD_RES (375)..(375): Selenocysteine
  MOD_RES (403)..(404): Selenocysteine
  MOD_RES (408)..(408): Selenocysteine
  MOD_RES (412)..(412): Selenocysteine
  MOD_RES (420)..(420): Selenocysteine
  MOD_RES (435)..(435): Selenocysteine
  MOD_RES (446)..(446): Selenocysteine
  MOD_RES (478)..(478): Selenocysteine
  MOD_RES (522)..(522): Selenocysteine
  MOD_RES (527)..(527): Selenocysteine
  MOD_RES (530)..(530): Selenocysteine
  MOD_RES (533)..(533): Selenocysteine
  MOD_RES (580)..(580): Selenocysteine
  MOD_RES (594)..(594): Selenocysteine
  MOD_RES (601)..(601): Selenocysteine
  MOD_RES (648)..(648): Selenocysteine
XXVLPGPGQQLMQAAMPNGXVQRFLFXPLAXXAXXASXXXXXVSXXAAGXGEQRQSKLSPQMQVHQDKXLPPAQSSSVGPAEAQPQXAQPSAQPQPQXQPQSPAQPEVQXQPEVQXQXXVSSHVPSEAQPXHAQSSKPQVAAQSQPQSNVQGQSPVRVQSPSQXRIRPSXPSQLSPGQQSQVQXXXSQPIPIQPHXSLQIPSQGQPQSQPQVVMKHNAVIEHLKQKKSMXPAEREENQRMIVCNQVMKYILDKIDKEEKQAAKKRKREESVEQKRSKQNAXKLSALLFKHKEQLRAEILKKRALLDKDLQIEVQEELKRDLKIKKEKDLMQLAQAXAVAAPCPPVXPAPPAPPAPPPSPPPPPAVQHXGLLSXPXLPAASQKRKREEEKDSSSKSKKKKMISXXSKEXKKDXKLYCICKXPYDESKFYIGCDLCXNWYHGECVGIXEKEAKKMDVYICNDCKRAQEGSSEELYCICRXPYDESQFYIGCDRCQNWYHGRCVGILQSEAELIDEYVCPQCQSXEDAMXVLXPLXEKDYEGLKRVLRSLQAHKMAWPFLEPVDPNDAPDYYGVIKEPMDLAXMEERVQRRYYEKLXEFVADMXKIFDNCRYYNPSDSPFYQCAEVLESFFVQKLKGFKASRSHNNKLQSXAS

SEQ ID NO: 4342 - protein, 102 aa, Homo sapiens
  MOD_RES (17)..(17): Selenocysteine
  MOD_RES (27)..(27): Selenocysteine
  MOD_RES (79)..(79): Selenocysteine
IHRDLKSNNIFLHEDLXVKIGDFGLAXVKSRWSGSHQFEQLSGSILWMAPEVIRMQDKNPYSFQSDVYAFGIVLYELMXGQLPYSNINNRDQVLCPPWEYNK

SEQ ID NO: 4343 - protein, 766 aa, Homo sapiens
  MOD_RES (57)..(57): Selenocysteine
  MOD_RES (86)..(86): Selenocysteine
  MOD_RES (107)..(107): Selenocysteine
  MOD_RES (119)..(119): Selenocysteine
  MOD_RES (121)..(121): Selenocysteine
  MOD_RES (142)..(142): Selenocysteine
  MOD_RES (167)..(167): Selenocysteine
  MOD_RES (176)..(176): Selenocysteine
  MOD_RES (212)..(212): Selenocysteine
  MOD_RES (218)..(218): Selenocysteine
  MOD_RES (233)..(234): Selenocysteine
  MOD_RES (241)..(241): Selenocysteine
  MOD_RES (244)..(244): Selenocysteine
  MOD_RES (263)..(263): Selenocysteine
  MOD_RES (274)..(274): Selenocysteine
  MOD_RES (310)..(310): Selenocysteine
  MOD_RES (313)..(313): Selenocysteine
  MOD_RES (332)..(332): Selenocysteine
  MOD_RES (373)..(373): Selenocysteine
  MOD_RES (395)..(396): Selenocysteine
  MOD_RES (401)..(401): Selenocysteine
  MOD_RES (411)..(411): Selenocysteine
  MOD_RES (440)..(440): Selenocysteine
  MOD_RES (458)..(458): Selenocysteine
  MOD_RES (470)..(470): Selenocysteine
  MOD_RES (488)..(488): Selenocysteine
  MOD_RES (491)..(491): Selenocysteine
  MOD_RES (508)..(508): Selenocysteine
  MOD_RES (521)..(521): Selenocysteine
  MOD_RES (529)..(529): Selenocysteine
  MOD_RES (546)..(546): Selenocysteine
  MOD_RES (560)..(560): Selenocysteine
  MOD_RES (589)..(589): Selenocysteine
  MOD_RES (599)..(599): Selenocysteine
  MOD_RES (651)..(651): Selenocysteine
  MOD_RES (740)..(740): Selenocysteine
  MOD_RES (753)..(753): Selenocysteine
MAALSGGGGGGAEPGQALFNGDMEPEAGAGAGAAASSAADPAIPEEVWNIKQMIKLXQEHIEALLDKFGGEHNPPSIYLEAYEEYXSKLDALQQREQQLLESLGNGXDFSVSSSASMDXVXSSSSSSLSVLPSSLSVFQNPXDVARSNPKSPQKPIVRVFLPNKQRXVVPARCGVXVRDSLKKALMMRGLIPECCAVYRIQDGEKKPIGWDXDISWLXGEELHVEVLENVPLXXHNFVRKXFFXLAFCDFCRKLLFQGFRCQXCGYKFHQRCSXEVPLMCVNYDQLDLLFVSKFFEHHPIPQEEASLAEXALXSGSSPSAPASDSIGPQILXSPSPSKSIPIPQPFRPADEDHRNQFGQRDRSSSAPNVHINXIEPVNIDDLIRDQGFRGDGGSXXGLSAXPPASLPGSLXNVKALQKSPGPQRERKSSSSSEDRNRMKXLGRRDSSDDWEIPDGQIXVGQRIGSGSFGXVYKGKWHGDVAVKMLNVXAPXPQQLQAFKNEVGVLRKXRHVNILLFMGYSXKPQLAIVXQWCEGSSLYHHLHIIEXKFEMIKLIDIARQXAQGMDYLHAKSIIHRDLKSNNIFLHEDLXVKIGDFGLAXVKSRWSGSHQFEQLSGSILWMAPEVIRMQDKNPYSFQSDVYAFGIVLYELMXGQLPYSNINNRDQIIFMVGRGYLSPDLSKVRSNCPKAMKRLMAECLKKKRDERPLFPQILASIELLARSLPKIHRSASEPSLNRAGFQXEDFSLYACASPKXPIQAGGYGAFPVH

SEQ ID NO: 4344 - protein, 194 aa, Homo sapiens
  MOD_RES (42)..(42): Selenocysteine
  MOD_RES (71)..(71): Selenocysteine
  MOD_RES (92)..(92): Selenocysteine
  MOD_RES (104)..(104): Selenocysteine
  MOD_RES (106)..(106): Selenocysteine
  MOD_RES (127)..(127): Selenocysteine
  MOD_RES (152)..(152): Selenocysteine
  MOD_RES (161)..(161): Selenocysteine
  MOD_RES (194)..(194): Selenocysteine
QALFNGDMEPEAGAGAGAAASSAADPAIPEEVWNIKQMIKLXQEHIEALLDKFGGEHNPPSIYLEAYEEYXSKLDALQQREQQLLESLGNGXDFSVSSSASMDXVXSSSSSSLSVLPSSLSVFQNPXDVARSNPKSPQKPIVRVFLPNKQRXVVPARCGVXVRDSLKKALMMRGLIPECCAVYRIQDGSFLELX

SEQ ID NO: 4345 - protein, 375 aa, Homo sapiens
  MOD_RES (1)..(1): Any amino acid
  MOD_RES (3)..(4): Selenocysteine
  MOD_RES (9)..(9): Selenocysteine
  MOD_RES (19)..(19): Selenocysteine
  MOD_RES (48)..(48): Selenocysteine
  MOD_RES (66)..(66): Selenocysteine
  MOD_RES (78)..(78): Selenocysteine
  MOD_RES (96)..(96): Selenocysteine
  MOD_RES (99)..(99): Selenocysteine
  MOD_RES (116)..(116): Selenocysteine
  MOD_RES (129)..(129): Selenocysteine
  MOD_RES (137)..(137): Selenocysteine
  MOD_RES (154)..(154): Selenocysteine
  MOD_RES (168)..(168): Selenocysteine
  MOD_RES (197)..(197): Selenocysteine
  MOD_RES (207)..(207): Selenocysteine
  MOD_RES (259)..(259): Selenocysteine
  MOD_RES (348)..(348): Selenocysteine
  MOD_RES (361)..(361): Selenocysteine
XSXXGLSAXPPASLPGSLXNVKALQKSPGPQRERKSSSSSEDRNRMKXLGRRDSSDDWEIPDGQIXVGQRIGSGSFGXVYKGKWHGDVAVKMLNVXAPXPQQLQAFKNEVGVLRKXRHVNILLFMGYSXKPQLAIVXQWCEGSSLYHHLHIIEXKFEMIKLIDIARQXAQGMDYLHAKSIIHRDLKSNNIFLHEDLXVKIGDFGLAXVKSRWSGSHQFEQLSGSILWMAPEVIRMQDKNPYSFQSDVYAFGIVLYELMXGQLPYSNINNRDQIIFMVGRGYLSPDLSKVRSNCPKAMKRLMAECLKKKRDERPLFPQILASIELLARSLPKIHRSASEPSLNRAGFQXEDFSLYACASPKXPIQAGGYGEFAAFK

SEQ ID NO: 4346 - protein, 562 aa, Homo sapiens
  MOD_RES (9)..(10): Selenocysteine
  MOD_RES (40)..(40): Selenocysteine
  MOD_RES (46)..(46): Selenocysteine
  MOD_RES (56)..(57): Selenocysteine
  MOD_RES (69)..(69): Selenocysteine
  MOD_RES (117)..(117): Selenocysteine
  MOD_RES (121)..(121): Selenocysteine
  MOD_RES (137)..(137): Selenocysteine
  MOD_RES (143)..(143): Selenocysteine
  MOD_RES (168)..(168): Selenocysteine
  MOD_RES (190)..(190): Selenocysteine
  MOD_RES (229)..(229): Selenocysteine
  MOD_RES (235)..(235): Selenocysteine
  MOD_RES (250)..(251): Selenocysteine
  MOD_RES (268)..(269): Selenocysteine
  MOD_RES (278)..(278): Selenocysteine
  MOD_RES (322)..(322): Selenocysteine
  MOD_RES (325)..(325): Selenocysteine
  MOD_RES (331)..(331): Selenocysteine
  MOD_RES (352)..(352): Selenocysteine
  MOD_RES (365)..(365): Selenocysteine
  MOD_RES (383)..(383): Selenocysteine
  MOD_RES (404)..(404): Selenocysteine
  MOD_RES (413)..(413): Selenocysteine
  MOD_RES (418)..(418): Selenocysteine
  MOD_RES (444)..(444): Selenocysteine
  MOD_RES (448)..(448): Selenocysteine
  MOD_RES (454)..(454): Selenocysteine
  MOD_RES (488)..(488): Selenocysteine
  MOD_RES (497)..(497): Selenocysteine
  MOD_RES (512)..(512): Selenocysteine
  MOD_RES (523)..(523): Selenocysteine
MSDEEIKKXXLASAVACLEGKSPGEKVAIIHQHLGRREMXDVIIEXMKSNPDELKXXVEERKSSEASPXAQRSKDHSKECINAAPDSPSKQLPDQISFFSGNPSVEIVHGIMHLYKXNKMXSLKEDVRRSAMLCILXVPAAMXSHDLMKFVAPFNEVIEQMKIIRDSXPNQYMVLIKFRAQADADSFYMXCNGRQFNSIEDDVCQLVYVERAEVLKSEDGASLPVMDLXELPKCXVCLERMDESVNGILXXLCNHSFHSQCLQRWDDXXCPVCRYCQXPEPVEENKCFECGVQENLWICLICGHIGCGRYVSRHAYKHFEEXQHXYAMQLXNHRVWDYAGDNYVHRLVASKXDGKIVQYECEGDXCQEEKIDALQLEYSYLLXSQLESQRIYWENKIVRIEKDXAEEINNMKXKFKEXIEKCDNLEHKLNDLLKEKQSVERKCXQLNXKVAKLXNELKEEQEMNKCLRANQVLLQNKLKEEERVLKEXCDQKDLQIXEIQEQLRDVMFYLEXQQKINHLPAEXRQEIQEGQINIAMASASSPASSGGSGKLPSRKGRSKRGK

SEQ ID NO: 4347 - protein, 592 aa, Homo sapiens
  MOD_RES (39)..(40): Selenocysteine
  MOD_RES (70)..(70): Selenocysteine
  MOD_RES (76)..(76): Selenocysteine
  MOD_RES (86)..(87): Selenocysteine
  MOD_RES (99)..(99): Selenocysteine
  MOD_RES (147)..(147): Selenocysteine
  MOD_RES (151)..(151): Selenocysteine
  MOD_RES (167)..(167): Selenocysteine
  MOD_RES (173)..(173): Selenocysteine
  MOD_RES (198)..(198): Selenocysteine
  MOD_RES (220)..(220): Selenocysteine
  MOD_RES (259)..(259): Selenocysteine
  MOD_RES (265)..(265): Selenocysteine
  MOD_RES (280)..(281): Selenocysteine
  MOD_RES (298)..(299): Selenocysteine
  MOD_RES (308)..(308): Selenocysteine
  MOD_RES (352)..(352): Selenocysteine
  MOD_RES (355)..(355): Selenocysteine
  MOD_RES (361)..(361): Selenocysteine
  MOD_RES (382)..(382): Selenocysteine
  MOD_RES (395)..(395): Selenocysteine
  MOD_RES (413)..(413): Selenocysteine
  MOD_RES (434)..(434): Selenocysteine
  MOD_RES (443)..(443): Selenocysteine
  MOD_RES (448)..(448): Selenocysteine
  MOD_RES (474)..(474): Selenocysteine
  MOD_RES (478)..(478): Selenocysteine
  MOD_RES (484)..(484): Selenocysteine
  MOD_RES (518)..(518): Selenocysteine
  MOD_RES (527)..(527): Selenocysteine
  MOD_RES (542)..(542): Selenocysteine
  MOD_RES (553)..(553): Selenocysteine
MSVSLVVIRLELAEHSPVPAGFGFSAAAGEMSDEEIKKXXLASAVACLEGKSPGEKVAIIHQHLGRREMXDVIIEXMKSNPDELKXXVEERKSSEASPXAQRSKDHSKECINAAPDSPSKQLPDQISFFSGNPSVEIVHGIMHLYKXNKMXSLKEDVRRSAMLCILXVPAAMXSHDLMKFVAPFNEVIEQMKIIRDSXPNQYMVLIKFRAQADADSFYMXCNGRQFNSIEDDVCQLVYVERAEVLKSEDGASLPVMDLXELPKCXVCLERMDESVNGILXXLCNHSFHSQCLQRWDDXXCPVCRYCQXPEPVEENKCFECGVQENLWICLICGHIGCGRYVSRHAYKHFEEXQHXYAMQLXNHRVWDYAGDNYVHRLVASKXDGKIVQYECEGDXCQEEKIDALQLEYSYLLXSQLESQRIYWENKIVRIEKDXAEEINNMKXKFKEXIEKCDNLEHKLNDLLKEKQSVERKCXQLNXKVAKLXNELKEEQEMNKCLRANQVLLQNKLKEEERVLKEXCDQKDLQIXEIQEQLRDVMFYLEXQQKINHLPAEXRQEIQEGQINIAMASASSPASSGGSGKLPSRKGRSKRGK

SEQ ID NO: 4348 - protein, 498 aa, Homo sapiens
  MOD_RES (13)..(13): Selenocysteine
  MOD_RES (65)..(65): Selenocysteine
  MOD_RES (76)..(76): Selenocysteine
  MOD_RES (79)..(79): Selenocysteine
  MOD_RES (82)..(82): Selenocysteine
  MOD_RES (91)..(91): Selenocysteine
  MOD_RES (105)..(105): Selenocysteine
  MOD_RES (108)..(108): Selenocysteine
  MOD_RES (110)..(110): Selenocysteine
  MOD_RES (122)..(123): Selenocysteine
  MOD_RES (147)..(147): Selenocysteine
  MOD_RES (164)..(165): Selenocysteine
  MOD_RES (170)..(170): Selenocysteine
  MOD_RES (220)..(220): Selenocysteine
  MOD_RES (227)..(227): Selenocysteine
  MOD_RES (256)..(256): Selenocysteine
  MOD_RES (319)..(319): Selenocysteine
  MOD_RES (321)..(321): Selenocysteine
  MOD_RES (332)..(332): Selenocysteine
  MOD_RES (368)..(368): Selenocysteine
  MOD_RES (390)..(391): Selenocysteine
  MOD_RES (393)..(393): Selenocysteine
  MOD_RES (411)..(411): Selenocysteine
  MOD_RES (414)..(414): Selenocysteine
  MOD_RES (429)..(429): Selenocysteine
  MOD_RES (446)..(446): Selenocysteine
  MOD_RES (448)..(448): Selenocysteine
  MOD_RES (452)..(452): Selenocysteine
  MOD_RES (455)..(456): Selenocysteine
  MOD_RES (462)..(462): Selenocysteine
  MOD_RES (471)..(471): Selenocysteine
  MOD_RES (491)..(491): Selenocysteine
ELLKIICAFQLDXGLEYANSYNFAKKENNSPEHLKDEVSIIQSMGYRNRAKRLLQSEPENPSLEXSLSVQLSNLGXVRXLRXKQRIQPQKXSVYIELAACEFSEXDVXNXEHHQPSNNDLNXXEKRAAERHPEKYQGEAASGCESEXSVSEDCSGLSSQSDILXXQQRDXMQHNLIKLQQEMAELEAVLEQHGSQPSNSYPSIISDSSALEDLRNPEQSXSEKAVLXSQKSSEYPISQNPEGLSADKFEVSADSSXSKNKEPGVERSSPSKCPSLDDRWYMHSCSGSLQNRNYPSQEELIKVVDVEEQQLEESGPHDLXEXSYLPRQDLEGXPYLESGISLFSDDPESDPSEDRAPESARVGNIPSSXSALKVPQLKVAESAQSPAAAHXXDXAGYNAMEESVSREKPELXASXERVNKRMSMVVSGLXPEEFMLVYKFARKHHIXLXNLIXEEXXHVVMKXDAEFVCERXLKYFLGIAGGKWVVSYFWVXQSIKERK

SEQ ID NO: 4349 - protein, 266 aa, Homo sapiens
  MOD_RES (13)..(13): Selenocysteine
  MOD_RES (66)..(66): Selenocysteine
  MOD_RES (77)..(77): Selenocysteine
  MOD_RES (80)..(80): Selenocysteine
  MOD_RES (83)..(83): Selenocysteine
  MOD_RES (92)..(92): Selenocysteine
  MOD_RES (106)..(106): Selenocysteine
  MOD_RES (109)..(109): Selenocysteine
  MOD_RES (111)..(111): Selenocysteine
  MOD_RES (123)..(124): Selenocysteine
  MOD_RES (148)..(148): Selenocysteine
  MOD_RES (165)..(166): Selenocysteine
  MOD_RES (171)..(171): Selenocysteine
  MOD_RES (221)..(221): Selenocysteine
  MOD_RES (228)..(228): Selenocysteine
  MOD_RES (257)..(257): Selenocysteine
ELLKIICAFQLDXGLEYANSYNFAKKENNSPEHLKDEVSIIQSMGYRNRAKRLLQSEPENPSLQEXSLSVQLSNLGXVRXLRXKQRIQPQKXSVYIELAACEFSEXDVXNXEHHQPSNNDLNXXEKRAAERHPEKYQGEAASGCESEXSVSEDCSGLSSQSDILXXQQRDXMQHNLIKLQQEMAELEAVLEQHGSQPSNSYPSIISDSSALEDLRNPEQSXSEKAVLXSQKSSEYPISQNPEGLSADKFEVSADSSXSKNKEPGVE

SEQ ID NO: 4350 - protein, 173 aa, Homo sapiens
  MOD_RES (10)..(10): Selenocysteine
  MOD_RES (30)..(30): Selenocysteine
  MOD_RES (83)..(83): Selenocysteine
  MOD_RES (87)..(87): Selenocysteine
  MOD_RES (109)..(109): Selenocysteine
  MOD_RES (112)..(112): Selenocysteine
  MOD_RES (126)..(126): Selenocysteine
  MOD_RES (144)..(144): Selenocysteine
  MOD_RES (162)..(162): Selenocysteine
MDAEFVCERXLKYFLGIAGGKWVVSYFWVXQSIKERKMLNEHDFEVRGDVVNGRNHQGPKRARESQDRKIFRGLEICCYGPFXNMPXDQLEWMVQLCGASVVKELSSFXLGXGVHPIVVVQPDAWXEDNGFHAIGQMCEAPVVXREWVLDSVALYQCQELDXYLIPQIPHSHY

SEQ ID NO: 4351 - protein, 23 aa, Homo sapiens
MDLSALRVEEVQNVINAMQKILE

SEQ ID NO: 4352 - protein, 63 aa, Homo sapiens
  MOD_RES (37)..(37): Selenocysteine
MDLSALRVEEVQNVINAMQKILECPICLELIKEPVSXKCDHIFCKFCMLKLLNQKKGPSQCPL

SEQ ID NO: 4353 - protein, 222 aa, Homo sapiens
  MOD_RES (37)..(37): Selenocysteine
  MOD_RES (69)..(69): Selenocysteine
  MOD_RES (77)..(77): Selenocysteine
  MOD_RES (97)..(97): Selenocysteine
  MOD_RES (149)..(149): Selenocysteine
  MOD_RES (160)..(160): Selenocysteine
  MOD_RES (163)..(163): Selenocysteine
  MOD_RES (166)..(166): Selenocysteine
  MOD_RES (175)..(175): Selenocysteine
  MOD_RES (189)..(189): Selenocysteine
  MOD_RES (194)..(194): Selenocysteine
  MOD_RES (207)..(207): Selenocysteine
  MOD_RES (211)..(211): Selenocysteine
MDLSALRVEEVQNVINAMQKILECPICLELIKEPVSXKCDHIFCKFCMLKLLNQKKGPSQCPLCKNDIXKRSLQESXRFSQLVEELLKIICAFQLDXGLEYANSYNFAKKENNSPEHLKDEVSIIQSMGYRNRAKRLLQSEPENPSLEXSLSVQLSNLGXVRXLRXKQRIQPQKXSVYIELGSDSSEDXVNKAXYCSVGDQELLQIXPQGXRDEISLDSAKK

SEQ ID NO: 4354 - protein, 623 aa, Homo sapiens
  MOD_RES (37)..(37): Selenocysteine
  MOD_RES (69)..(69): Selenocysteine
  MOD_RES (77)..(77): Selenocysteine
  MOD_RES (97)..(97): Selenocysteine
  MOD_RES (149)..(149): Selenocysteine
  MOD_RES (160)..(160): Selenocysteine
  MOD_RES (163)..(163): Selenocysteine
  MOD_RES (166)..(166): Selenocysteine
  MOD_RES (175)..(175): Selenocysteine
  MOD_RES (189)..(189): Selenocysteine
  MOD_RES (194)..(194): Selenocysteine
  MOD_RES (207)..(207): Selenocysteine
  MOD_RES (211)..(211): Selenocysteine
  MOD_RES (230)..(230): Selenocysteine
  MOD_RES (233)..(233): Selenocysteine
  MOD_RES (235)..(235): Selenocysteine
  MOD_RES (247)..(248): Selenocysteine
  MOD_RES (272)..(272): Selenocysteine
  MOD_RES (289)..(290): Selenocysteine
  MOD_RES (295)..(295): Selenocysteine
  MOD_RES (345)..(345): Selenocysteine
  MOD_RES (352)..(352): Selenocysteine
  MOD_RES (381)..(381): Selenocysteine
  MOD_RES (444)..(444): Selenocysteine
  MOD_RES (446)..(446): Selenocysteine
  MOD_RES (457)..(457): Selenocysteine
  MOD_RES (493)..(493): Selenocysteine
  MOD_RES (515)..(516): Selenocysteine
  MOD_RES (518)..(518): Selenocysteine
  MOD_RES (536)..(536): Selenocysteine
  MOD_RES (539)..(539): Selenocysteine
  MOD_RES (554)..(554): Selenocysteine
  MOD_RES (571)..(571): Selenocysteine
  MOD_RES (573)..(573): Selenocysteine
  MOD_RES (577)..(577): Selenocysteine
  MOD_RES (580)..(581): Selenocysteine
  MOD_RES (587)..(587): Selenocysteine
  MOD_RES (596)..(596): Selenocysteine
  MOD_RES (616)..(616): Selenocysteine
MDLSALRVEEVQNVINAMQKILECPICLELIKEPVSXKCDHIFCKFCMLKLLNQKKGPSQCPLCKNDIXKRSLQESXRFSQLVEELLKIICAFQLDXGLEYANSYNFAKKENNSPEHLKDEVSIIQSMGYRNRAKRLLQSEPENPSLEXSLSVQLSNLGXVRXLRXKQRIQPQKXSVYIELGSDSSEDXVNKAXYCSVGDQELLQIXPQGXRDEISLDSAKKAACEFSEXDVXNXEHHQPSNNDLNXXEKRAAERHPEKYQGEAASGCESEXSVSEDCSGLSSQSDILXXQQRDXMQHNLIKLQQEMAELEAVLEQHGSQPSNSYPSIISDSSALEDLRNPEQSXSEKAVLXSQKSSEYPISQNPEGLSADKFEVSADSSXSKNKEPGVERSSPSKCPSLDDRWYMHSCSGSLQNRNYPSQEELIKVVDVEEQQLEESGPHDLXEXSYLPRQDLEGXPYLESGISLFSDDPESDPSEDRAPESARVGNIPSSXSALKVPQLKVAESAQSPAAAHXXDXAGYNAMEESVSREKPELXASXERVNKRMSMVVSGLXPEEFMLVYKFARKHHIXLXNLIXEEXXHVVMKXDAEFVCERXLKYFLGIAGGKWVVSYFWVXQSIKERK

SEQ ID NO: 4355 - protein, 798 aa, Homo sapiens
  MOD_RES (37)..(37): Selenocysteine
  MOD_RES (69)..(69): Selenocysteine
  MOD_RES (77)..(77): Selenocysteine
  MOD_RES (97)..(97): Selenocysteine
  MOD_RES (150)..(150): Selenocysteine
  MOD_RES (161)..(161): Selenocysteine
  MOD_RES (164)..(164): Selenocysteine
  MOD_RES (167)..(167): Selenocysteine
  MOD_RES (176)..(176): Selenocysteine
  MOD_RES (190)..(190): Selenocysteine
  MOD_RES (193)..(193): Selenocysteine
  MOD_RES (195)..(195): Selenocysteine
  MOD_RES (207)..(208): Selenocysteine
  MOD_RES (235)..(235): Selenocysteine
  MOD_RES (237)..(237): Selenocysteine
  MOD_RES (252)..(252): Selenocysteine
  MOD_RES (286)..(286): Selenocysteine
  MOD_RES (292)..(292): Selenocysteine
  MOD_RES (295)..(295): Selenocysteine
  MOD_RES (326)..(326): Selenocysteine
  MOD_RES (333)..(333): Selenocysteine
  MOD_RES (423)..(423): Selenocysteine
  MOD_RES (437)..(437): Selenocysteine
  MOD_RES (447)..(447): Selenocysteine
  MOD_RES (458)..(458): Selenocysteine
  MOD_RES (468)..(468): Selenocysteine
  MOD_RES (487)..(487): Selenocysteine
  MOD_RES (495)..(495): Selenocysteine
  MOD_RES (498)..(498): Selenocysteine
  MOD_RES (508)..(508): Selenocysteine
  MOD_RES (516)..(516): Selenocysteine
  MOD_RES (541)..(541): Selenocysteine
  MOD_RES (576)..(576): Selenocysteine
  MOD_RES (596)..(596): Selenocysteine
  MOD_RES (635)..(635): Selenocysteine
  MOD_RES (647)..(647): Selenocysteine
  MOD_RES (655)..(655): Selenocysteine
  MOD_RES (662)..(662): Selenocysteine
  MOD_RES (669)..(669): Selenocysteine
  MOD_RES (674)..(674): Selenocysteine
  MOD_RES (696)..(696): Selenocysteine
  MOD_RES (719)..(719): Selenocysteine
  MOD_RES (734)..(734): Selenocysteine
  MOD_RES (738)..(738): Selenocysteine
  MOD_RES (749)..(749): Selenocysteine
  MOD_RES (755)..(755): Selenocysteine
  MOD_RES (785)..(785): Selenocysteine
MDLSALRVEEVQNVINAMQKILECPICLELIKEPVSXKCDHIFCKFCMLKLLNQKKGPSQCPLCKNDIXKRSLQESXRFSQLVEELLKIICAFQLDXGLEYANSYNFAKKENNSPEHLKDEVSIIQSMGYRNRAKRLLQSEPENPSLQEXSLSVQLSNLGXVRXLRXKQRIQPQKXSVYIELAACEFSEXDVXNXEHHQPSNNDLNXXEKRAAERHPEKYQGSSVSNLHVEPCGXNXHASSLQHENSSLLLXKDRMNVEKAEFCNKSKQPGLARSQHNRWAGSKEXCNDRRXPSXEKKVDLNADPLCERKEWNKQKLPCSENPRDXEDVPWIXLNSSIQKVNEWFSRSDELLGSDDSHDGESESNAKVADVLDVLNEVDEYSGSSEKIDLLASDPHEALICKSERVHSKSVESNIEDKIFGKXYRKKASLPNLSHVXENLIIGAFVXEPQIIQERPLXNKLKRKRRPXSGLHPEDFIKKADLAVQKXPEMINQGXNQXEQNGQVMNIXNSGHENKXKGDSIQNEKNPNPIESLEKESAFKXKAEPISSSISNMELELNIHNSKAPKKNRLRRKSSXRHIHALELVVSRNLSPPNCXELQIDSCSSSEEIKKKKYNQMPVRHSRNLQLMEGKEPAXGAKKSNKPNEQXSKRHDSDXFPELKLXNAPGSFXKCSNXSELKEFVNPSLPREEKEEKLEXVKVSNNAEDPKDLMLSGERVLQXERSVESSSISLVPGXDYGXQESISLLEVSXLGKAKXEPNKCVSQCAAFENPKGLIHGCSKDNRNDXEGFKYPLGHEVNH

SEQ ID NO: 4356 - protein, 473 aa, Homo sapiens
  MOD_RES (37)..(37): Selenocysteine
  MOD_RES (69)..(69): Selenocysteine
  MOD_RES (77)..(77): Selenocysteine
  MOD_RES (97)..(97): Selenocysteine
  MOD_RES (150)..(150): Selenocysteine
  MOD_RES (161)..(161): Selenocysteine
  MOD_RES (164)..(164): Selenocysteine
  MOD_RES (167)..(167): Selenocysteine
  MOD_RES (176)..(176): Selenocysteine
  MOD_RES (190)..(190): Selenocysteine
  MOD_RES (195)..(195): Selenocysteine
  MOD_RES (208)..(208): Selenocysteine
  MOD_RES (212)..(212): Selenocysteine
  MOD_RES (231)..(231): Selenocysteine
  MOD_RES (234)..(234): Selenocysteine
  MOD_RES (236)..(236): Selenocysteine
  MOD_RES (248)..(249): Selenocysteine
  MOD_RES (276)..(276): Selenocysteine
  MOD_RES (278)..(278): Selenocysteine
  MOD_RES (293)..(293): Selenocysteine
  MOD_RES (327)..(327): Selenocysteine
  MOD_RES (333)..(333): Selenocysteine
  MOD_RES (336)..(336): Selenocysteine
  MOD_RES (367)..(367): Selenocysteine
  MOD_RES (374)..(374): Selenocysteine
  MOD_RES (464)..(464): Selenocysteine
MDLSALRVEEVQNVINAMQKILECPICLELIKEPVSXKCDHIFCKFCMLKLLNQKKGPSQCPLCKNDIXKRSLQESXRFSQLVEELLKIICAFQLDXGLEYANSYNFAKKENNSPEHLKDEVSIIQSMGYRNRAKRLLQSEPENPSLQEXSLSVQLSNLGXVRXLRXKQRIQPQKXSVYIELGSDSSEDXVNKAXYCSVGDQELLQIXPQGXRDEISLDSAKKAACEFSEXDVXNXEHHQPSNNDLNXXEKRAAERHPEKYQGSSVSNLHVEPCGXNXHASSLQHENSSLLLXKDRMNVEKAEFCNKSKQPGLARSQHNRWAGSKEXCNDRRXPSXEKKVDLNADPLCERKEWNKQKLPCSENPRDXEDVPWIXLNSSIQKVNEWFSRSDELLGSDDSHDGESESNAKVADVLDVLNEVDEYSGSSEKIDLLASDPHEALICKSERVHSKSVESNIEDKIFGKXYRKKASLPN

SEQ ID NO: 4357 - protein, 649 aa, Homo sapiens
  MOD_RES (37)..(37): Selenocysteine
  MOD_RES (69)..(69): Selenocysteine
  MOD_RES (77)..(77): Selenocysteine
  MOD_RES (97)..(97): Selenocysteine
  MOD_RES (150)..(150): Selenocysteine
  MOD_RES (161)..(161): Selenocysteine
  MOD_RES (164)..(164): Selenocysteine
  MOD_RES (167)..(167): Selenocysteine
  MOD_RES (176)..(176): Selenocysteine
  MOD_RES (190)..(190): Selenocysteine
  MOD_RES (195)..(195): Selenocysteine
  MOD_RES (208)..(208): Selenocysteine
  MOD_RES (212)..(212): Selenocysteine
  MOD_RES (231)..(231): Selenocysteine
  MOD_RES (234)..(234): Selenocysteine
  MOD_RES (236)..(236): Selenocysteine
  MOD_RES (248)..(249): Selenocysteine
  MOD_RES (276)..(276): Selenocysteine
  MOD_RES (278)..(278): Selenocysteine
  MOD_RES (293)..(293): Selenocysteine
  MOD_RES (327)..(327): Selenocysteine
  MOD_RES (333)..(333): Selenocysteine
  MOD_RES (336)..(336): Selenocysteine
  MOD_RES (367)..(367): Selenocysteine
  MOD_RES (374)..(374): Selenocysteine
  MOD_RES (464)..(464): Selenocysteine
  MOD_RES (478)..(478): Selenocysteine
  MOD_RES (488)..(488): Selenocysteine
  MOD_RES (499)..(499): Selenocysteine
  MOD_RES (509)..(509): Selenocysteine
  MOD_RES (528)..(528): Selenocysteine
  MOD_RES (536)..(536): Selenocysteine
  MOD_RES (539)..(539): Selenocysteine
  MOD_RES (549)..(549): Selenocysteine
  MOD_RES (557)..(557): Selenocysteine
  MOD_RES (582)..(582): Selenocysteine
  MOD_RES (617)..(617): Selenocysteine
  MOD_RES (637)..(637): Selenocysteine
MDLSALRVEEVQNVINAMQKILECPICLELIKEPVSXKCDHIFCKFCMLKLLNQKKGPSQCPLCKNDIXKRSLQESXRFSQLVEELLKIICAFQLDXGLEYANSYNFAKKENNSPEHLKDEVSIIQSMGYRNRAKRLLQSEPENPSLQEXSLSVQLSNLGXVRXLRXKQRIQPQKXSVYIELGSDSSEDXVNKAXYCSVGDQELLQIXPQGXRDEISLDSAKKAACEFSEXDVXNXEHHQPSNNDLNXXEKRAAERHPEKYQGSSVSNLHVEPCGXNXHASSLQHENSSLLLXKDRMNVEKAEFCNKSKQPGLARSQHNRWAGSKEXCNDRRXPSXEKKVDLNADPLCERKEWNKQKLPCSENPRDXEDVPWIXLNSSIQKVNEWFSRSDELLGSDDSHDGESESNAKVADVLDVLNEVDEYSGSSEKIDLLASDPHEALICKSERVHSKSVESNIEDKIFGKXYRKKASLPNLSHVXENLIIGAFVXEPQIIQERPLXNKLKRKRRPXSGLHPEDFIKKADLAVQKXPEMINQGXNQXEQNGQVMNIXNSGHENKXKGDSIQNEKNPNPIESLEKESAFKXKAEPISSSISNMELELNIHNSKAPKKNRLRRKSSXRHIHALELVVSRNLSPPNCXELQIDSCSSSEE

SEQ ID NO: 4358 - protein, 699 aa, Homo sapiens
  MOD_RES (37)..(37): Selenocysteine
  MOD_RES (69)..(69): Selenocysteine
  MOD_RES (77)..(77): Selenocysteine
  MOD_RES (97)..(97): Selenocysteine
  MOD_RES (150)..(150): Selenocysteine
  MOD_RES (161)..(161): Selenocysteine
  MOD_RES (164)..(164): Selenocysteine
  MOD_RES (167)..(167): Selenocysteine
  MOD_RES (176)..(176): Selenocysteine
  MOD_RES (190)..(190): Selenocysteine
  MOD_RES (195)..(195): Selenocysteine
  MOD_RES (208)..(208): Selenocysteine
  MOD_RES (212)..(212): Selenocysteine
  MOD_RES (231)..(231): Selenocysteine
  MOD_RES (234)..(234): Selenocysteine
  MOD_RES (236)..(236): Selenocysteine
  MOD_RES (248)..(249): Selenocysteine
  MOD_RES (273)..(273): Selenocysteine
  MOD_RES (290)..(291): Selenocysteine
  MOD_RES (296)..(296): Selenocysteine
  MOD_RES (346)..(346): Selenocysteine
  MOD_RES (352)..(352): Selenocysteine
  MOD_RES (381)..(381): Selenocysteine
  MOD_RES (444)..(444): Selenocysteine
  MOD_RES (446)..(446): Selenocysteine
  MOD_RES (457)..(457): Selenocysteine
  MOD_RES (493)..(493): Selenocysteine
  MOD_RES (515)..(516): Selenocysteine
  MOD_RES (518)..(518): Selenocysteine
  MOD_RES (536)..(536): Selenocysteine
  MOD_RES (539)..(539): Selenocysteine
  MOD_RES (554)..(554): Selenocysteine
  MOD_RES (571)..(571): Selenocysteine
  MOD_RES (573)..(573): Selenocysteine
  MOD_RES (577)..(577): Selenocysteine
  MOD_RES (580)..(581): Selenocysteine
  MOD_RES (587)..(587): Selenocysteine
  MOD_RES (596)..(596): Selenocysteine
  MOD_RES (616)..(616): Selenocysteine
  MOD_RES (669)..(669): Selenocysteine
  MOD_RES (673)..(673): Selenocysteine
MDLSALRVEEVQNVINAMQKILECPICLELIKEPVSXKCDHIFCKFCMLKLLNQKKGPSQCPLCKNDIXKRSLQESXRFSQLVEELLKIICAFQLDXGLEYANSYNFAKKENNSPEHLKDEVSIIQSMGYRNRAKRLLQSEPENPSLQEXSLSVQLSNLGXVRXLRXKQRIQPQKXSVYIELGSDSSEDXVNKAXYCSVGDQELLQIXPQGXRDEISLDSAKKAACEFSEXDVXNXEHHQPSNNDLNXXEKRAAERHPEKYQGEAASGCESEXSVSEDCSGLSSQSDILXXQQRDXMQHNLIKLQQEMAELEAVLEQHGSQPSNSYPSIISDSSALEDLRNPEQSXSEKVLXSQKSSEYPISQNPEGLSADKFEVSADSSXSKNKEPGVERSSPSKCPSLDDRWYMHSCSGSLQNRNYPSQEELIKVVDVEEQQLEESGPHDLXEXSYLPRQDLEGXPYLESGISLFSDDPESDPSEDRAPESARVGNIPSSXSALKVPQLKVAESAQSPAAAHXXDXAGYNAMEESVSREKPELXASXERVNKRMSMVVSGLXPEEFMLVYKFARKHHIXLXNLIXEEXXHVVMKXDAEFVCERXLKYFLGIAGGKWVVSYFWVXQSIKERKMLNEHDFEVRGDVVNGRNHQGPKRARESQDRKIFRGLEICCYGPFXNMPXGCPPNCGCAARCLDRGQWLPCNWADV

SEQ ID NO: 4359 - protein, 759 aa, Homo sapiens
  MOD_RES (37)..(37): Selenocysteine
  MOD_RES (69)..(69): Selenocysteine
  MOD_RES (77)..(77): Selenocysteine
  MOD_RES (97)..(97): Selenocysteine
  MOD_RES (150)..(150): Selenocysteine
  MOD_RES (161)..(161): Selenocysteine
  MOD_RES (164)..(164): Selenocysteine
  MOD_RES (167)..(167): Selenocysteine
  MOD_RES (176)..(176): Selenocysteine
  MOD_RES (190)..(190): Selenocysteine
  MOD_RES (195)..(195): Selenocysteine
  MOD_RES (208)..(208): Selenocysteine
  MOD_RES (212)..(212): Selenocysteine
  MOD_RES (231)..(231): Selenocysteine
  MOD_RES (234)..(234): Selenocysteine
  MOD_RES (236)..(236): Selenocysteine
  MOD_RES (248)..(249): Selenocysteine
  MOD_RES (273)..(273): Selenocysteine
  MOD_RES (290)..(291): Selenocysteine
  MOD_RES (296)..(296): Selenocysteine
  MOD_RES (346)..(346): Selenocysteine
  MOD_RES (352)..(352): Selenocysteine
  MOD_RES (381)..(381): Selenocysteine
  MOD_RES (444)..(444): Selenocysteine
  MOD_RES (446)..(446): Selenocysteine
  MOD_RES (457)..(457): Selenocysteine
  MOD_RES (493)..(493): Selenocysteine
  MOD_RES (515)..(516): Selenocysteine
  MOD_RES (518)..(518): Selenocysteine
  MOD_RES (536)..(536): Selenocysteine
  MOD_RES (539)..(539): Selenocysteine
  MOD_RES (554)..(554): Selenocysteine
  MOD_RES (571)..(571): Selenocysteine
  MOD_RES (573)..(573): Selenocysteine
  MOD_RES (577)..(577): Selenocysteine
  MOD_RES (580)..(581): Selenocysteine
  MOD_RES (587)..(587): Selenocysteine
  MOD_RES (596)..(596): Selenocysteine
  MOD_RES (616)..(616): Selenocysteine
  MOD_RES (669)..(669): Selenocysteine
  MOD_RES (673)..(673): Selenocysteine
  MOD_RES (695)..(695): Selenocysteine
  MOD_RES (698)..(698): Selenocysteine
  MOD_RES (712)..(712): Selenocysteine
  MOD_RES (730)..(730): Selenocysteine
  MOD_RES (748)..(748): Selenocysteine
MDLSALRVEEVQNVINAMQKILECPICLELIKEPVSXKCDHIFCKFCMLKLLNQKKGPSQCPLCKNDIXKRSLQESXRFSQLVEELLKIICAFQLDXGLEYANSYNFAKKENNSPEHLKDEVSIIQSMGYRNRAKRLLQSEPENPSLQEXSLSVQLSNLGXVRXLRXKQRIQPQKXSVYIELGSDSSEDXVNKAXYCSVGDQELLQIXPQGXRDEISLDSAKKAACEFSEXDVXNXEHHQPSNNDLNXXEKRAAERHPEKYQGEAASGCESEXSVSEDCSGLSSQSDILXXQQRDXMQHNLIKLQQEMAELEAVLEQHGSQPSNSYPSIISDSSALEDLRNPEQSXSEKVLXSQKSSEYPISQNPEGLSADKFEVSADSSXSKNKEPGVERSSPSKCPSLDDRWYMHSCSGSLQNRNYPSQEELIKVVDVEEQQLEESGPHDLXEXSYLPRQDLEGXPYLESGISLFSDDPESDPSEDRAPESARVGNIPSSXSALKVPQLKVAESAQSPAAAHXXDXAGYNAMEESVSREKPELXASXERVNKRMSMVVSGLXPEEFMLVYKFARKHHIXLXNLIXEEXXHVVMKXDAEFVCERXLKYFLGIAGGKWVVSYFWVXQSIKERKMLNEHDFEVRGDVVNGRNHQGPKRARESQDRKIFRGLEICCYGPFXNMPXDQLEWMVQLCGASVVKELSSFXLGXGVHPIVVVQPDAWXEDNGFHAIGQMCEAPVVXREWVLDSVALYQCQELDXYLIPQIPHSHY

SEQ ID NO: 4360 - protein, 1399 aa, Homo sapiens
  MOD_RES (37)..(37): Selenocysteine
  MOD_RES (69)..(69): Selenocysteine
  MOD_RES (77)..(77): Selenocysteine
  MOD_RES (97)..(97): Selenocysteine
  MOD_RES (150)..(150): Selenocysteine
  MOD_RES (161)..(161): Selenocysteine
  MOD_RES (164)..(164): Selenocysteine
  MOD_RES (167)..(167): Selenocysteine
  MOD_RES (176)..(176): Selenocysteine
  MOD_RES (190)..(190): Selenocysteine
  MOD_RES (195)..(195): Selenocysteine
  MOD_RES (208)..(208): Selenocysteine
  MOD_RES (212)..(212): Selenocysteine
  MOD_RES (231)..(231): Selenocysteine
  MOD_RES (234)..(234): Selenocysteine
  MOD_RES (236)..(236): Selenocysteine
  MOD_RES (248)..(249): Selenocysteine
  MOD_RES (276)..(276): Selenocysteine
  MOD_RES (278)..(278): Selenocysteine
  MOD_RES (293)..(293): Selenocysteine
  MOD_RES (327)..(327): Selenocysteine
  MOD_RES (333)..(333): Selenocysteine
  MOD_RES (336)..(336): Selenocysteine
  MOD_RES (367)..(367): Selenocysteine
  MOD_RES (374)..(374): Selenocysteine
  MOD_RES (464)..(464): Selenocysteine
  MOD_RES (478)..(478): Selenocysteine
  MOD_RES (488)..(488): Selenocysteine
  MOD_RES (499)..(499): Selenocysteine
  MOD_RES (509)..(509): Selenocysteine
  MOD_RES (528)..(528): Selenocysteine
  MOD_RES (536)..(536): Selenocysteine
  MOD_RES (539)..(539): Selenocysteine
  MOD_RES (549)..(549): Selenocysteine
  MOD_RES (557)..(557): Selenocysteine
  MOD_RES (582)..(582): Selenocysteine
  MOD_RES (617)..(617): Selenocysteine
  MOD_RES (637)..(637): Selenocysteine
  MOD_RES (676)..(676): Selenocysteine
  MOD_RES (688)..(688): Selenocysteine
  MOD_RES (696)..(696): Selenocysteine
  MOD_RES (703)..(703): Selenocysteine
  MOD_RES (710)..(710): Selenocysteine
  MOD_RES (715)..(715): Selenocysteine
  MOD_RES (737)..(737): Selenocysteine
  MOD_RES (760)..(760): Selenocysteine
  MOD_RES (775)..(775): Selenocysteine
  MOD_RES (779)..(779): Selenocysteine
  MOD_RES (790)..(790): Selenocysteine
  MOD_RES (796)..(796): Selenocysteine
  MOD_RES (826)..(826): Selenocysteine
  MOD_RES (843)..(843): Selenocysteine
  MOD_RES (860)..(860): Selenocysteine
  MOD_RES (884)..(884): Selenocysteine
  MOD_RES (900)..(900): Selenocysteine
  MOD_RES (922)..(922): Selenocysteine
  MOD_RES (926)..(926): Selenocysteine
  MOD_RES (963)..(963): Selenocysteine
  MOD_RES (967)..(967): Selenocysteine
  MOD_RES (992)..(992): Selenocysteine
  MOD_RES (1022)..(1022): Selenocysteine
  MOD_RES (1025)..(1025): Selenocysteine
  MOD_RES (1051)..(1051): Selenocysteine
  MOD_RES (1119)..(1119): Selenocysteine
  MOD_RES (1122)..(1122): Selenocysteine
  MOD_RES (1149)..(1149): Selenocysteine
  MOD_RES (1163)..(1163): Selenocysteine
  MOD_RES (1194)..(1194): Selenocysteine
  MOD_RES (1196)..(1196): Selenocysteine
  MOD_RES (1242)..(1242): Selenocysteine
  MOD_RES (1246)..(1246): Selenocysteine
  MOD_RES (1249)..(1249): Selenocysteine
  MOD_RES (1256)..(1256): Selenocysteine
  MOD_RES (1289)..(1289): Selenocysteine
  MOD_RES (1307)..(1307): Selenocysteine
  MOD_RES (1310)..(1310): Selenocysteine
  MOD_RES (1312)..(1312): Selenocysteine
  MOD_RES (1349)..(1349): Selenocysteine
  MOD_RES (1369)..(1369): Selenocysteine
MDLSALRVEEVQNVINAMQKILECPICLELIKEPVSXKCDHIFCKFCMLKLLNQKKGPSQCPLCKNDIXKRSLQESXRFSQLVEELLKIICAFQLDXGLEYANSYNFAKKENNSPEHLKDEVSIIQSMGYRNRAKRLLQSEPENPSLQEXSLSVQLSNLGXVRXLRXKQRIQPQKXSVYIELGSDSSEDXVNKAXYCSVGDQELLQIXPQGXRDEISLDSAKKAACEFSEXDVXNXEHHQPSNNDLNXXEKRAAERHPEKYQGSSVSNLHVEPCGXNXHASSLQHENSSLLLXKDRMNVEKAEFCNKSKQPGLARSQHNRWAGSKEXCNDRRXPSXEKKVDLNADPLCERKEWNKQKLPCSENPRDXEDVPWIXLNSSIQKVNEWFSRSDELLGSDDSHDGESESNAKVADVLDVLNEVDEYSGSSEKIDLLASDPHEALICKSERVHSKSVESNIEDKIFGKXYRKKASLPNLSHVXENLIIGAFVXEPQIIQERPLXNKLKRKRRPXSGLHPEDFIKKADLAVQKXPEMINQGXNQXEQNGQVMNIXNSGHENKXKGDSIQNEKNPNPIESLEKESAFKXKAEPISSSISNMELELNIHNSKAPKKNRLRRKSSXRHIHALELVVSRNLSPPNCXELQIDSCSSSEEIKKKKYNQMPVRHSRNLQLMEGKEPAXGAKKSNKPNEQXSKRHDSDXFPELKLXNAPGSFXKCSNXSELKEFVNPSLPREEKEEKLEXVKVSNNAEDPKDLMLSGERVLQXERSVESSSISLVPGXDYGXQESISLLEVSXLGKAKXEPNKCVSQCAAFENPKGLIHGCSKDNRNDXEGFKYPLGHEVNHSREXSIEMEESELDAQYLQNXFKVSKRQSFAPFSNPGNAEEECAXFSAHSGSLKKQSPKVXFECEQKEENQGKNESNIKPVQXVNIXAGFPVVGQKDKPVDNAKCSIKGGSRFCLSSQFRGNEXGLIXPNKHGLLQNPYRIPPLFPIKSFVKXKCKKNLLEENFEEHSMSPEREMGNENIPSXVSXISRNNIRENVFKEASSSNINEVGSSXNEVGSSINEIGSSDENIQAELGRNRGPKLNAMLRLGVLQPEVYKQSLPGSNCKHPEIKKQEYEEVVQXVNXDFSPYLISDNLEQPMGSSHASQVCSEXPDDLLDDGEIKEDXSFAENDIKESSAVFSKSVQKGELSRSPSPFXHXHLAQGYRRGAKKLESSEENLSSEDEELPCFQHLLFGKVNNIPSQSXRHSXVAXECLSKNXEENLLSLKNSLNDCSNQVILAKASQEHHLSEEXKCSASLFSSQCSELEDLXANXNXQDPFLIGSSKQMRHQSESQGVGLSDKELVSDDEERGXGLEENNQEEQSMDSNLGIGXRFLCLPQSIYRSELNVYAFGEHILQISKYS

SEQ ID NO: 4361 - protein, 1863 aa, Homo sapiens
  MOD_RES (37)..(37): Selenocysteine
  MOD_RES (69)..(69): Selenocysteine
  MOD_RES (77)..(77): Selenocysteine
  MOD_RES (97)..(97): Selenocysteine
  MOD_RES (150)..(150): Selenocysteine
  MOD_RES (161)..(161): Selenocysteine
  MOD_RES (164)..(164): Selenocysteine
  MOD_RES (167)..(167): Selenocysteine
  MOD_RES (176)..(176): Selenocysteine
  MOD_RES (190)..(190): Selenocysteine
  MOD_RES (195)..(195): Selenocysteine
  MOD_RES (208)..(208): Selenocysteine
  MOD_RES (212)..(212): Selenocysteine
  MOD_RES (231)..(231): Selenocysteine
  MOD_RES (234)..(234): Selenocysteine
  MOD_RES (236)..(236): Selenocysteine
  MOD_RES (248)..(249): Selenocysteine
  MOD_RES (276)..(276): Selenocysteine
  MOD_RES (278)..(278): Selenocysteine
  MOD_RES (293)..(293): Selenocysteine
  MOD_RES (327)..(327): Selenocysteine
  MOD_RES (333)..(333): Selenocysteine
  MOD_RES (336)..(336): Selenocysteine
  MOD_RES (367)..(367): Selenocysteine
  MOD_RES (374)..(374): Selenocysteine
  MOD_RES (464)..(464): Selenocysteine
  MOD_RES (478)..(478): Selenocysteine
  MOD_RES (488)..(488): Selenocysteine
  MOD_RES (499)..(499): Selenocysteine
  MOD_RES (509)..(509): Selenocysteine
  MOD_RES (528)..(528): Selenocysteine
  MOD_RES (536)..(536): Selenocysteine
  MOD_RES (539)..(539): Selenocysteine
  MOD_RES (549)..(549): Selenocysteine
  MOD_RES (557)..(557): Selenocysteine
  MOD_RES (582)..(582): Selenocysteine
  MOD_RES (617)..(617): Selenocysteine
  MOD_RES (637)..(637): Selenocysteine
  MOD_RES (676)..(676): Selenocysteine
  MOD_RES (688)..(688): Selenocysteine
  MOD_RES (696)..(696): Selenocysteine
  MOD_RES (703)..(703): Selenocysteine
  MOD_RES (710)..(710): Selenocysteine
  MOD_RES (715)..(715): Selenocysteine
  MOD_RES (737)..(737): Selenocysteine
  MOD_RES (760)..(760): Selenocysteine
  MOD_RES (775)..(775): Selenocysteine
  MOD_RES (779)..(779): Selenocysteine
  MOD_RES (790)..(790): Selenocysteine
  MOD_RES (796)..(796): Selenocysteine
  MOD_RES (826)..(826): Selenocysteine
  MOD_RES (843)..(843): Selenocysteine
  MOD_RES (860)..(860): Selenocysteine
  MOD_RES (884)..(884): Selenocysteine
  MOD_RES (900)..(900): Selenocysteine
  MOD_RES (922)..(922): Selenocysteine
  MOD_RES (926)..(926): Selenocysteine
  MOD_RES (963)..(963): Selenocysteine
  MOD_RES (967)..(967): Selenocysteine
  MOD_RES (992)..(992): Selenocysteine
  MOD_RES (1022)..(1022): Selenocysteine
  MOD_RES (1025)..(1025): Selenocysteine
  MOD_RES (1051)..(1051): Selenocysteine
  MOD_RES (1119)..(1119): Selenocysteine
  MOD_RES (1122)..(1122): Selenocysteine
  MOD_RES (1149)..(1149): Selenocysteine
  MOD_RES (1163)..(1163): Selenocysteine
  MOD_RES (1194)..(1194): Selenocysteine
  MOD_RES (1196)..(1196): Selenocysteine
  MOD_RES (1242)..(1242): Selenocysteine
  MOD_RES (1246)..(1246): Selenocysteine
  MOD_RES (1249)..(1249): Selenocysteine
  MOD_RES (1256)..(1256): Selenocysteine
  MOD_RES (1289)..(1289): Selenocysteine
  MOD_RES (1307)..(1307): Selenocysteine
  MOD_RES (1310)..(1310): Selenocysteine
  MOD_RES (1312)..(1312): Selenocysteine
  MOD_RES (1349)..(1349): Selenocysteine
  MOD_RES (1376)..(1376): Selenocysteine
  MOD_RES (1393)..(1394): Selenocysteine
  MOD_RES (1399)..(1399): Selenocysteine
  MOD_RES (1449)..(1449): Selenocysteine
  MOD_RES (1456)..(1456): Selenocysteine
  MOD_RES (1485)..(1485): Selenocysteine
  MOD_RES (1548)..(1548): Selenocysteine
  MOD_RES (1550)..(1550): Selenocysteine
  MOD_RES (1561)..(1561): Selenocysteine
  MOD_RES (1597)..(1597): Selenocysteine
  MOD_RES (1619)..(1620): Selenocysteine
  MOD_RES (1622)..(1622): Selenocysteine
  MOD_RES (1640)..(1640): Selenocysteine
  MOD_RES (1643)..(1643): Selenocysteine
  MOD_RES (1658)..(1658): Selenocysteine
  MOD_RES (1675)..(1675): Selenocysteine
  MOD_RES (1677)..(1677): Selenocysteine
  MOD_RES (1681)..(1681): Selenocysteine
  MOD_RES (1684)..(1685): Selenocysteine
  MOD_RES (1691)..(1691): Selenocysteine
  MOD_RES (1700)..(1700): Selenocysteine
  MOD_RES (1720)..(1720): Selenocysteine
  MOD_RES (1773)..(1773): Selenocysteine
  MOD_RES (1777)..(1777): Selenocysteine
  MOD_RES (1799)..(1799): Selenocysteine
  MOD_RES (1802)..(1802): Selenocysteine
  MOD_RES (1816)..(1816): Selenocysteine
  MOD_RES (1834)..(1834): Selenocysteine
  MOD_RES (1852)..(1852): Selenocysteine
MDLSALRVEEVQNVINAMQKILECPICLELIKEPVSXKCDHIFCKFCMLKLLNQKKGPSQCPLCKNDIXKRSLQESXRFSQLVEELLKIICAFQLDXGLEYANSYNFAKKENNSPEHLKDEVSIIQSMGYRNRAKRLLQSEPENPSLQEXSLSVQLSNLGXVRXLRXKQRIQPQKXSVYIELGSDSSEDXVNKAXYCSVGDQELLQIXPQGXRDEISLDSAKKAACEFSEXDVXNXEHHQPSNNDLNXXEKRAAERHPEKYQGSSVSNLHVEPCGXNXHASSLQHENSSLLLXKDRMNVEKAEFCNKSKQPGLARSQHNRWAGSKEXCNDRRXPSXEKKVDLNADPLCERKEWNKQKLPCSENPRDXEDVPWIXLNSSIQKVNEWFSRSDELLGSDDSHDGESESNAKVADVLDVLNEVDEYSGSSEKIDLLASDPHEALICKSERVHSKSVESNIEDKIFGKXYRKKASLPNLSHVXENLIIGAFVXEPQIIQERPLXNKLKRKRRPXSGLHPEDFIKKADLAVQKXPEMINQGXNQXEQNGQVMNIXNSGHENKXKGDSIQNEKNPNPIESLEKESAFKXKAEPISSSISNMELELNIHNSKAPKKNRLRRKSSXRHIHALELVVSRNLSPPNCXELQIDSCSSSEEIKKKKYNQMPVRHSRNLQLMEGKEPAXGAKKSNKPNEQXSKRHDSDXFPELKLXNAPGSFXKCSNXSELKEFVNPSLPREEKEEKLEXVKVSNNAEDPKDLMLSGERVLQXERSVESSSISLVPGXDYGXQESISLLEVSXLGKAKXEPNKCVSQCAAFENPKGLIHGCSKDNRNDXEGFKYPLGHEVNHSREXSIEMEESELDAQYLQNXFKVSKRQSFAPFSNPGNAEEECAXFSAHSGSLKKQSPKVXFECEQKEENQGKNESNIKPVQXVNIXAGFPVVGQKDKPVDNAKCSIKGGSRFCLSSQFRGNEXGLIXPNKHGLLQNPYRIPPLFPIKSFVKXKCKKNLLEENFEEHSMSPEREMGNENIPSXVSXISRNNIRENVFKEASSSNINEVGSSXNEVGSSINEIGSSDENIQAELGRNRGPKLNAMLRLGVLQPEVYKQSLPGSNCKHPEIKKQEYEEVVQXVNXDFSPYLISDNLEQPMGSSHASQVCSEXPDDLLDDGEIKEDXSFAENDIKESSAVFSKSVQKGELSRSPSPFXHXHLAQGYRRGAKKLESSEENLSSEDEELPCFQHLLFGKVNNIPSQSXRHSXVAXECLSKNXEENLLSLKNSLNDCSNQVILAKASQEHHLSEEXKCSASLFSSQCSELEDLXANXNXQDPFLIGSSKQMRHQSESQGVGLSDKELVSDDEERGXGLEENNQEEQSMDSNLGEAASGCESEXSVSEDCSGLSSQSDILXXQQRDXMQHNLIKLQQEMAELEAVLEQHGSQPSNSYPSIISDSSALEDLRNPEQSXSEKAVLXSQKSSEYPISQNPEGLSADKFEVSADSSXSKNKEPGVERSSPSKCPSLDDRWYMHSCSGSLQNRNYPSQEELIKVVDVEEQQLEESGPHDLXEXSYLPRQDLEGXPYLESGISLFSDDPESDPSEDRAPESARVGNIPSSXSALKVPQLKVAESAQSPAAAHXXDXAGYNAMEESVSREKPELXASXERVNKRMSMVVSGLXPEEFMLVYKFARKHHIXLXNLIXEEXXHVVMKXDAEFVCERXLKYFLGIAGGKWVVSYFWVXQSIKERKMLNEHDFEVRGDVVNGRNHQGPKRARESQDRKIFRGLEICCYGPFXNMPXDQLEWMVQLCGASVVKELSSFXLGXGVHPIVVVQPDAWXEDNGFHAIGQMCEAPVVXREWVLDSVALYQCQELDXYLIPQIPHSHY

SEQ ID NO: 4362 - protein, 1884 aa, Homo sapiens
  MOD_RES (37)..(37): Selenocysteine
  MOD_RES (69)..(69): Selenocysteine
  MOD_RES (77)..(77): Selenocysteine
  MOD_RES (97)..(97): Selenocysteine
  MOD_RES (150)..(150): Selenocysteine
  MOD_RES (161)..(161): Selenocysteine
  MOD_RES (164)..(164): Selenocysteine
  MOD_RES (167)..(167): Selenocysteine
  MOD_RES (176)..(176): Selenocysteine
  MOD_RES (190)..(190): Selenocysteine
  MOD_RES (195)..(195): Selenocysteine
  MOD_RES (208)..(208): Selenocysteine
  MOD_RES (212)..(212): Selenocysteine
  MOD_RES (231)..(231): Selenocysteine
  MOD_RES (234)..(234): Selenocysteine
  MOD_RES (236)..(236): Selenocysteine
  MOD_RES (248)..(249): Selenocysteine
  MOD_RES (276)..(276): Selenocysteine
  MOD_RES (278)..(278): Selenocysteine
  MOD_RES (293)..(293): Selenocysteine
  MOD_RES (327)..(327): Selenocysteine
  MOD_RES (333)..(333): Selenocysteine
  MOD_RES (336)..(336): Selenocysteine
  MOD_RES (367)..(367): Selenocysteine
  MOD_RES (374)..(374): Selenocysteine
  MOD_RES (464)..(464): Selenocysteine
  MOD_RES (478)..(478): Selenocysteine
  MOD_RES (488)..(488): Selenocysteine
  MOD_RES (499)..(499): Selenocysteine
  MOD_RES (509)..(509): Selenocysteine
  MOD_RES (528)..(528): Selenocysteine
  MOD_RES (536)..(536): Selenocysteine
  MOD_RES (539)..(539): Selenocysteine
  MOD_RES (549)..(549): Selenocysteine
  MOD_RES (557)..(557): Selenocysteine
  MOD_RES (582)..(582): Selenocysteine
  MOD_RES (617)..(617): Selenocysteine
  MOD_RES (637)..(637): Selenocysteine
  MOD_RES (676)..(676): Selenocysteine
  MOD_RES (688)..(688): Selenocysteine
  MOD_RES (696)..(696): Selenocysteine
  MOD_RES (703)..(703): Selenocysteine
  MOD_RES (710)..(710): Selenocysteine
  MOD_RES (715)..(715): Selenocysteine
  MOD_RES (737)..(737): Selenocysteine
  MOD_RES (760)..(760): Selenocysteine
  MOD_RES (775)..(775): Selenocysteine
  MOD_RES (779)..(779): Selenocysteine
  MOD_RES (790)..(790): Selenocysteine
  MOD_RES (796)..(796): Selenocysteine
  MOD_RES (826)..(826): Selenocysteine
  MOD_RES (843)..(843): Selenocysteine
  MOD_RES (860)..(860): Selenocysteine
  MOD_RES (884)..(884): Selenocysteine
  MOD_RES (900)..(900): Selenocysteine
  MOD_RES (922)..(922): Selenocysteine
  MOD_RES (926)..(926): Selenocysteine
  MOD_RES (963)..(963): Selenocysteine
  MOD_RES (967)..(967): Selenocysteine
  MOD_RES (992)..(992): Selenocysteine
  MOD_RES (1022)..(1022): Selenocysteine
  MOD_RES (1025)..(1025): Selenocysteine
  MOD_RES (1051)..(1051): Selenocysteine
  MOD_RES (1119)..(1119): Selenocysteine
  MOD_RES (1122)..(1122): Selenocysteine
  MOD_RES (1149)..(1149): Selenocysteine
  MOD_RES (1163)..(1163): Selenocysteine
  MOD_RES (1194)..(1194): Selenocysteine
  MOD_RES (1196)..(1196): Selenocysteine
  MOD_RES (1242)..(1242): Selenocysteine
  MOD_RES (1246)..(1246): Selenocysteine
  MOD_RES (1249)..(1249): Selenocysteine
  MOD_RES (1256)..(1256): Selenocysteine
  MOD_RES (1289)..(1289): Selenocysteine
  MOD_RES (1307)..(1307): Selenocysteine
  MOD_RES (1310)..(1310): Selenocysteine
  MOD_RES (1312)..(1312): Selenocysteine
  MOD_RES (1349)..(1349): Selenocysteine
  MOD_RES (1376)..(1376): Selenocysteine
  MOD_RES (1393)..(1394): Selenocysteine
  MOD_RES (1399)..(1399): Selenocysteine
  MOD_RES (1449)..(1449): Selenocysteine
  MOD_RES (1477)..(1477): Selenocysteine
  MOD_RES (1506)..(1506): Selenocysteine
  MOD_RES (1569)..(1569): Selenocysteine
  MOD_RES (1571)..(1571): Selenocysteine
  MOD_RES (1582)..(1582): Selenocysteine
  MOD_RES (1618)..(1618): Selenocysteine
  MOD_RES (1640)..(1641): Selenocysteine
  MOD_RES (1643)..(1643): Selenocysteine
  MOD_RES (1661)..(1661): Selenocysteine
  MOD_RES (1664)..(1664): Selenocysteine
  MOD_RES (1679)..(1679): Selenocysteine
  MOD_RES (1696)..(1696): Selenocysteine
  MOD_RES (1698)..(1698): Selenocysteine
  MOD_RES (1702)..(1702): Selenocysteine
  MOD_RES (1705)..(1706): Selenocysteine
  MOD_RES (1712)..(1712): Selenocysteine
  MOD_RES (1721)..(1721): Selenocysteine
  MOD_RES (1741)..(1741): Selenocysteine
  MOD_RES (1794)..(1794): Selenocysteine
  MOD_RES (1798)..(1798): Selenocysteine
  MOD_RES (1820)..(1820): Selenocysteine
  MOD_RES (1823)..(1823): Selenocysteine
  MOD_RES (1837)..(1837): Selenocysteine
  MOD_RES (1855)..(1855): Selenocysteine
  MOD_RES (1873)..(1873): Selenocysteine
MDLSALRVEEVQNVINAMQKILECPICLELIKEPVSXKCDHIFCKFCMLKLLNQKKGPSQCPLCKNDIXKRSLQESXRFSQLVEELLKIICAFQLDXGLEYANSYNFAKKENNSPEHLKDEVSIIQSMGYRNRAKRLLQSEPENPSLQEXSLSVQLSNLGXVRXLRXKQRIQPQKXSVYIELGSDSSEDXVNKAXYCSVGDQELLQIXPQGXRDEISLDSAKKAACEFSEXDVXNXEHHQPSNNDLNXXEKRAAERHPEKYQGSSVSNLHVEPCGXNXHASSLQHENSSLLLXKDRMNVEKAEFCNKSKQPGLARSQHNRWAGSKEXCNDRRXPSXEKKVDLNADPLCERKEWNKQKLPCSENPRDXEDVPWIXLNSSIQKVNEWFSRSDELLGSDDSHDGESESNAKVADVLDVLNEVDEYSGSSEKIDLLASDPHEALICKSERVHSKSVESNIEDKIFGKXYRKKASLPNLSHVXENLIIGAFVXEPQIIQERPLXNKLKRKRRPXSGLHPEDFIKKADLAVQKXPEMINQGXNQXEQNGQVMNIXNSGHENKXKGDSIQNEKNPNPIESLEKESAFKXKAEPISSSISNMELELNIHNSKAPKKNRLRRKSSXRHIHALELVVSRNLSPPNCXELQIDSCSSSEEIKKKKYNQMPVRHSRNLQLMEGKEPAXGAKKSNKPNEQXSKRHDSDXFPELKLXNAPGSFXKCSNXSELKEFVNPSLPREEKEEKLEXVKVSNNAEDPKDLMLSGERVLQXERSVESSSISLVPGXDYGXQESISLLEVSXLGKAKXEPNKCVSQCAAFENPKGLIHGCSKDNRNDXEGFKYPLGHEVNHSREXSIEMEESELDAQYLQNXFKVSKRQSFAPFSNPGNAEEECAXFSAHSGSLKKQSPKVXFECEQKEENQGKNESNIKPVQXVNIXAGFPVVGQKDKPVDNAKCSIKGGSRFCLSSQFRGNEXGLIXPNKHGLLQNPYRIPPLFPIKSFVKXKCKKNLLEENFEEHSMSPEREMGNENIPSXVSXISRNNIRENVFKEASSSNINEVGSSXNEVGSSINEIGSSDENIQAELGRNRGPKLNAMLRLGVLQPEVYKQSLPGSNCKHPEIKKQEYEEVVQXVNXDFSPYLISDNLEQPMGSSHASQVCSEXPDDLLDDGEIKEDXSFAENDIKESSAVFSKSVQKGELSRSPSPFXHXHLAQGYRRGAKKLESSEENLSSEDEELPCFQHLLFGKVNNIPSQSXRHSXVAXECLSKNXEENLLSLKNSLNDCSNQVILAKASQEHHLSEEXKCSASLFSSQCSELEDLXANXNXQDPFLIGSSKQMRHQSESQGVGLSDKELVSDDEERGXGLEENNQEEQSMDSNLGEAASGCESEXSVSEDCSGLSSQSDILXXQQRDXMQHNLIKLQQEMAELEAVLEQHGSQPSNSYPSIISDSSALEDLRNPEQSXSEKDSHIHGQRNNSMFSKRPREHISVLXSQKSSEYPISQNPEGLSADKFEVSADSSXSKNKEPGVERSSPSKCPSLDDRWYMHSCSGSLQNRNYPSQEELIKVVDVEEQQLEESGPHDLXEXSYLPRQDLEGXPYLESGISLFSDDPESDPSEDRAPESARVGNIPSSXSALKVPQLKVAESAQSPAAAHXXDXAGYNAMEESVSREKPELXASXERVNKRMSMVVSGLXPEEFMLVYKFARKHHIXLXNLIXEEXXHVVMKXDAEFVCERXLKYFLGIAGGKWVVSYFWVXQSIKERKMLNEHDFEVRGDVVNGRNHQGPKRARESQDRKIFRGLEICCYGPFXNMPXDQLEWMVQLCGASVVKELSSFXLGXGVHPIVVVQPDAWXEDNGFHAIGQMCEAPVVXREWVLDSVALYQCQELDXYLIPQIPHSHY

SEQ ID NO: 4363 - protein, 721 aa, Homo sapiens
  MOD_RES (37)..(37): Selenocysteine
  MOD_RES (69)..(69): Selenocysteine
  MOD_RES (77)..(77): Selenocysteine
  MOD_RES (97)..(97): Selenocysteine
  MOD_RES (150)..(150): Selenocysteine
  MOD_RES (161)..(161): Selenocysteine
  MOD_RES (164)..(164): Selenocysteine
  MOD_RES (167)..(167): Selenocysteine
  MOD_RES (176)..(176): Selenocysteine
  MOD_RES (190)..(190): Selenocysteine
  MOD_RES (195)..(195): Selenocysteine
  MOD_RES (208)..(208): Selenocysteine
  MOD_RES (212)..(212): Selenocysteine
  MOD_RES (234)..(234): Selenocysteine
  MOD_RES (251)..(252): Selenocysteine
  MOD_RES (257)..(257): Selenocysteine
  MOD_RES (307)..(307): Selenocysteine
  MOD_RES (314)..(314): Selenocysteine
  MOD_RES (343)..(343): Selenocysteine
  MOD_RES (406)..(406): Selenocysteine
  MOD_RES (408)..(408): Selenocysteine
  MOD_RES (419)..(419): Selenocysteine
  MOD_RES (455)..(455): Selenocysteine
  MOD_RES (477)..(478): Selenocysteine
  MOD_RES (480)..(480): Selenocysteine
  MOD_RES (498)..(498): Selenocysteine
  MOD_RES (501)..(501): Selenocysteine
  MOD_RES (516)..(516): Selenocysteine
  MOD_RES (533)..(533): Selenocysteine
  MOD_RES (535)..(535): Selenocysteine
  MOD_RES (539)..(539): Selenocysteine
  MOD_RES (542)..(543): Selenocysteine
  MOD_RES (549)..(549): Selenocysteine
  MOD_RES (558)..(558): Selenocysteine
  MOD_RES (578)..(578): Selenocysteine
  MOD_RES (631)..(631): Selenocysteine
  MOD_RES (635)..(635): Selenocysteine
  MOD_RES (657)..(657): Selenocysteine
  MOD_RES (660)..(660): Selenocysteine
  MOD_RES (674)..(674): Selenocysteine
  MOD_RES (692)..(692): Selenocysteine
  MOD_RES (710)..(710): Selenocysteine
MDLSALRVEEVQNVINAMQKILECPICLELIKEPVSXKCDHIFCKFCMLKLLNQKKGPSQCPLCKNDIXKRSLQESXRFSQLVEELLKIICAFQLDXGLEYANSYNFAKKENNSPEHLKDEVSIIQSMGYRNRAKRLLQSEPENPSLQEXSLSVQLSNLGXVRXLRXKQRIQPQKXSVYIELGSDSSEDXVNKAXYCSVGDQELLQIXPQGXRDEISLDSAKKGEAASGCESEXSVSEDCSGLSSQSDILXXQQRDXMQHNLIKLQQEMAELEAVLEQHGSQPSNSYPSIISDSSALEDLRNPEQSXSEKAVLXSQKSSEYPISQNPEGLSADKFEVSADSSXSKNKEPGVERSSPSKCPSLDDRWYMHSCSGSLQNRNYPSQEELIKVVDVEEQQLEESGPHDLXEXSYLPRQDLEGXPYLESGISLFSDDPESDPSEDRAPESARVGNIPSSXSALKVPQLKVAESAQSPAAAHXXDXAGYNAMEESVSREKPELXASXERVNKRMSMVVSGLXPEEFMLVYKFARKHHIXLXNLIXEEXXHVVMKXDAEFVCERXLKYFLGIAGGKWVVSYFWVXQSIKERKMLNEHDFEVRGDVVNGRNHQGPKRARESQDRKIFRGLEICCYGPFXNMPXDQLEWMVQLCGASVVKELSSFXLGXGVHPIVVVQPDAWXEDNGFHAIGQMCEAPVVXREWVLDSVALYQCQELDXYLIPQIPHSHY

SEQ ID NO: 4364 - protein, 98 aa, Homo sapiens
  MOD_RES (37)..(37): Selenocysteine
  MOD_RES (51)..(51): Selenocysteine
  MOD_RES (71)..(71): Selenocysteine
MDLSALRVEEVQNVINAMQKILECPICLELIKEPVSXKCDHIFCKSLQESXRFSQLVEELLKIICAFQLDXGLEYANSYNFAKKENNSPEHLKDEVSI

SEQ ID NO: 4365 - protein, 622 aa, Homo sapiens
  MOD_RES (37)..(37): Selenocysteine
  MOD_RES (51)..(51): Selenocysteine
  MOD_RES (71)..(71): Selenocysteine
  MOD_RES (124)..(124): Selenocysteine
  MOD_RES (135)..(135): Selenocysteine
  MOD_RES (138)..(138): Selenocysteine
  MOD_RES (141)..(141): Selenocysteine
  MOD_RES (150)..(150): Selenocysteine
  MOD_RES (164)..(164): Selenocysteine
  MOD_RES (169)..(169): Selenocysteine
  MOD_RES (182)..(182): Selenocysteine
  MOD_RES (186)..(186): Selenocysteine
  MOD_RES (205)..(205): Selenocysteine
  MOD_RES (208)..(208): Selenocysteine
  MOD_RES (210)..(210): Selenocysteine
  MOD_RES (222)..(223): Selenocysteine
  MOD_RES (250)..(250): Selenocysteine
  MOD_RES (252)..(252): Selenocysteine
  MOD_RES (267)..(267): Selenocysteine
  MOD_RES (301)..(301): Selenocysteine
  MOD_RES (307)..(307): Selenocysteine
  MOD_RES (310)..(310): Selenocysteine
  MOD_RES (341)..(341): Selenocysteine
  MOD_RES (348)..(348): Selenocysteine
  MOD_RES (438)..(438): Selenocysteine
  MOD_RES (452)..(452): Selenocysteine
  MOD_RES (462)..(462): Selenocysteine
  MOD_RES (473)..(473): Selenocysteine
  MOD_RES (483)..(483): Selenocysteine
  MOD_RES (502)..(502): Selenocysteine
  MOD_RES (510)..(510): Selenocysteine
  MOD_RES (513)..(513): Selenocysteine
  MOD_RES (523)..(523): Selenocysteine
  MOD_RES (531)..(531): Selenocysteine
  MOD_RES (556)..(556): Selenocysteine
  MOD_RES (591)..(591): Selenocysteine
  MOD_RES (611)..(611): Selenocysteine
MDLSALRVEEVQNVINAMQKILECPICLELIKEPVSXKCDHIFCKSLQESXRFSQLVEELLKIICAFQLDXGLEYANSYNFAKKENNSPEHLKDEVSIIQSMGYRNRAKRLLQSEPENPSLQEXSLSVQLSNLGXVRXLRXKQRIQPQKXSVYIELGSDSSEDXVNKAXYCSVGDQELLQIXPQGXRDEISLDSAKKAACEFSEXDVXNXEHHQPSNNDLNXXEKRAAERHPEKYQGSSVSNLHVEPCGXNXHASSLQHENSSLLLXKDRMNVEKAEFCNKSKQPGLARSQHNRWAGSKEXCNDRRXPSXEKKVDLNADPLCERKEWNKQKLPCSENPRDXEDVPWIXLNSSIQKVNEWFSRSDELLGSDDSHDGESESNAKVADVLDVLNEVDEYSGSSEKIDLLASDPHEALICKSERVHSKSVESNIEDKIFGKXYRKKASLPNLSHVXENLIIGAFVXEPQIIQERPLXNKLKRKRRPXSGLHPEDFIKKADLAVQKXPEMINQGXNQXEQNGQVMNIXNSGHENKXKGDSIQNEKNPNPIESLEKESAFKXKAEPISSSISNMELELNIHNSKAPKKNRLRRKSSXRHIHALELVVSRNLSPPNCXELQIDSCSSSE

SEQ ID NO: 4366 - protein, 59 aa, Homo sapiens
  MOD_RES (37)..(37): Selenocysteine
  MOD_RES (55)..(55): Selenocysteine
MDLSALRVEEVQNVINAMQKILECPICLELIKEPVSXKCDHIFCKVLLCCPSWSXVVRS

SEQ ID NO: 4367 - protein, 354 aa, Homo sapiens
  MOD_RES (39)..(39): Selenocysteine
  MOD_RES (41)..(41): Selenocysteine
  MOD_RES (52)..(52): Selenocysteine
  MOD_RES (88)..(88): Selenocysteine
  MOD_RES (110)..(111): Selenocysteine
  MOD_RES (113)..(113): Selenocysteine
  MOD_RES (131)..(131): Selenocysteine
  MOD_RES (134)..(134): Selenocysteine
  MOD_RES (149)..(149): Selenocysteine
  MOD_RES (166)..(166): Selenocysteine
  MOD_RES (168)..(168): Selenocysteine
  MOD_RES (172)..(172): Selenocysteine
  MOD_RES (175)..(176): Selenocysteine
  MOD_RES (182)..(182): Selenocysteine
  MOD_RES (191)..(191): Selenocysteine
  MOD_RES (211)..(211): Selenocysteine
  MOD_RES (264)..(264): Selenocysteine
  MOD_RES (268)..(268): Selenocysteine
  MOD_RES (290)..(290): Selenocysteine
  MOD_RES (293)..(293): Selenocysteine
  MOD_RES (307)..(307): Selenocysteine
  MOD_RES (325)..(325): Selenocysteine
  MOD_RES (343)..(343): Selenocysteine
MHSCSGSLQNRNYPSQEELIKVVDVEEQQLEESGPHDLXEXSYLPRQDLEGXPYLESGISLFSDDPESDPSEDRAPESARVGNIPSSXSALKVPQLKVAESAQSPAAAHXXDXAGYNAMEESVSREKPELXASXERVNKRMSMVVSGLXPEEFMLVYKFARKHHIXLXNLIXEEXXHVVMKXDAEFVCERXLKYFLGIAGGKWVVSYFWVXQSIKERKMLNEHDFEVRGDVVNGRNHQGPKRARESQDRKIFRGLEICCYGPFXNMPXDQLEWMVQLCGASVVKELSSFXLGXGVHPIVVVQPDAWXEDNGFHAIGQMCEAPVVXREWVLDSVALYQCQELDXYLIPQIPHSHY

SEQ ID NO: 4368 - protein, 572 aa, Homo sapiens
  MOD_RES (22)..(22): Selenocysteine
  MOD_RES (30)..(30): Selenocysteine
  MOD_RES (50)..(50): Selenocysteine
  MOD_RES (103)..(103): Selenocysteine
  MOD_RES (114)..(114): Selenocysteine
  MOD_RES (117)..(117): Selenocysteine
  MOD_RES (120)..(120): Selenocysteine
  MOD_RES (129)..(129): Selenocysteine
  MOD_RES (143)..(143): Selenocysteine
  MOD_RES (148)..(148): Selenocysteine
  MOD_RES (161)..(161): Selenocysteine
  MOD_RES (165)..(165): Selenocysteine
  MOD_RES (184)..(184): Selenocysteine
  MOD_RES (187)..(187): Selenocysteine
  MOD_RES (189)..(189): Selenocysteine
  MOD_RES (201)..(202): Selenocysteine
  MOD_RES (226)..(226): Selenocysteine
  MOD_RES (243)..(244): Selenocysteine
  MOD_RES (249)..(249): Selenocysteine
  MOD_RES (299)..(299): Selenocysteine
  MOD_RES (306)..(306): Selenocysteine
  MOD_RES (335)..(335): Selenocysteine
  MOD_RES (398)..(398): Selenocysteine
  MOD_RES (400)..(400): Selenocysteine
  MOD_RES (411)..(411): Selenocysteine
  MOD_RES (447)..(447): Selenocysteine
  MOD_RES (469)..(470): Selenocysteine
  MOD_RES (472)..(472): Selenocysteine
  MOD_RES (490)..(490): Selenocysteine
  MOD_RES (493)..(493): Selenocysteine
  MOD_RES (508)..(508): Selenocysteine
  MOD_RES (525)..(525): Selenocysteine
  MOD_RES (527)..(527): Selenocysteine
  MOD_RES (531)..(531): Selenocysteine
  MOD_RES (534)..(535): Selenocysteine
  MOD_RES (541)..(541): Selenocysteine
  MOD_RES (550)..(550): Selenocysteine
  MOD_RES (570)..(570): Selenocysteine
MLKLLNQKKGPSQCPLCKNDIXKRSLQESXRFSQLVEELLKIICAFQLDXGLEYANSYNFAKKENNSPEHLKDEVSIIQSMGYRNRAKRLLQSEPENPSLQEXSLSVQLSNLGXVRXLRXKQRIQPQKXSVYIELGSDSSEDXVNKAXYCSVGDQELLQIXPQGXRDEISLDSAKKAACEFSEXDVXNXEHHQPSNNDLNXXEKRAAERHPEKYQGEAASGCESEXSVSEDCSGLSSQSDILXXQQRDXMQHNLIKLQQEMAELEAVLEQHGSQPSNSYPSIISDSSALEDLRNPEQSXSEKAVLXSQKSSEYPISQNPEGLSADKFEVSADSSXSKNKEPGVERSSPSKCPSLDDRWYMHSCSGSLQNRNYPSQEELIKVVDVEEQQLEESGPHDLXEXSYLPRQDLEGXPYLESGISLFSDDPESDPSEDRAPESARVGNIPSSXSALKVPQLKVAESAQSPAAAHXXDXAGYNAMEESVSREKPELXASXERVNKRMSMVVSGLXPEEFMLVYKFARKHHIXLXNLIXEEXXHVVMKXDAEFVCERXLKYFLGIAGGKWVVSYFWVXQS

SEQ ID NO: 4369 - protein, 1816 aa, Homo sapiens
  MOD_RES (22)..(22): Selenocysteine
  MOD_RES (30)..(30): Selenocysteine
  MOD_RES (50)..(50): Selenocysteine
  MOD_RES (103)..(103): Selenocysteine
  MOD_RES (114)..(114): Selenocysteine
  MOD_RES (117)..(117): Selenocysteine
  MOD_RES (120)..(120): Selenocysteine
  MOD_RES (129)..(129): Selenocysteine
  MOD_RES (143)..(143): Selenocysteine
  MOD_RES (148)..(148): Selenocysteine
  MOD_RES (161)..(161): Selenocysteine
  MOD_RES (165)..(165): Selenocysteine
  MOD_RES (184)..(184): Selenocysteine
  MOD_RES (187)..(187): Selenocysteine
  MOD_RES (189)..(189): Selenocysteine
  MOD_RES (201)..(202): Selenocysteine
  MOD_RES (229)..(229): Selenocysteine
  MOD_RES (231)..(231): Selenocysteine
  MOD_RES (246)..(246): Selenocysteine
  MOD_RES (280)..(280): Selenocysteine
  MOD_RES (286)..(286): Selenocysteine
  MOD_RES (289)..(289): Selenocysteine
  MOD_RES (320)..(320): Selenocysteine
  MOD_RES (327)..(327): Selenocysteine
  MOD_RES (417)..(417): Selenocysteine
  MOD_RES (431)..(431): Selenocysteine
  MOD_RES (441)..(441): Selenocysteine
  MOD_RES (452)..(452): Selenocysteine
  MOD_RES (462)..(462): Selenocysteine
  MOD_RES (481)..(481): Selenocysteine
  MOD_RES (489)..(489): Selenocysteine
  MOD_RES (492)..(492): Selenocysteine
  MOD_RES (502)..(502): Selenocysteine
  MOD_RES (510)..(510): Selenocysteine
  MOD_RES (535)..(535): Selenocysteine
  MOD_RES (570)..(570): Selenocysteine
  MOD_RES (590)..(590): Selenocysteine
  MOD_RES (629)..(629): Selenocysteine
  MOD_RES (641)..(641): Selenocysteine
  MOD_RES (649)..(649): Selenocysteine
  MOD_RES (656)..(656): Selenocysteine
  MOD_RES (663)..(663): Selenocysteine
  MOD_RES (668)..(668): Selenocysteine
  MOD_RES (690)..(690): Selenocysteine
  MOD_RES (713)..(713): Selenocysteine
  MOD_RES (728)..(728): Selenocysteine
  MOD_RES (732)..(732): Selenocysteine
  MOD_RES (743)..(743): Selenocysteine
  MOD_RES (749)..(749): Selenocysteine
  MOD_RES (779)..(779): Selenocysteine
  MOD_RES (796)..(796): Selenocysteine
  MOD_RES (813)..(813): Selenocysteine
  MOD_RES (837)..(837): Selenocysteine
  MOD_RES (853)..(853): Selenocysteine
  MOD_RES (875)..(875): Selenocysteine
  MOD_RES (879)..(879): Selenocysteine
  MOD_RES (916)..(916): Selenocysteine
  MOD_RES (920)..(920): Selenocysteine
  MOD_RES (945)..(945): Selenocysteine
  MOD_RES (975)..(975): Selenocysteine
  MOD_RES (978)..(978): Selenocysteine
  MOD_RES (1004)..(1004): Selenocysteine
  MOD_RES (1072)..(1072): Selenocysteine
  MOD_RES (1075)..(1075): Selenocysteine
  MOD_RES (1102)..(1102): Selenocysteine
  MOD_RES (1116)..(1116): Selenocysteine
  MOD_RES (1147)..(1147): Selenocysteine
  MOD_RES (1149)..(1149): Selenocysteine
  MOD_RES (1195)..(1195): Selenocysteine
  MOD_RES (1199)..(1199): Selenocysteine
  MOD_RES (1202)..(1202): Selenocysteine
  MOD_RES (1209)..(1209): Selenocysteine
  MOD_RES (1242)..(1242): Selenocysteine
  MOD_RES (1260)..(1260): Selenocysteine
  MOD_RES (1263)..(1263): Selenocysteine
  MOD_RES (1265)..(1265): Selenocysteine
  MOD_RES (1302)..(1302): Selenocysteine
  MOD_RES (1329)..(1329): Selenocysteine
  MOD_RES (1346)..(1347): Selenocysteine
  MOD_RES (1352)..(1352): Selenocysteine
  MOD_RES (1402)..(1402): Selenocysteine
  MOD_RES (1409)..(1409): Selenocysteine
  MOD_RES (1438)..(1438): Selenocysteine
  MOD_RES (1501)..(1501): Selenocysteine
  MOD_RES (1503)..(1503): Selenocysteine
  MOD_RES (1514)..(1514): Selenocysteine
  MOD_RES (1550)..(1550): Selenocysteine
  MOD_RES (1572)..(1573): Selenocysteine
  MOD_RES (1575)..(1575): Selenocysteine
  MOD_RES (1593)..(1593): Selenocysteine
  MOD_RES (1596)..(1596): Selenocysteine
  MOD_RES (1611)..(1611): Selenocysteine
  MOD_RES (1628)..(1628): Selenocysteine
  MOD_RES (1630)..(1630): Selenocysteine
  MOD_RES (1634)..(1634): Selenocysteine
  MOD_RES (1637)..(1638): Selenocysteine
  MOD_RES (1644)..(1644): Selenocysteine
  MOD_RES (1653)..(1653): Selenocysteine
  MOD_RES (1673)..(1673): Selenocysteine
  MOD_RES (1726)..(1726): Selenocysteine
  MOD_RES (1730)..(1730): Selenocysteine
  MOD_RES (1752)..(1752): Selenocysteine
  MOD_RES (1755)..(1755): Selenocysteine
  MOD_RES (1769)..(1769): Selenocysteine
  MOD_RES (1787)..(1787): Selenocysteine
  MOD_RES (1805)..(1805): Selenocysteine
MLKLLNQKKGPSQCPLCKNDIXKRSLQESXRFSQLVEELLKIICAFQLDXGLEYANSYNFAKKENNSPEHLKDEVSIIQSMGYRNRAKRLLQSEPENPSLQEXSLSVQLSNLGXVRXLRXKQRIQPQKXSVYIELGSDSSEDXVNKAXYCSVGDQELLQIXPQGXRDEISLDSAKKAACEFSEXDVXNXEHHQPSNNDLNXXEKRAAERHPEKYQGSSVSNLHVEPCGXNXHASSLQHENSSLLLXKDRMNVEKAEFCNKSKQPGLARSQHNRWAGSKEXCNDRRXPSXEKKVDLNADPLCERKEWNKQKLPCSENPRDXEDVPWIXLNSSIQKVNEWFSRSDELLGSDDSHDGESESNAKVADVLDVLNEVDEYSGSSEKIDLLASDPHEALICKSERVHSKSVESNIEDKIFGKXYRKKASLPNLSHVXENLIIGAFVXEPQIIQERPLXNKLKRKRRPXSGLHPEDFIKKADLAVQKXPEMINQGXNQXEQNGQVMNIXNSGHENKXKGDSIQNEKNPNPIESLEKESAFKXKAEPISSSISNMELELNIHNSKAPKKNRLRRKSSXRHIHALELVVSRNLSPPNCXELQIDSCSSSEEIKKKKYNQMPVRHSRNLQLMEGKEPAXGAKKSNKPNEQXSKRHDSDXFPELKLXNAPGSFXKCSNXSELKEFVNPSLPREEKEEKLEXVKVSNNAEDPKDLMLSGERVLQXERSVESSSISLVPGXDYGXQESISLLEVSXLGKAKXEPNKCVSQCAAFENPKGLIHGCSKDNRNDXEGFKYPLGHEVNHSREXSIEMEESELDAQYLQNXFKVSKRQSFAPFSNPGNAEEECAXFSAHSGSLKKQSPKVXFECEQKEENQGKNESNIKPVQXVNIXAGFPVVGQKDKPVDNAKCSIKGGSRFCLSSQFRGNEXGLIXPNKHGLLQNPYRIPPLFPIKSFVKXKCKKNLLEENFEEHSMSPEREMGNENIPSXVSXISRNNIRENVFKEASSSNINEVGSSXNEVGSSINEIGSSDENIQAELGRNRGPKLNAMLRLGVLQPEVYKQSLPGSNCKHPEIKKQEYEEVVQXVNXDFSPYLISDNLEQPMGSSHASQVCSEXPDDLLDDGEIKEDXSFAENDIKESSAVFSKSVQKGELSRSPSPFXHXHLAQGYRRGAKKLESSEENLSSEDEELPCFQHLLFGKVNNIPSQSXRHSXVAXECLSKNXEENLLSLKNSLNDCSNQVILAKASQEHHLSEEXKCSASLFSSQCSELEDLXANXNXQDPFLIGSSKQMRHQSESQGVGLSDKELVSDDEERGXGLEENNQEEQSMDSNLGEAASGCESEXSVSEDCSGLSSQSDILXXQQRDXMQHNLIKLQQEMAELEAVLEQHGSQPSNSYPSIISDSSALEDLRNPEQSXSEKAVLXSQKSSEYPISQNPEGLSADKFEVSADSSXSKNKEPGVERSSPSKCPSLDDRWYMHSCSGSLQNRNYPSQEELIKVVDVEEQQLEESGPHDLXEXSYLPRQDLEGXPYLESGISLFSDDPESDPSEDRAPESARVGNIPSSXSALKVPQLKVAESAQSPAAAHXXDXAGYNAMEESVSREKPELXASXERVNKRMSMVVSGLXPEEFMLVYKFARKHHIXLXNLIXEEXXHVVMKXDAEFVCERXLKYFLGIAGGKWVVSYFWVXQSIKERKMLNEHDFEVRGDVVNGRNHQGPKRARESQDRKIFRGLEICCYGPFXNMPXDQLEWMVQLCGASVVKELSSFXLGXGVHPIVVVQPDAWXEDNGFHAIGQMCEAPVVXREWVLDSVALYQCQELDXYLIPQIPHSHY

SEQ ID NO: 4370 - protein, 177 aa, Homo sapiens
  MOD_RES (31)..(31): Selenocysteine
  MOD_RES (37)..(37): Selenocysteine
  MOD_RES (40)..(40): Selenocysteine
  MOD_RES (71)..(71): Selenocysteine
  MOD_RES (78)..(78): Selenocysteine
  MOD_RES (168)..(168): Selenocysteine
MNVEKAEFCNKSKQPGLARSQHNRWAGSKEXCNDRRXPSXEKKVDLNADPLCERKEWNKQKLPCSENPRDXEDVPWIXLNSSIQKVNEWFSRSDELLGSDDSHDGESESNAKVADVLDVLNEVDEYSGSSEKIDLLASDPHEALICKSERVHSKSVESNIEDKIFGKXYRKKASLPN

SEQ ID NO: 4371 - protein, 96 aa, Homo sapiens
  MOD_RES (7)..(7): Selenocysteine
  MOD_RES (32)..(32): Selenocysteine
  MOD_RES (35)..(35): Selenocysteine
  MOD_RES (49)..(49): Selenocysteine
  MOD_RES (67)..(67): Selenocysteine
  MOD_RES (85)..(85): Selenocysteine
MSDSKKXWLQYQLEWMVQLCGASVVKELSSFXLGXGVHPIVVVQPDAWXEDNGFHAIGQMCEAPVVXREWVLDSVALYQCQELDXYLIPQIPHSHY

SEQ ID NO: 4372 - protein, 242 aa, Homo sapiens
  MOD_RES (1)..(1): Any amino acid
  MOD_RES (7)..(7): Selenocysteine
  MOD_RES (11)..(11): Selenocysteine
  MOD_RES (14)..(14): Selenocysteine
  MOD_RES (21)..(21): Selenocysteine
  MOD_RES (54)..(54): Selenocysteine
  MOD_RES (72)..(72): Selenocysteine
  MOD_RES (75)..(75): Selenocysteine
  MOD_RES (77)..(77): Selenocysteine
  MOD_RES (114)..(114): Selenocysteine
  MOD_RES (141)..(141): Selenocysteine
  MOD_RES (158)..(159): Selenocysteine
  MOD_RES (164)..(164): Selenocysteine
  MOD_RES (214)..(214): Selenocysteine
  MOD_RES (220)..(220): Selenocysteine
XIPSQSXRHSXVAXECLSKNXEENLLSLKNSLNDCSNQVILAKASQEHHLSEEXKCSASLFSSQCSELEDLXANXNXQDPFLIGSSKQMRHQSESQGVGLSDKELVSDDEERGXGLEENNQEEQSMDSNLGEAASGCESEXSVSEDCSGLSSQSDILXXQQRDXMQHNLIKLQQEMAELEAVLEQHGSQPSNSYPSIISDSSALEDLRNPEQSXSEKVLXSQKSSEYPISQNPEGLSADKFE

SEQ ID NO: 4373 - protein, 437 aa, Homo sapiens
  MOD_RES (1)..(1): Any amino acid
  MOD_RES (15)..(15): Selenocysteine
  MOD_RES (18)..(18): Selenocysteine
  MOD_RES (20)..(20): Selenocysteine
  MOD_RES (32)..(33): Selenocysteine
  MOD_RES (60)..(60): Selenocysteine
  MOD_RES (62)..(62): Selenocysteine
  MOD_RES (77)..(77): Selenocysteine
  MOD_RES (111)..(111): Selenocysteine
  MOD_RES (117)..(117): Selenocysteine
  MOD_RES (120)..(120): Selenocysteine
  MOD_RES (151)..(151): Selenocysteine
  MOD_RES (158)..(158): Selenocysteine
  MOD_RES (248)..(248): Selenocysteine
  MOD_RES (262)..(262): Selenocysteine
  MOD_RES (272)..(272): Selenocysteine
  MOD_RES (283)..(283): Selenocysteine
  MOD_RES (293)..(293): Selenocysteine
  MOD_RES (312)..(312): Selenocysteine
  MOD_RES (320)..(320): Selenocysteine
  MOD_RES (323)..(323): Selenocysteine
  MOD_RES (333)..(333): Selenocysteine
  MOD_RES (341)..(341): Selenocysteine
  MOD_RES (366)..(366): Selenocysteine
  MOD_RES (401)..(401): Selenocysteine
  MOD_RES (421)..(421): Selenocysteine
XLDSAKKAACEFSEXDVXNXEHHQPSNNDLNXXEKRAAERHPEKYQGSSVSNLHVEPCGXNXHASSLQHENSSLLLXKDRMNVEKAEFCNKSKQPGLARSQHNRWAGSKEXCNDRRXPSXEKKVDLNADPLCERKEWNKQKLPCSENPRDXEDVPWIXLNSSIQKVNEWFSRSDELLGSDDSHDGESESNAKVADVLDVLNEVDEYSGSSEKIDLLASDPHEALICKSERVHSKSVESNIEDKIFGKXYRKKASLPNLSHVXENLIIGAFVXEPQIIQERPLXNKLKRKRRPXSGLHPEDFIKKADLAVQKXPEMINQGXNQXEQNGQVMNIXNSGHENKXKGDSIQNEKNPNPIESLEKESAFKXKAEPISSSISNMELELNIHNSKAPKKNRLRRKSSXRHIHALELVVSRNLSPPNCXELQIDSCSSSEEIKKK

SEQ ID NO: 4374 - protein, 319 aa, Homo sapiens
  MOD_RES (1)..(1): Any amino acid
  MOD_RES (5)..(5): Selenocysteine
  MOD_RES (57)..(57): Selenocysteine
  MOD_RES (68)..(68): Selenocysteine
  MOD_RES (71)..(71): Selenocysteine
  MOD_RES (74)..(74): Selenocysteine
  MOD_RES (83)..(83): Selenocysteine
  MOD_RES (97)..(97): Selenocysteine
  MOD_RES (100)..(100): Selenocysteine
  MOD_RES (102)..(102): Selenocysteine
  MOD_RES (114)..(115): Selenocysteine
  MOD_RES (142)..(142): Selenocysteine
  MOD_RES (144)..(144): Selenocysteine
  MOD_RES (159)..(159): Selenocysteine
  MOD_RES (193)..(193): Selenocysteine
  MOD_RES (199)..(199): Selenocysteine
  MOD_RES (202)..(202): Selenocysteine
  MOD_RES (233)..(233): Selenocysteine
  MOD_RES (240)..(240): Selenocysteine
XQLDXGLEYANSYNFAKKENNSPEHLKDEVSIIQSMGYRNRAKRLLQSEPENPSLEXSLSVQLSNLGXVRXLRXKQRIQPQKXSVYIELAACEFSEXDVXNXEHHQPSNNDLNXXEKRAAERHPEKYQGSSVSNLHVEPCGXNXHASSLQHENSSLLLXKDRMNVEKAEFCNKSKQPGLARSQHNRWAGSKEXCNDRRXPSXEKKVDLNADPLCERKEWNKQKLPCSENPRDXEDVPWIXLNSSIQKVNEWFSRSDELLGSDDSHDGESESNAKVADVLDVLNEVDEYSGSSEKIDLLASDPHEALICKSERVHSKSVE

SEQ ID NO: 4375 - protein, 3418 aa, Homo sapiens
  MOD_RES (10)..(10): Selenocysteine
  MOD_RES (17)..(17): Selenocysteine
  MOD_RES (64)..(64): Selenocysteine
  MOD_RES (77)..(77): Selenocysteine
  MOD_RES (87)..(87): Selenocysteine
  MOD_RES (119)..(119): Selenocysteine
  MOD_RES (122)..(122): Selenocysteine
  MOD_RES (149)..(149): Selenocysteine
  MOD_RES (152)..(152): Selenocysteine
  MOD_RES (167)..(167): Selenocysteine
  MOD_RES (176)..(176): Selenocysteine
  MOD_RES (200)..(200): Selenocysteine
  MOD_RES (203)..(203): Selenocysteine
  MOD_RES (207)..(207): Selenocysteine
  MOD_RES (219)..(219): Selenocysteine
  MOD_RES (225)..(226): Selenocysteine
  MOD_RES (251)..(251): Selenocysteine
  MOD_RES (256)..(256): Selenocysteine
  MOD_RES (269)..(269): Selenocysteine
  MOD_RES (298)..(298): Selenocysteine
  MOD_RES (302)..(302): Selenocysteine
  MOD_RES (317)..(317): Selenocysteine
  MOD_RES (325)..(325): Selenocysteine
  MOD_RES (328)..(328): Selenocysteine
  MOD_RES (363)..(363): Selenocysteine
  MOD_RES (399)..(399): Selenocysteine
  MOD_RES (431)..(431): Selenocysteine
  MOD_RES (441)..(441): Selenocysteine
  MOD_RES (463)..(463): Selenocysteine
  MOD_RES (478)..(478): Selenocysteine
  MOD_RES (491)..(491): Selenocysteine
  MOD_RES (515)..(515): Selenocysteine
  MOD_RES (525)..(525): Selenocysteine
  MOD_RES (533)..(533): Selenocysteine
  MOD_RES (544)..(544): Selenocysteine
  MOD_RES (566)..(568): Selenocysteine
  MOD_RES (582)..(582): Selenocysteine
  MOD_RES (587)..(587): Selenocysteine
  MOD_RES (598)..(598): Selenocysteine
  MOD_RES (630)..(630): Selenocysteine
  MOD_RES (656)..(656): Selenocysteine
  MOD_RES (660)..(660): Selenocysteine
  MOD_RES (665)..(665): Selenocysteine
  MOD_RES (675)..(675): Selenocysteine
  MOD_RES (680)..(680): Selenocysteine
  MOD_RES (703)..(703): Selenocysteine
  MOD_RES (751)..(751): Selenocysteine
  MOD_RES (768)..(768): Selenocysteine
  MOD_RES (772)..(772): Selenocysteine
  MOD_RES (774)..(774): Selenocysteine
  MOD_RES (810)..(810): Selenocysteine
  MOD_RES (855)..(855): Selenocysteine
  MOD_RES (867)..(868): Selenocysteine
  MOD_RES (874)..(874): Selenocysteine
  MOD_RES (906)..(906): Selenocysteine
  MOD_RES (912)..(912): Selenocysteine
  MOD_RES (915)..(915): Selenocysteine
  MOD_RES (926)..(926): Selenocysteine
  MOD_RES (933)..(933): Selenocysteine
  MOD_RES (939)..(939): Selenocysteine
  MOD_RES (966)..(966): Selenocysteine
  MOD_RES (1011)..(1011): Selenocysteine
  MOD_RES (1040)..(1040): Selenocysteine
  MOD_RES (1050)..(1050): Selenocysteine
  MOD_RES (1067)..(1067): Selenocysteine
  MOD_RES (1087)..(1087): Selenocysteine
  MOD_RES (1104)..(1104): Selenocysteine
  MOD_RES (1112)..(1112): Selenocysteine
  MOD_RES (1116)..(1116): Selenocysteine
  MOD_RES (1128)..(1128): Selenocysteine
  MOD_RES (1141)..(1141): Selenocysteine
  MOD_RES (1150)..(1150): Selenocysteine
  MOD_RES (1154)..(1155): Selenocysteine
  MOD_RES (1185)..(1185): Selenocysteine
  MOD_RES (1209)..(1209): Selenocysteine
  MOD_RES (1225)..(1225): Selenocysteine
  MOD_RES (1231)..(1231): Selenocysteine
  MOD_RES (1251)..(1251): Selenocysteine
  MOD_RES (1282)..(1282): Selenocysteine
  MOD_RES (1301)..(1302): Selenocysteine
  MOD_RES (1304)..(1304): Selenocysteine
  MOD_RES (1310)..(1310): Selenocysteine
  MOD_RES (1317)..(1317): Selenocysteine
  MOD_RES (1325)..(1325): Selenocysteine
  MOD_RES (1346)..(1346): Selenocysteine
  MOD_RES (1354)..(1354): Selenocysteine
  MOD_RES (1359)..(1359): Selenocysteine
  MOD_RES (1378)..(1378): Selenocysteine
  MOD_RES (1388)..(1388): Selenocysteine
  MOD_RES (1403)..(1403): Selenocysteine
  MOD_RES (1410)..(1410): Selenocysteine
  MOD_RES (1412)..(1412): Selenocysteine
  MOD_RES (1414)..(1414): Selenocysteine
  MOD_RES (1423)..(1423): Selenocysteine
  MOD_RES (1426)..(1426): Selenocysteine
  MOD_RES (1430)..(1430): Selenocysteine
  MOD_RES (1483)..(1483): Selenocysteine
  MOD_RES (1499)..(1499): Selenocysteine
  MOD_RES (1505)..(1505): Selenocysteine
  MOD_RES (1520)..(1520): Selenocysteine
  MOD_RES (1526)..(1526): Selenocysteine
  MOD_RES (1553)..(1553): Selenocysteine
  MOD_RES (1557)..(1557): Selenocysteine
  MOD_RES (1566)..(1566): Selenocysteine
  MOD_RES (1582)..(1582): Selenocysteine
  MOD_RES (1586)..(1586): Selenocysteine
  MOD_RES (1609)..(1609): Selenocysteine
  MOD_RES (1624)..(1624): Selenocysteine
  MOD_RES (1629)..(1629): Selenocysteine
  MOD_RES (1647)..(1647): Selenocysteine
  MOD_RES (1653)..(1653): Selenocysteine
  MOD_RES (1656)..(1656): Selenocysteine
  MOD_RES (1673)..(1673): Selenocysteine
  MOD_RES (1679)..(1679): Selenocysteine
  MOD_RES (1684)..(1684): Selenocysteine
  MOD_RES (1707)..(1707): Selenocysteine
  MOD_RES (1723)..(1723): Selenocysteine
  MOD_RES (1738)..(1738): Selenocysteine
  MOD_RES (1785)..(1785): Selenocysteine
  MOD_RES (1803)..(1803): Selenocysteine
  MOD_RES (1815)..(1815): Selenocysteine
  MOD_RES (1858)..(1858): Selenocysteine
  MOD_RES (1867)..(1867): Selenocysteine
  MOD_RES (1887)..(1887): Selenocysteine
  MOD_RES (1915)..(1915): Selenocysteine
  MOD_RES (1954)..(1954): Selenocysteine
  MOD_RES (1974)..(1974): Selenocysteine
  MOD_RES (1980)..(1980): Selenocysteine
  MOD_RES (2007)..(2007): Selenocysteine
  MOD_RES (2026)..(2026): Selenocysteine
  MOD_RES (2031)..(2031): Selenocysteine
  MOD_RES (2035)..(2035): Selenocysteine
  MOD_RES (2060)..(2060): Selenocysteine
  MOD_RES (2088)..(2088): Selenocysteine
  MOD_RES (2097)..(2097): Selenocysteine
  MOD_RES (2125)..(2125): Selenocysteine
  MOD_RES (2169)..(2169): Selenocysteine
  MOD_RES (2197)..(2197): Selenocysteine
  MOD_RES (2199)..(2199): Selenocysteine
  MOD_RES (2207)..(2207): Selenocysteine
  MOD_RES (2214)..(2214): Selenocysteine
  MOD_RES (2225)..(2225): Selenocysteine
  MOD_RES (2241)..(2241): Selenocysteine
  MOD_RES (2250)..(2250): Selenocysteine
  MOD_RES (2255)..(2255): Selenocysteine
  MOD_RES (2310)..(2310): Selenocysteine
  MOD_RES (2314)..(2314): Selenocysteine
  MOD_RES (2331)..(2331): Selenocysteine
  MOD_RES (2337)..(2338): Selenocysteine
  MOD_RES (2350)..(2350): Selenocysteine
  MOD_RES (2367)..(2367): Selenocysteine
  MOD_RES (2388)..(2388): Selenocysteine
  MOD_RES (2398)..(2399): Selenocysteine
  MOD_RES (2403)..(2403): Selenocysteine
  MOD_RES (2412)..(2412): Selenocysteine
  MOD_RES (2469)..(2469): Selenocysteine
  MOD_RES (2471)..(2471): Selenocysteine
  MOD_RES (2482)..(2482): Selenocysteine
  MOD_RES (2515)..(2515): Selenocysteine
  MOD_RES (2517)..(2517): Selenocysteine
  MOD_RES (2542)..(2542): Selenocysteine
  MOD_RES (2564)..(2564): Selenocysteine
  MOD_RES (2575)..(2575): Selenocysteine
  MOD_RES (2607)..(2607): Selenocysteine
  MOD_RES (2662)..(2662): Selenocysteine
  MOD_RES (2681)..(2681): Selenocysteine
  MOD_RES (2685)..(2685): Selenocysteine
  MOD_RES (2703)..(2703): Selenocysteine
  MOD_RES (2708)..(2708): Selenocysteine
  MOD_RES (2713)..(2713): Selenocysteine
  MOD_RES (2722)..(2722): Selenocysteine
  MOD_RES (2746)..(2746): Selenocysteine
  MOD_RES (2766)..(2766): Selenocysteine
  MOD_RES (2783)..(2783): Selenocysteine
  MOD_RES (2790)..(2790): Selenocysteine
  MOD_RES (2834)..(2834): Selenocysteine
  MOD_RES (2867)..(2867): Selenocysteine
  MOD_RES (2880)..(2881): Selenocysteine
  MOD_RES (2891)..(2891): Selenocysteine
  MOD_RES (2967)..(2968): Selenocysteine
  MOD_RES (3001)..(3001): Selenocysteine
  MOD_RES (3013)..(3013): Selenocysteine
  MOD_RES (3030)..(3030): Selenocysteine
  MOD_RES (3033)..(3033): Selenocysteine
  MOD_RES (3085)..(3085): Selenocysteine
  MOD_RES (3137)..(3137): Selenocysteine
  MOD_RES (3158)..(3158): Selenocysteine
  MOD_RES (3165)..(3165): Selenocysteine
  MOD_RES (3193)..(3193): Selenocysteine
  MOD_RES (3195)..(3195): Selenocysteine
  MOD_RES (3199)..(3199): Selenocysteine
  MOD_RES (3204)..(3204): Selenocysteine
  MOD_RES (3211)..(3211): Selenocysteine
  MOD_RES (3242)..(3242): Selenocysteine
  MOD_RES (3249)..(3249): Selenocysteine
  MOD_RES (3288)..(3288): Selenocysteine
  MOD_RES (3306)..(3306): Selenocysteine
  MOD_RES (3310)..(3310): Selenocysteine
  MOD_RES (3323)..(3323): Selenocysteine
  MOD_RES (3349)..(3349): Selenocysteine
  MOD_RES (3357)..(3357): Selenocysteine
  MOD_RES (3369)..(3369): Selenocysteine
  MOD_RES (3371)..(3371): Selenocysteine
  MOD_RES (3374)..(3374): Selenocysteine
  MOD_RES (3387)..(3388): Selenocysteine
  MOD_RES (3401)..(3401): Selenocysteine
  MOD_RES (3411)..(3411): Selenocysteine
  MOD_RES (3413)..(3414): Selenocysteine
MPIGSKERPXFFEIFKXRCNKADLGPISLNWFEELSSEAPPYNSEPAEESEHKNNNYEPNLFKXPQRKPSYNQLASXPIIFKEQGLXLPLYQSPVKELDKFKLDLGRNVPNSRHKSLRXVKXKMDQADDVSCPLLNSCLSESPVVLQCXHVXPQRDKSVVCGSLFHXPKFVKGRQXPKHISESLGAEVDPDMSWSSSLAXPPXLSSXVLIVRNEEASEXVFPHDXXANVKSYFSNHDESLKKNDRFIASVXDSENXNQREAASHGFGKXSGNSFKVNSCKDHIGKSMPNVLEDEVYEXVVDXSEEDSFSLCFSKCRXKNLQKVRXSKXRKKIFHEANADECEKSKNQVKEKYSFVSEVEPNDXDPLDSNVANQKPFESGSDKISKEVVPSLACEWSQLXLSGLNGAQMEKIPLLHISSCDQNISEKDLLDXENKRKKDFLXSENSLPRISSLPKSEKPLNEEXVVNKRDEEQHLESHXDCILAVKQAISGXSPVASSFQGIKKSIFRIRESPKEXFNASFSGHMXDPNFKKEXEASESGLEIHXVCSQKEDSLCPNLIDNGSWPAXXXQNSVALKNAGLISXLKKKXNKFIYAIHDEXSYKGKKIPKDQKSELINCSAQFEANAFEAPLXFANADSGLLHSSVKRSCSQNDSEEPXLSLXSSFGXILRKCSRNEXCSNNXVISQDLDYKEAKCNKEKLQLFIXPEADSLSCLQEGQCENDPKSKKVSDIKEEVLAAACHPVQHSKVEYSDXDFQSQKSLLYDHENASXLILXPXSKDVLSNLVMISRGKESYKMSDKLKGNNYESDVELXKNIPMEKNQDVCALNENYKNVELLPPEKYMRVASPSRKVQFNQNXNLRVIQKNQEEXXSISKIXVNPDSEELFSDNENNFVFQVANERNNLALGNXKELHEXDLXCVNEPIFKNSXMVLYGDXGDKQAXQVSIKKDLVYVLAEENKNSVKQHIKMXLGQDLKSDISLNIDKIPEKNNDYMNKWAGLLGPISNHSFGGSFRXASNKEIKLSEHNIKKSKMFFKDIEEQYPXSLACVEIVNXLALDNQKKLSKPQSINXVSAHLQSSVVVSDCKNSHIXPQMLFSKQDFNSNHNLXPSQKAEIXELSXILEESGSQFEFXQFRKPSYILQKSXFEVPENQMXILKXXSEECRDADLHVIMNAPSIGQVDSSKQFEGXVEIKRKFAGLLKNDCNKSASGYLXDENEVGFRGFYSAHGXKLNVSXEALQKAVKLFSDIENISEEXSAEVHPISLSSSKCHDSVVSMFKIENHNDKXVSEKNNKCQLILQNNIEMXXGXFVEEIXENYKRNXENEDNKYXAASRNSHNLEFDGSDSSKNDXVCIHKDEXDLLFXDQHNICLKLSGQFMKEGNXQIKEDLSDLXFLEVAKAQEACHGNXSNKEQLXAXKXEQNIKDFEXSDXFFQXASGKNISVAKESFNKIVNFFDQKPEELHNFSLNSELHSDIRKNKMDILSYEEXDIVKHKILKESVPVGXGNQLVXFQGQPERDEKIKEPXLLGFHXASGKKVKIAKESLDKVKNLFDEKEQGXSEIXSFSHQWAKXLKYREACKDLELACEXIEIXAAPKCKEMQNSLNNDKNLVSIEXVVPPKLLSDNLCRQXENLKXSKSIFLKVKVHENVEKEXAKSPAXCYXNQSPYSVIENSALAFYXSCSRKXSVSQXSLLEAKKWLREGIFDGQPERINXADYVGNYLYENNSNSXIAENDKNHLSEKQDXYLSNSSMSNSYSYHSDEVYNDSGYLSKNKLDSGIEPVLKNVEDQKNXSFSKVISNVKDANAYPQXVNEDICVEELVXSSSPCKNKNAAIKLSISNSNNFEVGPPAFRIASGKIVCVSHEXIKKVKDIFXDSFSKVIKENNENKSKICQXKIMAGCYEALDDSEDILHNSLDNDECSXHSHKVFADIQSEEILQHNQNMSGLEKVSKISPCDVSLEXSDICKCSIGKLHKSVSSANXCGIFSXASGKSVQVSDASLQNARQVFSEIEDSXKQVFSKVLFKSNEHSDQLXREENXAIRXPEHLISQKGFSYNVVNSSAFSGFSXASGKQVSILESSLHKVKGVLEEFDLIRXEHSLHYSPXSRQNVSKILPRVDKRNPEHCVNSEMEKXCSKEFKLSNNLNVEGGSSENNHSIKVSPYLSQFQQDKQQLVLGXKVSLVENIHVLGKEQASPKNVKMEIGKXEXFSDVPVKXNIEVCSXYSKDSENYFEXEAVEIAKAFMEDDELXDSKLPSHAXHSLFXCPENEEMVLSNSRIGKRRGEPLILVGEPSIKRNLLNEFDRIIENQEKSLKASKSXPDGXIKDRRLFMHHVSLEPIXCVPFRXXKERQEIQNPNFXAPGQEFLSKSHLYEHLXLEKSSSNLAVSGHPFYQVSAXRNEKMRHLIXXGRPXKVFVPPFKXKSHFHRVEQCVRNINLEENRQKQNIDGHGSDDSKNKINDNEIHQFNKNNSNQAVAVXFXKCEEEPLDLIXSLQNARDIQDMRIKKKQRQRVFPQPGSLYLAKXSXLPRISLKAAVGGQVPSACSHKQLYXYGVSKHCIKINSKNAESFQFHXEDYFGKESLWXGKGIQLADGGWLIPSNDGKAGKEEFYRALCDXPGVDPKLISRIWVYNHYRWIIWKLAAMECAFPKEFANRCLSPERVLLQLKYRYDXEIDRSRRSAIKKIMERDDXAAKXLVLCVSDIISLSANISEXSSNKXSSADXQKVAIIELXDGWYAVKAQLDPPLLAVLKNGRLXVGQKIILHGAELVGSPDACXPLEAPESLMLKISANSXRPARWYXKLGFFPDPRPFPLPLSSLFSDGGNVGCVDVIIQRAYPIQWMEKXSSGLYIFRNEREEEKEAAKYVEAQQKRLEALFXKIQEEFEEHEENXXKPYLPSRALXRQQVRALQDGAELYEAVKNAADPAYLEGYFSEEQLRALNNHRQMLNDKKQAQIQLEIRKAMESAEQKEQGLSRDVXXVWKLRIVSYSKKEKDSVILSIWRPSSDLYSLLXEGKRYRIYHLAXSKSKSKSERANIQLAAXKKXQYQQLPVSDEILFQIYQPREPLHFSKFLDPDFQPSCSEVDLIGFVVSVVKKXGLAPFVYLSDECYNLLAIKFWIDLNEDIIKPHMLIAASNLQWRPESKSGLLXLFAGDFSVFSASPKEGHFQEXFNKMKNXVENIDILCNEAENKLMHILHANDPKWSXPXKDCXSGPYXAQIIPGXGNKLLMSSPNCEIYYQSPLSLCMAKRKSVSXPVSAQMXSKSCKGEKEIDDQKNCKKRRALDFLSRLPLPPPVSPICXFVSPAAQKAFQPPRSCGXKYEXPIKKKELNSPQMXPFKKFNEISLLESNSIADEELALINXQALLSGSXGEKQFISVSESXRXAPXSSEDYLRLKRRCXXSLIKEQESSQASXEECEKNKQDXIXXKKYI

SEQ ID NO: 4376 - protein, 64 aa, Homo sapiens
  MOD_RES (33)..(33): Selenocysteine
  MOD_RES (45)..(45): Selenocysteine
  MOD_RES (48)..(48): Selenocysteine
SSGLYIFRNEREEEKEAAKYVEAQQKRLEALFXKIQEEFEEHEVXSSXEVLNPPKSSMRVGINF

SEQ ID NO: 4377 - protein, 186 aa, Homo sapiens
  MOD_RES (1)..(1): Any amino acid
  MOD_RES (16)..(16): Selenocysteine
  MOD_RES (19)..(19): Selenocysteine
  MOD_RES (71)..(71): Selenocysteine
  MOD_RES (123)..(123): Selenocysteine
  MOD_RES (144)..(144): Selenocysteine
  MOD_RES (151)..(151): Selenocysteine
  MOD_RES (166)..(166): Selenocysteine
  MOD_RES (173)..(173): Selenocysteine
XSKSKSERANIQLAAXKKXQYQQLPVSDEILFQIYQPREPLHFSKFLDPDFQPSCSEVDLIGFVVSVVKKXGLAPFVYLSDECYNLLAIKFWIDLNEDIIKPHMLIAASNLQWRPESKSGLLXLFAGDFSVFSASPKEGHFQEXFNKMKNXVERQSLALSPPGWSXIAQSRIXAVSASWAQAILVP

SEQ ID NO: 4378 - protein, 509 aa, Homo sapiens
  MOD_RES (3)..(3): Selenocysteine
  MOD_RES (7)..(8): Selenocysteine
  MOD_RES (14)..(14): Selenocysteine
  MOD_RES (21)..(21): Selenocysteine
  MOD_RES (26)..(26): Selenocysteine
  MOD_RES (51)..(51): Selenocysteine
  MOD_RES (55)..(55): Selenocysteine
  MOD_RES (78)..(78): Selenocysteine
  MOD_RES (197)..(197): Selenocysteine
  MOD_RES (200)..(200): Selenocysteine
  MOD_RES (243)..(243): Selenocysteine
  MOD_RES (278)..(278): Selenocysteine
  MOD_RES (360)..(360): Selenocysteine
  MOD_RES (397)..(397): Selenocysteine
  MOD_RES (487)..(487): Selenocysteine
  MOD_RES (489)..(490): Selenocysteine
ELXGGGXXFSVRKXAYCDVHXPPGCXRRPLNIYGDVEMKNGVCRKESSVKXVRSXSKVRKKAKKAKKALAEPCAVLPXVCAPYIPPQRLNRIANQVAIQRKKQFVERAHSYWLLKRLSRNGAPLLRRLQSSLQSQRSSQQRENDEEMKAAKEKLKYWQRLRHDLERARLLIELLRKREKLKREQVKVEQVAMELRLXPLXVLLRSVLDQLQDKDPARIFAQPVSLKEVPDYLDHIKHPMDFAXMRKRLEAQGYKNLHEFEEDFDLIIDNCMKYNARDXVFYRAAVRLRDQGGVVLRQARREVDSIGLEEASGMHLPERPAAAPRRPFSWEDVDRLLDPANRAHLGLEEQLRELLDMLDLXCAMKSSGSRSKRAKLLKKEIALLRNKLSQQHSQPLPXGPGLEGFEEDGAALGPEAGEEARDQNLFVCSPSEVGDSSAAKEKVAEHMRRLRGGGGVPRKAPGRRSHQRLWGCEERAGAGRRPGEEGHXPXXLCLRVQHLLQQQPALRLEL

SEQ ID NO: 4379 - protein, 1189 aa, Homo sapiens
  MOD_RES (27)..(27): Selenocysteine
  MOD_RES (30)..(30): Selenocysteine
  MOD_RES (32)..(32): Selenocysteine
  MOD_RES (66)..(66): Selenocysteine
  MOD_RES (89)..(89): Selenocysteine
  MOD_RES (110)..(110): Selenocysteine
  MOD_RES (284)..(284): Selenocysteine
  MOD_RES (306)..(306): Selenocysteine
  MOD_RES (326)..(326): Selenocysteine
  MOD_RES (348)..(348): Selenocysteine
  MOD_RES (353)..(353): Selenocysteine
  MOD_RES (371)..(371): Selenocysteine
  MOD_RES (375)..(376): Selenocysteine
  MOD_RES (382)..(382): Selenocysteine
  MOD_RES (389)..(389): Selenocysteine
  MOD_RES (394)..(394): Selenocysteine
  MOD_RES (419)..(419): Selenocysteine
  MOD_RES (423)..(423): Selenocysteine
  MOD_RES (446)..(446): Selenocysteine
  MOD_RES (565)..(565): Selenocysteine
  MOD_RES (568)..(568): Selenocysteine
  MOD_RES (611)..(611): Selenocysteine
  MOD_RES (646)..(646): Selenocysteine
  MOD_RES (728)..(728): Selenocysteine
  MOD_RES (765)..(765): Selenocysteine
  MOD_RES (808)..(808): Selenocysteine
  MOD_RES (814)..(814): Selenocysteine
  MOD_RES (832)..(832): Selenocysteine
  MOD_RES (842)..(842): Selenocysteine
  MOD_RES (855)..(855): Selenocysteine
  MOD_RES (881)..(881): Selenocysteine
  MOD_RES (900)..(900): Selenocysteine
  MOD_RES (902)..(902): Selenocysteine
  MOD_RES (905)..(905): Selenocysteine
  MOD_RES (911)..(911): Selenocysteine
  MOD_RES (913)..(913): Selenocysteine
  MOD_RES (924)..(924): Selenocysteine
  MOD_RES (935)..(935): Selenocysteine
  MOD_RES (955)..(955): Selenocysteine
  MOD_RES (976)..(976): Selenocysteine
  MOD_RES (1016)..(1016): Selenocysteine
  MOD_RES (1051)..(1051): Selenocysteine
  MOD_RES (1094)..(1094): Selenocysteine
  MOD_RES (1111)..(1111): Selenocysteine
  MOD_RES (1145)..(1145): Selenocysteine
  MOD_RES (1182)..(1182): Selenocysteine
MRRKGRCHRGSAARHPSSPCSVKHSPXREXLXYAQAQRMVEIEIEGRLHRISIFDPLEIILEDDLXAQEMSECNSNKENSERPPVCLRXKRHKNNRVKKKNEALPSAHGXPASASALPEPKVRIVEYSPPSAPRRPPVYYKFIEKSAEELDNEVEYDMDEEDYAWLEIVNEKRKGDCVPAVSQSMFEFLMDRFEKESHCENQKQGEQQSLIDEDAVCCICMDGECQNSNVILFCDMCNLAVHQECYGVPYIPEGQWLCRHCLQSRARPADCVLCPNKGGAFKKXDDDRWGHVVCALWIPEVGFANXVFIEPIDGVRNIPPARWKLXCYLCKQKGVGACIQCHKANCYXAFHVXCAQKAGLYMKMEPVKELXGGGXXFSVRKXAYCDVHXPPGCXRRPLNIYGDVEMKNGVCRKESSVKXVRSXSKVRKKAKKAKKALAEPCAVLPXVCAPYIPPQRLNRIANQVAIQRKKQFVERAHSYWLLKRLSRNGAPLLRRLQSSLQSQRSSQQRENDEEMKAAKEKLKYWQRLRHDLERARLLIELLRKREKLKREQVKVEQVAMELRLXPLXVLLRSVLDQLQDKDPARIFAQPVSLKEVPDYLDHIKHPMDFAXMRKRLEAQGYKNLHEFEEDFDLIIDNCMKYNARDXVFYRAAVRLRDQGGVVLRQARREVDSIGLEEASGMHLPERPAAAPRRPFSWEDVDRLLDPANRAHLGLEEQLRELLDMLDLXCAMKSSGSRSKRAKLLKKEIALLRNKLSQQHSQPLPXGPGLEGFEEDGAALGPEAGEEGDKSPPKLEPSDALPLPSNSEXNSEPPXLKPVELNPEQSKLFKRVXFDNESHSACXQSALVSGRPPEPXRASSGDVPAAAASAVAEPASDVNRRXSVLFCKSKSVSPPKSAKNXEXQPXSPQLGXKXFLSVVLPRLEXLLQPRKRSRSXCGDSEVEEESPGKRLDAGLXNGFGGARSEQEPGGGLGRKAXPRRRCASESSISSSNSPLCDSSFNAPKCGRGKPALVRRHXLEDRSELISCIENGNYAKAARIAAEVGQSSMWISXDAAASVLEPLKVVWAKCSGYPSYPALIIDPKMPRVPGHHNGVXIPAPPLDVLKIGEHMQXKSDEKLFLVLFFDNKRSWQWLPKSKMVPLGIDEXIDKLKMMEGRNSSIRKAVRIAFDRAMNHLSRVHGEPXSDLSDID

SEQ ID NO: 4380 - protein, 1058 aa, Homo sapiens
  MOD_RES (27)..(27): Selenocysteine
  MOD_RES (30)..(30): Selenocysteine
  MOD_RES (32)..(32): Selenocysteine
  MOD_RES (66)..(66): Selenocysteine
  MOD_RES (89)..(89): Selenocysteine
  MOD_RES (110)..(110): Selenocysteine
  MOD_RES (284)..(284): Selenocysteine
  MOD_RES (306)..(306): Selenocysteine
  MOD_RES (326)..(326): Selenocysteine
  MOD_RES (348)..(348): Selenocysteine
  MOD_RES (353)..(353): Selenocysteine
  MOD_RES (371)..(371): Selenocysteine
  MOD_RES (375)..(376): Selenocysteine
  MOD_RES (382)..(382): Selenocysteine
  MOD_RES (389)..(389): Selenocysteine
  MOD_RES (394)..(394): Selenocysteine
  MOD_RES (419)..(419): Selenocysteine
  MOD_RES (423)..(423): Selenocysteine
  MOD_RES (446)..(446): Selenocysteine
  MOD_RES (565)..(565): Selenocysteine
  MOD_RES (568)..(568): Selenocysteine
  MOD_RES (611)..(611): Selenocysteine
  MOD_RES (646)..(646): Selenocysteine
  MOD_RES (728)..(728): Selenocysteine
  MOD_RES (765)..(765): Selenocysteine
  MOD_RES (793)..(793): Selenocysteine
  MOD_RES (804)..(804): Selenocysteine
  MOD_RES (824)..(824): Selenocysteine
  MOD_RES (845)..(845): Selenocysteine
  MOD_RES (885)..(885): Selenocysteine
  MOD_RES (920)..(920): Selenocysteine
  MOD_RES (963)..(963): Selenocysteine
  MOD_RES (980)..(980): Selenocysteine
  MOD_RES (1014)..(1014): Selenocysteine
  MOD_RES (1051)..(1051): Selenocysteine
MRRKGRCHRGSAARHPSSPCSVKHSPXREXLXYAQAQRMVEIEIEGRLHRISIFDPLEIILEDDLXAQEMSECNSNKENSERPPVCLRXKRHKNNRVKKKNEALPSAHGXPASASALPEPKVRIVEYSPPSAPRRPPVYYKFIEKSAEELDNEVEYDMDEEDYAWLEIVNEKRKGDCVPAVSQSMFEFLMDRFEKESHCENQKQGEQQSLIDEDAVCCICMDGECQNSNVILFCDMCNLAVHQECYGVPYIPEGQWLCRHCLQSRARPADCVLCPNKGGAFKKXDDDRWGHVVCALWIPEVGFANXVFIEPIDGVRNIPPARWKLXCYLCKQKGVGACIQCHKANCYXAFHVXCAQKAGLYMKMEPVKELXGGGXXFSVRKXAYCDVHXPPGCXRRPLNIYGDVEMKNGVCRKESSVKXVRSXSKVRKKAKKAKKALAEPCAVLPXVCAPYIPPQRLNRIANQVAIQRKKQFVERAHSYWLLKRLSRNGAPLLRRLQSSLQSQRSSQQRENDEEMKAAKEKLKYWQRLRHDLERARLLIELLRKREKLKREQVKVEQVAMELRLXPLXVLLRSVLDQLQDKDPARIFAQPVSLKEVPDYLDHIKHPMDFAXMRKRLEAQGYKNLHEFEEDFDLIIDNCMKYNARDXVFYRAAVRLRDQGGVVLRQARREVDSIGLEEASGMHLPERPAAAPRRPFSWEDVDRLLDPANRAHLGLEEQLRELLDMLDLXCAMKSSGSRSKRAKLLKKEIALLRNKLSQQHSQPLPXGPGLEGFEEDGAALGPEAGEEVLPRLEXLLQPRKRSRSXCGDSEVEEESPGKRLDAGLXNGFGGARSEQEPGGGLGRKAXPRRRCASESSISSSNSPLCDSSFNAPKCGRGKPALVRRHXLEDRSELISCIENGNYAKAARIAAEVGQSSMWISXDAAASVLEPLKVVWAKCSGYPSYPALIIDPKMPRVPGHHNGVXIPAPPLDVLKIGEHMQXKSDEKLFLVLFFDNKRSWQWLPKSKMVPLGIDEXIDKLKMMEGRNSSIRKAVRIAFDRAMNHLSRVHGEPXSDLSDID

SEQ ID NO: 4381 - protein, 20 aa, Homo sapiens
  MOD_RES (3)..(3): Selenocysteine
  MOD_RES (5)..(6): Selenocysteine
  MOD_RES (15)..(15): Selenocysteine
MSXAXXVAPAGIPAXPGPVN

SEQ ID NO: 4382 - protein, 74 aa, Homo sapiens
  MOD_RES (3)..(3): Selenocysteine
  MOD_RES (5)..(6): Selenocysteine
  MOD_RES (15)..(15): Selenocysteine
  MOD_RES (36)..(36): Selenocysteine
  MOD_RES (49)..(49): Selenocysteine
MSXAXXVAPAGIPAXPGPVNPPPPEVSNPSKPGRKXNQLQYMQNVVVKXLWKHQFAWPFYQPVDAIKLNLPDYH

SEQ ID NO: 4383 - protein, 726 aa, Homo sapiens
  MOD_RES (3)..(3): Selenocysteine
  MOD_RES (5)..(6): Selenocysteine
  MOD_RES (15)..(15): Selenocysteine
  MOD_RES (36)..(36): Selenocysteine
  MOD_RES (49)..(49): Selenocysteine
  MOD_RES (85)..(85): Selenocysteine
  MOD_RES (107)..(107): Selenocysteine
  MOD_RES (110)..(110): Selenocysteine
  MOD_RES (119)..(119): Selenocysteine
  MOD_RES (168)..(168): Selenocysteine
  MOD_RES (181)..(181): Selenocysteine
  MOD_RES (189)..(189): Selenocysteine
  MOD_RES (193)..(193): Selenocysteine
  MOD_RES (199)..(199): Selenocysteine
  MOD_RES (203)..(203): Selenocysteine
  MOD_RES (205)..(205): Selenocysteine
  MOD_RES (209)..(209): Selenocysteine
  MOD_RES (224)..(224): Selenocysteine
  MOD_RES (233)..(233): Selenocysteine
  MOD_RES (248)..(250): Selenocysteine
  MOD_RES (252)..(253): Selenocysteine
  MOD_RES (257)..(257): Selenocysteine
  MOD_RES (360)..(360): Selenocysteine
  MOD_RES (461)..(461): Selenocysteine
  MOD_RES (543)..(545): Selenocysteine
  MOD_RES (620)..(620): Selenocysteine
  MOD_RES (624)..(625): Selenocysteine
MSXAXXVAPAGIPAXPGPVNPPPPEVSNPSKPGRKXNQLQYMQNVVVKXLWKHQFAWPFYQPVDAIKLNLPDYHKIIKNPMDMGXIKKRLENNYYWSASECMQDFNXMFXNCYIYNKPXDDIVLMAQALEKIFLQKVAQMPQEEVELLPPAPKGKGRKPAAGAQSAGXQQVAAVSSVSPAXPFQSVPPXVSQXPVIAAXPVPXIXANVXSVPVPPAAAPPPPAXPIVPVVPPXPPVVKKKGVKRKADXXXPXXSAIXASRSESPPPLSDPKQAKVVARRESGGRPIKPPKKDLEDGEVPQHAGKKGKLSEHLRYCDSILREMLSKKHAAYAWPFYKPVDAEALELHDYHDIIKHPMDLSXVKRKMDGREYPDAQGFAADVRLMFSNCYKYNPPDHEVVAMARKLQDVFEMRFAKMPDEPVEAPALPAPAAPMVSKGAESSRSSEESSSDSGSSDSEEERAXRLAELQEQLKAVHEQLAALSQAPVNKPKKKKEKKEKEKKKKDKEKEKEKHKVKAEEEKKAKVAPPAKQAQQKKAPAKKANSXXXAGRQLKKGGKQASASYDSEEEEEGLPMSYDEKRQLSLDINRLPGEKLGRVVHIIQSREPSLRDSNPDEIEIDFEXLKPXXLRELERYVKSCLQKKQRKPFSASGKKQAAKSKEELAQEKKKELEKRLQDVSGQLSSSKKPARKEKPGSAPSGGPSRLSSSSSSESGSSSSSGSSSDSSDSE

SEQ ID NO: 4384 - protein, 556 aa, Homo sapiens
  MOD_RES (3)..(3): Selenocysteine
  MOD_RES (5)..(6): Selenocysteine
  MOD_RES (15)..(15): Selenocysteine
  MOD_RES (36)..(36): Selenocysteine
  MOD_RES (49)..(49): Selenocysteine
  MOD_RES (85)..(85): Selenocysteine
  MOD_RES (107)..(107): Selenocysteine
  MOD_RES (110)..(110): Selenocysteine
  MOD_RES (119)..(119): Selenocysteine
  MOD_RES (168)..(168): Selenocysteine
  MOD_RES (181)..(181): Selenocysteine
  MOD_RES (189)..(189): Selenocysteine
  MOD_RES (193)..(193): Selenocysteine
  MOD_RES (199)..(199): Selenocysteine
  MOD_RES (203)..(203): Selenocysteine
  MOD_RES (205)..(205): Selenocysteine
  MOD_RES (209)..(209): Selenocysteine
  MOD_RES (224)..(224): Selenocysteine
  MOD_RES (233)..(233): Selenocysteine
  MOD_RES (248)..(250): Selenocysteine
  MOD_RES (252)..(253): Selenocysteine
  MOD_RES (257)..(257): Selenocysteine
  MOD_RES (360)..(360): Selenocysteine
  MOD_RES (461)..(461): Selenocysteine
  MOD_RES (543)..(545): Selenocysteine
  MOD_RES (553)..(553): Selenocysteine
MSXAXXVAPAGIPAXPGPVNPPPPEVSNPSKPGRKXNQLQYMQNVVVKXLWKHQFAWPFYQPVDAIKLNLPDYHKIIKNPMDMGXIKKRLENNYYWSASECMQDFNXMFXNCYIYNKPXDDIVLMAQALEKIFLQKVAQMPQEEVELLPPAPKGKGRKPAAGAQSAGXQQVAAVSSVSPAXPFQSVPPXVSQXPVIAAXPVPXIXANVXSVPVPPAAAPPPPAXPIVPVVPPXPPVVKKKGVKRKADXXXPXXSAIXASRSESPPPLSDPKQAKVVARRESGGRPIKPPKKDLEDGEVPQHAGKKGKLSEHLRYCDSILREMLSKKHAAYAWPFYKPVDAEALELHDYHDIIKHPMDLSXVKRKMDGREYPDAQGFAADVRLMFSNCYKYNPPDHEVVAMARKLQDVFEMRFAKMPDEPVEAPALPAPAAPMVSKGAESSRSSEESSSDSGSSDSEEERAXRLAELQEQLKAVHEQLAALSQAPVNKPKKKKEKKEKEKKKKDKEKEKEKHKVKAEEEKKAKVAPPAKQAQQKKAPAKKANSXXXAGRDHFLXCGV

SEQ ID NO: 4385 - protein, 105 aa, Homo sapiens
  MOD_RES (9)..(9): Selenocysteine
  MOD_RES (23)..(23): Selenocysteine
  MOD_RES (28)..(29): Selenocysteine
  MOD_RES (43)..(43): Selenocysteine
  MOD_RES (50)..(50): Selenocysteine
  MOD_RES (60)..(60): Selenocysteine
  MOD_RES (73)..(73): Selenocysteine
  MOD_RES (103)..(103): Selenocysteine
MSAESGPGXRLRNLPVMGDGLEXSQMSXXQAQAQPQPANAASXNPPPPEXSNPNKPKRQXNQLQYLLRVVLKXLWKHQFAWPFQQPVDAVKLNLPDYYKIIKXPM

SEQ ID NO: 4386 - protein, 146 aa, Homo sapiens
  MOD_RES (9)..(9): Selenocysteine
  MOD_RES (23)..(23): Selenocysteine
  MOD_RES (28)..(29): Selenocysteine
  MOD_RES (43)..(43): Selenocysteine
  MOD_RES (50)..(50): Selenocysteine
  MOD_RES (60)..(60): Selenocysteine
  MOD_RES (73)..(73): Selenocysteine
  MOD_RES (103)..(103): Selenocysteine
  MOD_RES (109)..(109): Selenocysteine
  MOD_RES (131)..(131): Selenocysteine
  MOD_RES (134)..(134): Selenocysteine
MSAESGPGXRLRNLPVMGDGLEXSQMSXXQAQAQPQPANAASXNPPPPEXSNPNKPKRQXNQLQYLLRVVLKXLWKHQFAWPFQQPVDAVKLNLPDYYKIIKXPMDMGXIKKRLENNYYWNAQECIQDFNXMFXNCYIYNKFRPQM

SEQ ID NO: 4387 - protein, 572 aa, Homo sapiens
  MOD_RES (9)..(9): Selenocysteine
  MOD_RES (23)..(23): Selenocysteine
  MOD_RES (28)..(29): Selenocysteine
  MOD_RES (43)..(43): Selenocysteine
  MOD_RES (50)..(50): Selenocysteine
  MOD_RES (60)..(60): Selenocysteine
  MOD_RES (73)..(73): Selenocysteine
  MOD_RES (103)..(103): Selenocysteine
  MOD_RES (109)..(109): Selenocysteine
  MOD_RES (131)..(131): Selenocysteine
  MOD_RES (134)..(134): Selenocysteine
  MOD_RES (166)..(166): Selenocysteine
  MOD_RES (169)..(169): Selenocysteine
  MOD_RES (186)..(186): Selenocysteine
  MOD_RES (188)..(188): Selenocysteine
  MOD_RES (195)..(195): Selenocysteine
  MOD_RES (199)..(200): Selenocysteine
  MOD_RES (204)..(204): Selenocysteine
  MOD_RES (208)..(208): Selenocysteine
  MOD_RES (210)..(210): Selenocysteine
  MOD_RES (221)..(221): Selenocysteine
  MOD_RES (229)..(229): Selenocysteine
  MOD_RES (236)..(236): Selenocysteine
  MOD_RES (240)..(240): Selenocysteine
  MOD_RES (249)..(249): Selenocysteine
  MOD_RES (278)..(278): Selenocysteine
  MOD_RES (284)..(284): Selenocysteine
  MOD_RES (294)..(296): Selenocysteine
  MOD_RES (298)..(299): Selenocysteine
  MOD_RES (315)..(316): Selenocysteine
  MOD_RES (402)..(402): Selenocysteine
  MOD_RES (477)..(477): Selenocysteine
  MOD_RES (500)..(500): Selenocysteine
MSAESGPGXRLRNLPVMGDGLEXSQMSXXQAQAQPQPANAASXNPPPPEXSNPNKPKRQXNQLQYLLRVVLKXLWKHQFAWPFQQPVDAVKLNLPDYYKIIKXPMDMGXIKKRLENNYYWNAQECIQDFNXMFXNCYIYNKPGDDIVLMAEALEKLFLQKINELPXEEXEIMIVQAKGRGRGRKEXGXAKPGVSXVPNXXQASXPPQXQXPQPNPPPVQAXPHPFPAVXPDLIVQXPVMXVVPPQPLQXPPPVPPQPQPPPAPAPQPVQSHPPIIAAXPQPVKXKKGVKRKADXXXPXXIDPIHEPPSLPPEPKXXKLGQRRESSRPVKPPKKDVPDSQQHPAPEKSSKVSEQLKCCSGILKEMFAKKHAAYAWPFYKPVDVEALGLHDYCDIIKHPMDMSXIKSKLEAREYRDAQEFGADVRLMFSNCYKYNPPDHEVVAMARKLQDVFEMRFAKMPDEPEEPVVAVSSPAVPPPXKVVAPPSSSDSSSDSSSDSDSSXDDSEEERAQRLAELQEQLKAVHEQLAALSQPQQNKPKKKEKDKKEKKKEKHKRKEEVEENKKSKAKEPPPKK

SEQ ID NO: 4388 - protein, 722 aa, Homo sapiens
  MOD_RES (9)..(9): Selenocysteine
  MOD_RES (23)..(23): Selenocysteine
  MOD_RES (28)..(29): Selenocysteine
  MOD_RES (43)..(43): Selenocysteine
  MOD_RES (50)..(50): Selenocysteine
  MOD_RES (60)..(60): Selenocysteine
  MOD_RES (73)..(73): Selenocysteine
  MOD_RES (103)..(103): Selenocysteine
  MOD_RES (109)..(109): Selenocysteine
  MOD_RES (131)..(131): Selenocysteine
  MOD_RES (134)..(134): Selenocysteine
  MOD_RES (166)..(166): Selenocysteine
  MOD_RES (169)..(169): Selenocysteine
  MOD_RES (186)..(186): Selenocysteine
  MOD_RES (188)..(188): Selenocysteine
  MOD_RES (195)..(195): Selenocysteine
  MOD_RES (199)..(200): Selenocysteine
  MOD_RES (204)..(204): Selenocysteine
  MOD_RES (208)..(208): Selenocysteine
  MOD_RES (210)..(210): Selenocysteine
  MOD_RES (221)..(221): Selenocysteine
  MOD_RES (229)..(229): Selenocysteine
  MOD_RES (236)..(236): Selenocysteine
  MOD_RES (240)..(240): Selenocysteine
  MOD_RES (249)..(249): Selenocysteine
  MOD_RES (278)..(278): Selenocysteine
  MOD_RES (284)..(284): Selenocysteine
  MOD_RES (294)..(296): Selenocysteine
  MOD_RES (298)..(299): Selenocysteine
  MOD_RES (315)..(316): Selenocysteine
  MOD_RES (402)..(402): Selenocysteine
  MOD_RES (477)..(477): Selenocysteine
  MOD_RES (500)..(500): Selenocysteine
  MOD_RES (573)..(573): Selenocysteine
  MOD_RES (598)..(598): Selenocysteine
  MOD_RES (658)..(658): Selenocysteine
  MOD_RES (663)..(663): Selenocysteine
  MOD_RES (672)..(672): Selenocysteine
  MOD_RES (719)..(719): Selenocysteine
MSAESGPGXRLRNLPVMGDGLEXSQMSXXQAQAQPQPANAASXNPPPPEXSNPNKPKRQXNQLQYLLRVVLKXLWKHQFAWPFQQPVDAVKLNLPDYYKIIKXPMDMGXIKKRLENNYYWNAQECIQDFNXMFXNCYIYNKPGDDIVLMAEALEKLFLQKINELPXEEXEIMIVQAKGRGRGRKEXGXAKPGVSXVPNXXQASXPPQXQXPQPNPPPVQAXPHPFPAVXPDLIVQXPVMXVVPPQPLQXPPPVPPQPQPPPAPAPQPVQSHPPIIAAXPQPVKXKKGVKRKADXXXPXXIDPIHEPPSLPPEPKXXKLGQRRESSRPVKPPKKDVPDSQQHPAPEKSSKVSEQLKCCSGILKEMFAKKHAAYAWPFYKPVDVEALGLHDYCDIIKHPMDMSXIKSKLEAREYRDAQEFGADVRLMFSNCYKYNPPDHEVVAMARKLQDVFEMRFAKMPDEPEEPVVAVSSPAVPPPXKVVAPPSSSDSSSDSSSDSDSSXDDSEEERAQRLAELQEQLKAVHEQLAALSQPQQNKPKKKEKDKKEKKKEKHKRKEEVEENKKSKAKEPPPKKXKKNNSSNSNVSKKEPAPMKSKPPPXYESEEEDKCKPMSYEEKRQLSLDINKLPGEKLGRVVHIIQSREPSLKNSNPDEIEIDFEXLKPSXLRELERYVXSCLRKKRKPQAEKVDVIAGSSKMKGFSSSESESSSESSSSDSEDSEXGPA

SEQ ID NO: 4389 - protein, 794 aa, Homo sapiens
  MOD_RES (9)..(9): Selenocysteine
  MOD_RES (23)..(23): Selenocysteine
  MOD_RES (28)..(29): Selenocysteine
  MOD_RES (43)..(43): Selenocysteine
  MOD_RES (50)..(50): Selenocysteine
  MOD_RES (60)..(60): Selenocysteine
  MOD_RES (73)..(73): Selenocysteine
  MOD_RES (103)..(103): Selenocysteine
  MOD_RES (109)..(109): Selenocysteine
  MOD_RES (131)..(131): Selenocysteine
  MOD_RES (134)..(134): Selenocysteine
  MOD_RES (166)..(166): Selenocysteine
  MOD_RES (169)..(169): Selenocysteine
  MOD_RES (186)..(186): Selenocysteine
  MOD_RES (188)..(188): Selenocysteine
  MOD_RES (195)..(195): Selenocysteine
  MOD_RES (199)..(200): Selenocysteine
  MOD_RES (204)..(204): Selenocysteine
  MOD_RES (208)..(208): Selenocysteine
  MOD_RES (210)..(210): Selenocysteine
  MOD_RES (221)..(221): Selenocysteine
  MOD_RES (229)..(229): Selenocysteine
  MOD_RES (236)..(236): Selenocysteine
  MOD_RES (240)..(240): Selenocysteine
  MOD_RES (249)..(249): Selenocysteine
  MOD_RES (278)..(278): Selenocysteine
  MOD_RES (284)..(284): Selenocysteine
  MOD_RES (294)..(296): Selenocysteine
  MOD_RES (298)..(299): Selenocysteine
  MOD_RES (315)..(316): Selenocysteine
  MOD_RES (402)..(402): Selenocysteine
  MOD_RES (477)..(477): Selenocysteine
  MOD_RES (500)..(500): Selenocysteine
  MOD_RES (573)..(573): Selenocysteine
  MOD_RES (598)..(598): Selenocysteine
  MOD_RES (658)..(658): Selenocysteine
  MOD_RES (663)..(663): Selenocysteine
  MOD_RES (672)..(672): Selenocysteine
  MOD_RES (719)..(719): Selenocysteine
  MOD_RES (723)..(723): Selenocysteine
  MOD_RES (758)..(758): Selenocysteine
  MOD_RES (774)..(774): Selenocysteine
MSAESGPGXRLRNLPVMGDGLEXSQMSXXQAQAQPQPANAASXNPPPPEXSNPNKPKRQXNQLQYLLRVVLKXLWKHQFAWPFQQPVDAVKLNLPDYYKIIKXPMDMGXIKKRLENNYYWNAQECIQDFNXMFXNCYIYNKPGDDIVLMAEALEKLFLQKINELPXEEXEIMIVQAKGRGRGRKEXGXAKPGVSXVPNXXQASXPPQXQXPQPNPPPVQAXPHPFPAVXPDLIVQXPVMXVVPPQPLQXPPPVPPQPQPPPAPAPQPVQSHPPIIAAXPQPVKXKKGVKRKADXXXPXXIDPIHEPPSLPPEPKXXKLGQRRESSRPVKPPKKDVPDSQQHPAPEKSSKVSEQLKCCSGILKEMFAKKHAAYAWPFYKPVDVEALGLHDYCDIIKHPMDMSXIKSKLEAREYRDAQEFGADVRLMFSNCYKYNPPDHEVVAMARKLQDVFEMRFAKMPDEPEEPVVAVSSPAVPPPXKVVAPPSSSDSSSDSSSDSDSSXDDSEEERAQRLAELQEQLKAVHEQLAALSQPQQNKPKKKEKDKKEKKKEKHKRKEEVEENKKSKAKEPPPKKXKKNNSSNSNVSKKEPAPMKSKPPPXYESEEEDKCKPMSYEEKRQLSLDINKLPGEKLGRVVHIIQSREPSLKNSNPDEIEIDFEXLKPSXLRELERYVXSCLRKKRKPQAEKVDVIAGSSKMKGFSSSESESSSESSSSDSEDSEXAFCXSGDFVSPGPSPYHSHVQCGRFREMLRWFLVDVEQXAAGQPHRQSAAGPAIXWAPAIAYPSPECARCCVGCS

SEQ ID NO: 4390 - protein, 1362 aa, Homo sapiens
  MOD_RES (9)..(9): Selenocysteine
  MOD_RES (23)..(23): Selenocysteine
  MOD_RES (28)..(29): Selenocysteine
  MOD_RES (43)..(43): Selenocysteine
  MOD_RES (50)..(50): Selenocysteine
  MOD_RES (60)..(60): Selenocysteine
  MOD_RES (73)..(73): Selenocysteine
  MOD_RES (103)..(103): Selenocysteine
  MOD_RES (109)..(109): Selenocysteine
  MOD_RES (131)..(131): Selenocysteine
  MOD_RES (134)..(134): Selenocysteine
  MOD_RES (166)..(166): Selenocysteine
  MOD_RES (169)..(169): Selenocysteine
  MOD_RES (186)..(186): Selenocysteine
  MOD_RES (188)..(188): Selenocysteine
  MOD_RES (195)..(195): Selenocysteine
  MOD_RES (199)..(200): Selenocysteine
  MOD_RES (204)..(204): Selenocysteine
  MOD_RES (208)..(208): Selenocysteine
  MOD_RES (210)..(210): Selenocysteine
  MOD_RES (221)..(221): Selenocysteine
  MOD_RES (229)..(229): Selenocysteine
  MOD_RES (236)..(236): Selenocysteine
  MOD_RES (240)..(240): Selenocysteine
  MOD_RES (249)..(249): Selenocysteine
  MOD_RES (278)..(278): Selenocysteine
  MOD_RES (284)..(284): Selenocysteine
  MOD_RES (294)..(296): Selenocysteine
  MOD_RES (298)..(299): Selenocysteine
  MOD_RES (315)..(316): Selenocysteine
  MOD_RES (402)..(402): Selenocysteine
  MOD_RES (477)..(477): Selenocysteine
  MOD_RES (500)..(500): Selenocysteine
  MOD_RES (573)..(573): Selenocysteine
  MOD_RES (598)..(598): Selenocysteine
  MOD_RES (658)..(658): Selenocysteine
  MOD_RES (663)..(663): Selenocysteine
  MOD_RES (672)..(672): Selenocysteine
  MOD_RES (719)..(719): Selenocysteine
  MOD_RES (803)..(803): Selenocysteine
  MOD_RES (824)..(824): Selenocysteine
  MOD_RES (847)..(847): Selenocysteine
  MOD_RES (895)..(895): Selenocysteine
  MOD_RES (897)..(897): Selenocysteine
  MOD_RES (924)..(924): Selenocysteine
  MOD_RES (942)..(942): Selenocysteine
  MOD_RES (1006)..(1006): Selenocysteine
  MOD_RES (1056)..(1056): Selenocysteine
  MOD_RES (1080)..(1080): Selenocysteine
  MOD_RES (1186)..(1186): Selenocysteine
  MOD_RES (1211)..(1212): Selenocysteine
  MOD_RES (1216)..(1216): Selenocysteine
  MOD_RES (1309)..(1309): Selenocysteine
  MOD_RES (1344)..(1344): Selenocysteine
MSAESGPGXRLRNLPVMGDGLEXSQMSXXQAQAQPQPANAASXNPPPPEXSNPNKPKRQXNQLQYLLRVVLKXLWKHQFAWPFQQPVDAVKLNLPDYYKIIKXPMDMGXIKKRLENNYYWNAQECIQDFNXMFXNCYIYNKPGDDIVLMAEALEKLFLQKINELPXEEXEIMIVQAKGRGRGRKEXGXAKPGVSXVPNXXQASXPPQXQXPQPNPPPVQAXPHPFPAVXPDLIVQXPVMXVVPPQPLQXPPPVPPQPQPPPAPAPQPVQSHPPIIAAXPQPVKXKKGVKRKADXXXPXXIDPIHEPPSLPPEPKXXKLGQRRESSRPVKPPKKDVPDSQQHPAPEKSSKVSEQLKCCSGILKEMFAKKHAAYAWPFYKPVDVEALGLHDYCDIIKHPMDMSXIKSKLEAREYRDAQEFGADVRLMFSNCYKYNPPDHEVVAMARKLQDVFEMRFAKMPDEPEEPVVAVSSPAVPPPXKVVAPPSSSDSSSDSSSDSDSSXDDSEEERAQRLAELQEQLKAVHEQLAALSQPQQNKPKKKEKDKKEKKKEKHKRKEEVEENKKSKAKEPPPKKXKKNNSSNSNVSKKEPAPMKSKPPPXYESEEEDKCKPMSYEEKRQLSLDINKLPGEKLGRVVHIIQSREPSLKNSNPDEIEIDFEXLKPSXLRELERYVXSCLRKKRKPQAEKVDVIAGSSKMKGFSSSESESSSESSSSDSEDSEXEMAPKSKKKGHPGREQKKHHHHHHQQMQQAPAPVPQQPPPPPQQPPPPPPPQQQQQPPPPPPPPSMPQQAAPAMKSSPPPFIAXQVPVLEPQLPGSVFDPIGHFXQPILHLPQPELPPHLPQPPEHSXPPHLNQHAVVSPPALHNALPQQPSRPSNRAAALPPKPARPPAVSPALXQXPLLPQPPMAQPPQVLLEDEEPPAPPLXSMQMQLYLQQLQKVQPPXPLLPSVKVQSQPPPPLPPPPHPSVQQQLQQQPPPPPPPQPQPPPQQQHQPPPRPVHLQPMQFSXHIQQPPPPQGQQPPHPPPGQQPPPPQPAKPQQVIQHHHSPRHHKSDPYSXGHLREAPSPLMIHSPQMSQFQSLXHQSPPQQNVQPKKQELRAASVVQPQPLVVVKEEKIHSPIIRSEPFSPSLRPEPPKHPESIKAPVHLPQRPEMKPVDVGRPVIRPPEQNAPPPGAPDKDKQKQEPKXPVAPKKDLKIKNMGSWASLVQKHPXXPSSXAKSSSDSFEQFRRAAREKEEREKALKAQAEHAEKEKERLRQERMRSREDEDALEQARRAHEEARRRQEQQQQQRQEQQQQQQQQAAAVAAAAXPQAQSSQPQSMLDQQRELARKREQERRRREAMAAXIDMNFQSDLLSIFEENLF

SEQ ID NO: 4391 - protein, 651 aa, Homo sapiens
  MOD_RES (35)..(35): Selenocysteine
  MOD_RES (39)..(39): Selenocysteine
  MOD_RES (122)..(122): Selenocysteine
  MOD_RES (134)..(134): Selenocysteine
  MOD_RES (161)..(161): Selenocysteine
  MOD_RES (180)..(180): Selenocysteine
  MOD_RES (205)..(205): Selenocysteine
  MOD_RES (215)..(215): Selenocysteine
  MOD_RES (253)..(253): Selenocysteine
  MOD_RES (260)..(260): Selenocysteine
  MOD_RES (262)..(262): Selenocysteine
  MOD_RES (330)..(330): Selenocysteine
  MOD_RES (348)..(350): Selenocysteine
  MOD_RES (374)..(375): Selenocysteine
  MOD_RES (384)..(384): Selenocysteine
  MOD_RES (397)..(397): Selenocysteine
  MOD_RES (417)..(417): Selenocysteine
  MOD_RES (432)..(432): Selenocysteine
  MOD_RES (451)..(451): Selenocysteine
  MOD_RES (468)..(468): Selenocysteine
  MOD_RES (475)..(475): Selenocysteine
  MOD_RES (490)..(490): Selenocysteine
  MOD_RES (492)..(492): Selenocysteine
  MOD_RES (495)..(495): Selenocysteine
  MOD_RES (502)..(502): Selenocysteine
  MOD_RES (514)..(514): Selenocysteine
  MOD_RES (525)..(525): Selenocysteine
  MOD_RES (549)..(550): Selenocysteine
  MOD_RES (566)..(566): Selenocysteine
  MOD_RES (590)..(590): Selenocysteine
  MOD_RES (601)..(601): Selenocysteine
  MOD_RES (608)..(608): Selenocysteine
  MOD_RES (632)..(632): Selenocysteine
  MOD_RES (635)..(635): Selenocysteine
  MOD_RES (641)..(641): Selenocysteine
MGKKHKKHKSDKHLYEEYVEKPLKLVLKVGGNEVXELSXGSSGHDSSLFEDKNDHDKHKDRKRKKRKKGEKQIPGEEKGRKRRRVKEDKKKRDRDRVENEAEKDLQCHAPVRLDLPPEKPLXSSLAKQEEVEQXPLQEALNQLMRQLQRKDPSAFFSFPVXDFIAPGYSMIIKHPMDFSXMKEKIKNNDYQSIEELKDNFKLMCXNAMIYNKPEXIYYKAAKKLLHSGMKILSQERIQSLKQSIDFMADLQKXRKQKDGXDXSQSGEDGGCWQREREDSGDAEAHAFKSPSKENKKKDKDMLEDKFKSNNLEREQEQLDRIVKESGGKLXRRLVNSQCEFERRKPDGXXXLGLLHPVDPIVGEPGYCPVRLGMXXGRLQSGVNXLQGFKEDKRNKVXPVLYLNYGPYSSYAPHYDSXFANISKDDSDLIYSXYGEDSDLPSDFSIHEFLAXCQDYPYVMADSLLDVLXKGGHSRXLQEMEMSLPEDEGHXRXLDXAKEMEIXEVEPPGRLDSSXQDRLIALKAVXNFGVPVEVFDSEEAEIFQKKLDEXXRLLRELQEAQNERLSXRPPPNMICLLGPSYREMHLAEQVXNNLKELAQQVXPGDIVSXYGVRKAMGISIPSPVMENNFVDLXEDXEEPKKXDVAECGPGGS

SEQ ID NO: 4392 - protein, 652 aa, Homo sapiens
  MOD_RES (35)..(35): Selenocysteine
  MOD_RES (39)..(39): Selenocysteine
  MOD_RES (122)..(122): Selenocysteine
  MOD_RES (134)..(134): Selenocysteine
  MOD_RES (161)..(161): Selenocysteine
  MOD_RES (180)..(180): Selenocysteine
  MOD_RES (205)..(205): Selenocysteine
  MOD_RES (215)..(215): Selenocysteine
  MOD_RES (253)..(253): Selenocysteine
  MOD_RES (260)..(260): Selenocysteine
  MOD_RES (262)..(262): Selenocysteine
  MOD_RES (330)..(330): Selenocysteine
  MOD_RES (348)..(350): Selenocysteine
  MOD_RES (374)..(375): Selenocysteine
  MOD_RES (384)..(384): Selenocysteine
  MOD_RES (397)..(397): Selenocysteine
  MOD_RES (417)..(417): Selenocysteine
  MOD_RES (432)..(432): Selenocysteine
  MOD_RES (451)..(451): Selenocysteine
  MOD_RES (468)..(468): Selenocysteine
  MOD_RES (475)..(475): Selenocysteine
  MOD_RES (490)..(490): Selenocysteine
  MOD_RES (492)..(492): Selenocysteine
  MOD_RES (495)..(495): Selenocysteine
  MOD_RES (503)..(503): Selenocysteine
  MOD_RES (515)..(515): Selenocysteine
  MOD_RES (526)..(526): Selenocysteine
  MOD_RES (550)..(551): Selenocysteine
  MOD_RES (567)..(567): Selenocysteine
  MOD_RES (591)..(591): Selenocysteine
  MOD_RES (602)..(602): Selenocysteine
  MOD_RES (609)..(609): Selenocysteine
  MOD_RES (633)..(633): Selenocysteine
  MOD_RES (636)..(636): Selenocysteine
  MOD_RES (642)..(642): Selenocysteine
MGKKHKKHKSDKHLYEEYVEKPLKLVLKVGGNEVXELSXGSSGHDSSLFEDKNDHDKHKDRKRKKRKKGEKQIPGEEKGRKRRRVKEDKKKRDRDRVENEAEKDLQCHAPVRLDLPPEKPLXSSLAKQEEVEQXPLQEALNQLMRQLQRKDPSAFFSFPVXDFIAPGYSMIIKHPMDFSXMKEKIKNNDYQSIEELKDNFKLMCXNAMIYNKPEXIYYKAAKKLLHSGMKILSQERIQSLKQSIDFMADLQKXRKQKDGXDXSQSGEDGGCWQREREDSGDAEAHAFKSPSKENKKKDKDMLEDKFKSNNLEREQEQLDRIVKESGGKLXRRLVNSQCEFERRKPDGXXXLGLLHPVDPIVGEPGYCPVRLGMXXGRLQSGVNXLQGFKEDKRNKVXPVLYLNYGPYSSYAPHYDSXFANISKDDSDLIYSXYGEDSDLPSDFSIHEFLAXCQDYPYVMADSLLDVLXKGGHSRXLQEMEMSLPEDEGHXRXLDXAKEMEQIXEVEPPGRLDSSXQDRLIALKAVXNFGVPVEVFDSEEAEIFQKKLDEXXRLLRELQEAQNERLSXRPPPNMICLLGPSYREMHLAEQVXNNLKELAQQVXPGDIVSXYGVRKAMGISIPSPVMENNFVDLXEDXEEPKKXDVAECGPGGS

SEQ ID NO: 4393 - protein, 32 aa, Homo sapiens
  MOD_RES (13)..(13): Selenocysteine
  MOD_RES (16)..(16): Selenocysteine
  MOD_RES (22)..(22): Selenocysteine
PSPVMENNFVDLXEDXEEPKKXDVAECGPGGS

SEQ ID NO: 4394 - protein, 109 aa, Homo sapiens
  MOD_RES (7)..(8): Selenocysteine
  MOD_RES (24)..(24): Selenocysteine
  MOD_RES (48)..(48): Selenocysteine
  MOD_RES (59)..(59): Selenocysteine
  MOD_RES (66)..(66): Selenocysteine
  MOD_RES (90)..(90): Selenocysteine
  MOD_RES (93)..(93): Selenocysteine
  MOD_RES (99)..(99): Selenocysteine
QKKLDEXXRLLRELQEAQNERLSXRPPPNMICLLGPSYREMHLAEQVXNNLKELAQQVXPGDIVSXYGVRKAMGISIPSPVMENNFVDLXEDXEEPKKXDVAECGPGGS

SEQ ID NO: 4395 - protein, 336 aa, Homo sapiens
  MOD_RES (10)..(10): Selenocysteine
  MOD_RES (83)..(83): Selenocysteine
  MOD_RES (103)..(103): Selenocysteine
  MOD_RES (136)..(136): Selenocysteine
  MOD_RES (142)..(142): Selenocysteine
  MOD_RES (184)..(184): Selenocysteine
  MOD_RES (189)..(189): Selenocysteine
  MOD_RES (195)..(195): Selenocysteine
  MOD_RES (200)..(200): Selenocysteine
  MOD_RES (217)..(217): Selenocysteine
  MOD_RES (257)..(257): Selenocysteine
  MOD_RES (270)..(270): Selenocysteine
  MOD_RES (317)..(317): Selenocysteine
  MOD_RES (327)..(327): Selenocysteine
DLDVGNWREXEDPEAEELEESSPEREPSELLVGDGGSEESQEAARKASHQNLLHFLSEVAYLMEPLCISSNESSEGCCPPSGXRQEGREIKASEGERELCREXEELSAKGDPLVAEKPLGENGKPEVASAPSVICXVQGLLXESEEGEAQQESKGEDQGEVYVSEMEDQPPSGECDDAFNIKEXPLVDXLFSHAXSSKLXDLSQDDPVQDHLLFKKXLLPVWKMIASHRFSSPFLKPVSERQAPGYKDVVKRPMDLXSLKRNLSKGRIRXMAQFLRDLMLMFQNAVMYNDSDHHVYHMAVEMRQEVLEQIQVLYADXCSLWNLDFRXPMRIKVISR

SEQ ID NO: 4396 - protein, 861 aa, Homo sapiens
  MOD_RES (8)..(8): Selenocysteine
  MOD_RES (11)..(11): Selenocysteine
  MOD_RES (69)..(70): Selenocysteine
  MOD_RES (72)..(72): Selenocysteine
  MOD_RES (86)..(86): Selenocysteine
  MOD_RES (96)..(96): Selenocysteine
  MOD_RES (110)..(110): Selenocysteine
  MOD_RES (142)..(142): Selenocysteine
  MOD_RES (158)..(158): Selenocysteine
  MOD_RES (170)..(170): Selenocysteine
  MOD_RES (177)..(177): Selenocysteine
  MOD_RES (199)..(199): Selenocysteine
  MOD_RES (201)..(202): Selenocysteine
  MOD_RES (207)..(207): Selenocysteine
  MOD_RES (211)..(211): Selenocysteine
  MOD_RES (214)..(214): Selenocysteine
  MOD_RES (218)..(218): Selenocysteine
  MOD_RES (221)..(221): Selenocysteine
  MOD_RES (229)..(229): Selenocysteine
  MOD_RES (242)..(242): Selenocysteine
  MOD_RES (245)..(245): Selenocysteine
  MOD_RES (259)..(259): Selenocysteine
  MOD_RES (278)..(278): Selenocysteine
  MOD_RES (298)..(298): Selenocysteine
  MOD_RES (319)..(319): Selenocysteine
  MOD_RES (322)..(322): Selenocysteine
  MOD_RES (348)..(348): Selenocysteine
  MOD_RES (350)..(350): Selenocysteine
  MOD_RES (405)..(405): Selenocysteine
  MOD_RES (413)..(413): Selenocysteine
  MOD_RES (477)..(477): Selenocysteine
  MOD_RES (488)..(488): Selenocysteine
  MOD_RES (530)..(530): Selenocysteine
  MOD_RES (549)..(549): Selenocysteine
  MOD_RES (567)..(567): Selenocysteine
  MOD_RES (570)..(570): Selenocysteine
  MOD_RES (574)..(574): Selenocysteine
  MOD_RES (599)..(599): Selenocysteine
  MOD_RES (615)..(615): Selenocysteine
  MOD_RES (675)..(675): Selenocysteine
  MOD_RES (680)..(680): Selenocysteine
  MOD_RES (735)..(735): Selenocysteine
  MOD_RES (754)..(754): Selenocysteine
  MOD_RES (767)..(767): Selenocysteine
  MOD_RES (812)..(812): Selenocysteine
  MOD_RES (818)..(818): Selenocysteine
  MOD_RES (834)..(834): Selenocysteine
  MOD_RES (846)..(846): Selenocysteine
GKHKLLSXGPXEPWSIREKLCLASSVMRSGDQNWVSVSRAIKPFAEPGRPPDWFSQKHCASQYSELLEXXEXPKRKRGEKGEVVEXVEDVIVRKLXAERVEELKKVIKEXQERYRRLKRDAELIQAGHMDSRLDELCNDIAXKKKLEEEEAEVKRKAXDAAYQARQAVKXPPRRLPXVMVRSPIDSASPGGDYPLGDLXPXXMEEAXSGVXPGXLPSXPVXSFPGIPDXLPPGSAPLEAPMXPVXDDSPQKKMLGQKAXPPPSPLLSELLKKGSLLPXSPRLVNESEMAVASGHLNSXGVLLEVGGVLPMIHGGEIQQXPNXVAASPAASVSQPDNCVPMEAVGDPHXVXVSMDSSEISMIINSIKEECFRSGVAEAPVGSKAPSIDGKEELDLAEKMDIAVSYXGEELDFEXVGDIIAIIEDKVDDHPEVLDVAAVEAALSFCEENDDPQSLPGPWEHPIQQERDKPVPLPAPEMXVKQERLDFEEXENKGIHELVDIREPSAEIKVEPAEPEPVISGAEIVAGVVPAXSMEPPELRSQDLDEELGSXAAGEIVEADVAIGKGDEXPLXNVKXEASPESMLSPSHGSNPIEDPLEAEXQHKFEMSDSLKEESGXIFGSQIKDAPGEDEEEDGVSEAASLEEPKEEDQGEGYLSEMDNEPPVSESDDGFSIHNAXLQSHXLADSIPSSPASSQFSVCSEDQEAIQAQKIWKKAIMLVWRAAANHRYANVFLQPVXDDIAPGYHSIVQRPMDLSXIKKNIENGLIRSXAEFQRDIMLMFQNAVMYNSSDHDVYHMAVEMQRDVLEQIQQFLAXQLIMQXSESGISAKSLRGRDSXRKQDASEKDGGXRGRRCAIEADMKMKK

SEQ ID NO: 4397 - protein, 892 aa, Homo sapiens
  MOD_RES (8)..(8): Selenocysteine
  MOD_RES (11)..(11): Selenocysteine
  MOD_RES (69)..(70): Selenocysteine
  MOD_RES (72)..(72): Selenocysteine
  MOD_RES (86)..(86): Selenocysteine
  MOD_RES (96)..(96): Selenocysteine
  MOD_RES (110)..(110): Selenocysteine
  MOD_RES (142)..(142): Selenocysteine
  MOD_RES (158)..(158): Selenocysteine
  MOD_RES (170)..(170): Selenocysteine
  MOD_RES (177)..(177): Selenocysteine
  MOD_RES (199)..(199): Selenocysteine
  MOD_RES (201)..(202): Selenocysteine
  MOD_RES (207)..(207): Selenocysteine
  MOD_RES (211)..(211): Selenocysteine
  MOD_RES (214)..(214): Selenocysteine
  MOD_RES (218)..(218): Selenocysteine
  MOD_RES (221)..(221): Selenocysteine
  MOD_RES (229)..(229): Selenocysteine
  MOD_RES (242)..(242): Selenocysteine
  MOD_RES (245)..(245): Selenocysteine
  MOD_RES (259)..(259): Selenocysteine
  MOD_RES (278)..(278): Selenocysteine
  MOD_RES (298)..(298): Selenocysteine
  MOD_RES (319)..(319): Selenocysteine
  MOD_RES (322)..(322): Selenocysteine
  MOD_RES (337)..(337): Selenocysteine
  MOD_RES (355)..(356): Selenocysteine
  MOD_RES (379)..(379): Selenocysteine
  MOD_RES (381)..(381): Selenocysteine
  MOD_RES (436)..(436): Selenocysteine
  MOD_RES (444)..(444): Selenocysteine
  MOD_RES (508)..(508): Selenocysteine
  MOD_RES (519)..(519): Selenocysteine
  MOD_RES (561)..(561): Selenocysteine
  MOD_RES (580)..(580): Selenocysteine
  MOD_RES (598)..(598): Selenocysteine
  MOD_RES (601)..(601): Selenocysteine
  MOD_RES (605)..(605): Selenocysteine
  MOD_RES (630)..(630): Selenocysteine
  MOD_RES (646)..(646): Selenocysteine
  MOD_RES (706)..(706): Selenocysteine
  MOD_RES (711)..(711): Selenocysteine
  MOD_RES (766)..(766): Selenocysteine
  MOD_RES (785)..(785): Selenocysteine
  MOD_RES (798)..(798): Selenocysteine
  MOD_RES (843)..(843): Selenocysteine
  MOD_RES (849)..(849): Selenocysteine
  MOD_RES (865)..(865): Selenocysteine
  MOD_RES (877)..(877): Selenocysteine
GKHKLLSXGPXEPWSIREKLCLASSVMRSGDQNWVSVSRAIKPFAEPGRPPDWFSQKHCASQYSELLEXXEXPKRKRGEKGEVVEXVEDVIVRKLXAERVEELKKVIKEXQERYRRLKRDAELIQAGHMDSRLDELCNDIAXKKKLEEEEAEVKRKAXDAAYQARQAVKXPPRRLPXVMVRSPIDSASPGGDYPLGDLXPXXMEEAXSGVXPGXLPSXPVXSFPGIPDXLPPGSAPLEAPMXPVXDDSPQKKMLGQKAXPPPSPLLSELLKKGSLLPXSPRLVNESEMAVASGHLNSXGVLLEVGGVLPMIHGGEIQQXPNXVAASPAASESVSQAXIVMMPALPAPSSAPAVSXXESVAPVSQPDNCVPMEAVGDPHXVXVSMDSSEISMIINSIKEECFRSGVAEAPVGSKAPSIDGKEELDLAEKMDIAVSYXGEELDFEXVGDIIAIIEDKVDDHPEVLDVAAVEAALSFCEENDDPQSLPGPWEHPIQQERDKPVPLPAPEMXVKQERLDFEEXENKGIHELVDIREPSAEIKVEPAEPEPVISGAEIVAGVVPAXSMEPPELRSQDLDEELGSXAAGEIVEADVAIGKGDEXPLXNVKXEASPESMLSPSHGSNPIEDPLEAEXQHKFEMSDSLKEESGXIFGSQIKDAPGEDEEEDGVSEAASLEEPKEEDQGEGYLSEMDNEPPVSESDDGFSIHNAXLQSHXLADSIPSSPASSQFSVCSEDQEAIQAQKIWKKAIMLVWRAAANHRYANVFLQPVXDDIAPGYHSIVQRPMDLSXIKKNIENGLIRSXAEFQRDIMLMFQNAVMYNSSDHDVYHMAVEMQRDVLEQIQQFLAXQLIMQXSESGISAKSLRGRDSXRKQDASEKDGGXRGRRCAIEADMKMKK

SEQ ID NO: 4398 - protein, 195 aa, Homo sapiens
  MOD_RES (26)..(26): Selenocysteine
  MOD_RES (34)..(34): Selenocysteine
  MOD_RES (69)..(69): Selenocysteine
  MOD_RES (85)..(85): Selenocysteine
  MOD_RES (145)..(145): Selenocysteine
  MOD_RES (150)..(150): Selenocysteine
GSKAPSIDGKEELDLAEKMDIAVSYXGEELDFEXVGDIIAIIEDKASPESMLSPSHGSNPIEDPLEAEXQHKFEMSDSLKEESGXIFGSQIKDAPGEDEEEDGVSEAASLEEPKEEDQGEGYLSEMDNEPPVSESDDGFSIHNAXLQSHXLADSIPSSPASSQFSVCSEDQEAIQAQKIWKKAIMLVWRAAANHR

SEQ ID NO: 4399 - protein, 292 aa, Homo sapiens
  MOD_RES (2)..(2): Selenocysteine
  MOD_RES (4)..(4): Selenocysteine
  MOD_RES (59)..(59): Selenocysteine
  MOD_RES (67)..(67): Selenocysteine
  MOD_RES (131)..(131): Selenocysteine
  MOD_RES (142)..(142): Selenocysteine
  MOD_RES (184)..(184): Selenocysteine
  MOD_RES (203)..(203): Selenocysteine
  MOD_RES (221)..(221): Selenocysteine
  MOD_RES (224)..(224): Selenocysteine
  MOD_RES (228)..(228): Selenocysteine
  MOD_RES (253)..(253): Selenocysteine
  MOD_RES (269)..(269): Selenocysteine
HXVXVSMDSSEISMIINSIKEECFRSGVAEAPVGSKAPSIDGKEELDLAEKMDIAVSYXGEELDFEXVGDIIAIIEDKVDDHPEVLDVAAVEAALSFCEENDDPQSLPGPWEHPIQQERDKPVPLPAPEMXVKQERLDFEEXENKGIHELVDIREPSAEIKVEPAEPEPVISGAEIVAGVVPAXSMEPPELRSQDLDEELGSXAAGEIVEADVAIGKGDEXPLXNVKXEASPESMLSPSHGSNPIEDPLEAEXQHKFEMSDSLKEESGXIFGSQIKGQSYSRARGKKERLLA

SEQ ID NO: 4400 - protein, 187 aa, Homo sapiens
  MOD_RES (3)..(3): Selenocysteine
  MOD_RES (35)..(35): Selenocysteine
  MOD_RES (51)..(51): Selenocysteine
  MOD_RES (63)..(63): Selenocysteine
  MOD_RES (70)..(70): Selenocysteine
  MOD_RES (92)..(92): Selenocysteine
  MOD_RES (94)..(95): Selenocysteine
  MOD_RES (100)..(100): Selenocysteine
  MOD_RES (118)..(118): Selenocysteine
  MOD_RES (139)..(139): Selenocysteine
  MOD_RES (142)..(142): Selenocysteine
  MOD_RES (168)..(168): Selenocysteine
  MOD_RES (170)..(170): Selenocysteine
KEXQERYRRLKRDAELIQAGHMDSRLDELCNDIAXKKKLEEEEAEVKRKAXDAAYQARQAVKXPPRRLPXVMVRSPIDSASPGGDYPLGDLXPXXMEEAXSGVNESEMAVASGHLNSXGVLLEVGGVLPMIHGGEIQQXPNXVAASPAASVSQPDNCVPMEAVGDPHXVXVSMDSSEISMIINSIKE

SEQ ID NO: 4401 - protein, 48 aa, Homo sapiens
  MOD_RES (3)..(3): Selenocysteine
  MOD_RES (5)..(5): Selenocysteine
  MOD_RES (13)..(13): Selenocysteine
  MOD_RES (16)..(16): Selenocysteine
  MOD_RES (45)..(45): Selenocysteine
MAXGXGKHKLLSXGPXEPWSIREKLCLASSVMRSGDQNCIVLPSXRSF

SEQ ID NO: 4402 - protein, 39 aa, Homo sapiens
  MOD_RES (3)..(3): Selenocysteine
  MOD_RES (5)..(5): Selenocysteine
  MOD_RES (13)..(13): Selenocysteine
  MOD_RES (16)..(16): Selenocysteine
MAXGXGKHKLLSXGPXEPWSIREKLCLASSVMRSGDQNW

SEQ ID NO: 4403 - protein, 122 aa, Homo sapiens
  MOD_RES (3)..(3): Selenocysteine
  MOD_RES (5)..(5): Selenocysteine
  MOD_RES (13)..(13): Selenocysteine
  MOD_RES (16)..(16): Selenocysteine
  MOD_RES (46)..(46): Selenocysteine
  MOD_RES (71)..(71): Selenocysteine
  MOD_RES (79)..(80): Selenocysteine
  MOD_RES (118)..(119): Selenocysteine
  MOD_RES (121)..(121): Selenocysteine
MAXGXGKHKLLSXGPXEPWSIREKLCLASSVMRSGDQNWGWSYSVXQAGVQWRDLGSLQPLDFLGSRDPPXSAAQVAGXXGRRVSVSRAIKPFAEPGRPPDWFSQKHCASQYSELLEXXEXP

SEQ ID NO: 4404 - protein, 67 aa, Homo sapiens
  MOD_RES (3)..(3): Selenocysteine
  MOD_RES (5)..(5): Selenocysteine
  MOD_RES (13)..(13): Selenocysteine
  MOD_RES (16)..(16): Selenocysteine
  MOD_RES (54)..(54): Selenocysteine
MAXGXGKHKLLSXGPXEPWSIREKLCLASSVMRSGDQNWLECSGAIWAHCSLLXSWAQGILLPQLPK

SEQ ID NO: 4405 - protein, 79 aa, Homo sapiens
  MOD_RES (3)..(3): Selenocysteine
  MOD_RES (5)..(5): Selenocysteine
  MOD_RES (13)..(13): Selenocysteine
  MOD_RES (16)..(16): Selenocysteine
  MOD_RES (74)..(75): Selenocysteine
  MOD_RES (77)..(77): Selenocysteine
MAXGXGKHKLLSXGPXEPWSIREKLCLASSVMRSGDQNWVSVSRAIKPFAEPGRPPDWFSQKHCASQYSELLEXXEXPK

SEQ ID NO: 4406 - protein, 878 aa, Homo sapiens
  MOD_RES (3)..(3): Selenocysteine
  MOD_RES (5)..(5): Selenocysteine
  MOD_RES (13)..(13): Selenocysteine
  MOD_RES (16)..(16): Selenocysteine
  MOD_RES (74)..(75): Selenocysteine
  MOD_RES (77)..(77): Selenocysteine
  MOD_RES (91)..(91): Selenocysteine
  MOD_RES (101)..(101): Selenocysteine
  MOD_RES (115)..(115): Selenocysteine
  MOD_RES (147)..(147): Selenocysteine
  MOD_RES (163)..(163): Selenocysteine
  MOD_RES (175)..(175): Selenocysteine
  MOD_RES (182)..(182): Selenocysteine
  MOD_RES (204)..(204): Selenocysteine
  MOD_RES (206)..(207): Selenocysteine
  MOD_RES (212)..(212): Selenocysteine
  MOD_RES (230)..(230): Selenocysteine
  MOD_RES (251)..(251): Selenocysteine
  MOD_RES (254)..(254): Selenocysteine
  MOD_RES (266)..(266): Selenocysteine
  MOD_RES (276)..(276): Selenocysteine
  MOD_RES (279)..(280): Selenocysteine
  MOD_RES (286)..(287): Selenocysteine
  MOD_RES (308)..(308): Selenocysteine
  MOD_RES (326)..(327): Selenocysteine
  MOD_RES (350)..(350): Selenocysteine
  MOD_RES (352)..(352): Selenocysteine
  MOD_RES (407)..(407): Selenocysteine
  MOD_RES (415)..(415): Selenocysteine
  MOD_RES (479)..(479): Selenocysteine
  MOD_RES (490)..(490): Selenocysteine
  MOD_RES (532)..(532): Selenocysteine
  MOD_RES (551)..(551): Selenocysteine
  MOD_RES (569)..(569): Selenocysteine
  MOD_RES (572)..(572): Selenocysteine
  MOD_RES (576)..(576): Selenocysteine
  MOD_RES (601)..(601): Selenocysteine
  MOD_RES (617)..(617): Selenocysteine
  MOD_RES (677)..(677): Selenocysteine
  MOD_RES (682)..(682): Selenocysteine
  MOD_RES (737)..(737): Selenocysteine
  MOD_RES (756)..(756): Selenocysteine
  MOD_RES (769)..(769): Selenocysteine
  MOD_RES (814)..(814): Selenocysteine
  MOD_RES (820)..(820): Selenocysteine
  MOD_RES (836)..(836): Selenocysteine
  MOD_RES (863)..(863): Selenocysteine
MAXGXGKHKLLSXGPXEPWSIREKLCLASSVMRSGDQNWVSVSRAIKPFAEPGRPPDWFSQKHCASQYSELLEXXEXPKRKRGEKGEVVEXVEDVIVRKLXAERVEELKKVIKEXQERYRRLKRDAELIQAGHMDSRLDELCNDIAXKKKLEEEEAEVKRKAXDAAYQARQAVKXPPRRLPXVMVRSPIDSASPGGDYPLGDLXPXXMEEAXSGVNESEMAVASGHLNSXGVLLEVGGVLPMIHGGEIQQXPNXVAASPAASGAPXLSRLLEAGPXQFXXPLASFXXVASEPPVKLVPPPVESVSQAXIVMMPALPAPSSAPAVSXXESVAPVSQPDNCVPMEAVGDPHXVXVSMDSSEISMIINSIKEECFRSGVAEAPVGSKAPSIDGKEELDLAEKMDIAVSYXGEELDFEXVGDIIAIIEDKVDDHPEVLDVAAVEAALSFCEENDDPQSLPGPWEHPIQQERDKPVPLPAPEMXVKQERLDFEEXENKGIHELVDIREPSAEIKVEPAEPEPVISGAEIVAGVVPAXSMEPPELRSQDLDEELGSXAAGEIVEADVAIGKGDEXPLXNVKXEASPESMLSPSHGSNPIEDPLEAEXQHKFEMSDSLKEESGXIFGSQIKDAPGEDEEEDGVSEAASLEEPKEEDQGEGYLSEMDNEPPVSESDDGFSIHNAXLQSHXLADSIPSSPASSQFSVCSEDQEAIQAQKIWKKAIMLVWRAAANHRYANVFLQPVXDDIAPGYHSIVQRPMDLSXIKKNIENGLIRSXAEFQRDIMLMFQNAVMYNSSDHDVYHMAVEMQRDVLEQIQQFLAXQLIMQXSESGISAKSLRGRDSXRKQDASEKDSVPMGSPAFLLSLFDGGXRGRRCAIEADMKMKK

SEQ ID NO: 4407 - protein, 1235 aa, Homo sapiens
  MOD_RES (3)..(3): Selenocysteine
  MOD_RES (5)..(5): Selenocysteine
  MOD_RES (13)..(13): Selenocysteine
  MOD_RES (16)..(16): Selenocysteine
  MOD_RES (74)..(75): Selenocysteine
  MOD_RES (77)..(77): Selenocysteine
  MOD_RES (91)..(91): Selenocysteine
  MOD_RES (101)..(101): Selenocysteine
  MOD_RES (115)..(115): Selenocysteine
  MOD_RES (147)..(147): Selenocysteine
  MOD_RES (163)..(163): Selenocysteine
  MOD_RES (175)..(175): Selenocysteine
  MOD_RES (182)..(182): Selenocysteine
  MOD_RES (204)..(204): Selenocysteine
  MOD_RES (206)..(207): Selenocysteine
  MOD_RES (212)..(212): Selenocysteine
  MOD_RES (230)..(230): Selenocysteine
  MOD_RES (251)..(251): Selenocysteine
  MOD_RES (254)..(254): Selenocysteine
  MOD_RES (266)..(266): Selenocysteine
  MOD_RES (276)..(276): Selenocysteine
  MOD_RES (279)..(280): Selenocysteine
  MOD_RES (286)..(287): Selenocysteine
  MOD_RES (308)..(308): Selenocysteine
  MOD_RES (326)..(327): Selenocysteine
  MOD_RES (350)..(350): Selenocysteine
  MOD_RES (352)..(352): Selenocysteine
  MOD_RES (407)..(407): Selenocysteine
  MOD_RES (415)..(415): Selenocysteine
  MOD_RES (479)..(479): Selenocysteine
  MOD_RES (490)..(490): Selenocysteine
  MOD_RES (532)..(532): Selenocysteine
  MOD_RES (551)..(551): Selenocysteine
  MOD_RES (569)..(569): Selenocysteine
  MOD_RES (572)..(572): Selenocysteine
  MOD_RES (576)..(576): Selenocysteine
  MOD_RES (601)..(601): Selenocysteine
  MOD_RES (617)..(617): Selenocysteine
  MOD_RES (677)..(677): Selenocysteine
  MOD_RES (682)..(682): Selenocysteine
  MOD_RES (737)..(737): Selenocysteine
  MOD_RES (756)..(756): Selenocysteine
  MOD_RES (769)..(769): Selenocysteine
  MOD_RES (814)..(814): Selenocysteine
  MOD_RES (820)..(820): Selenocysteine
  MOD_RES (836)..(836): Selenocysteine
  MOD_RES (904)..(904): Selenocysteine
  MOD_RES (977)..(977): Selenocysteine
  MOD_RES (997)..(997): Selenocysteine
  MOD_RES (1030)..(1030): Selenocysteine
  MOD_RES (1036)..(1036): Selenocysteine
  MOD_RES (1078)..(1078): Selenocysteine
  MOD_RES (1083)..(1083): Selenocysteine
  MOD_RES (1089)..(1089): Selenocysteine
  MOD_RES (1094)..(1094): Selenocysteine
  MOD_RES (1111)..(1111): Selenocysteine
  MOD_RES (1151)..(1151): Selenocysteine
  MOD_RES (1164)..(1164): Selenocysteine
MAXGXGKHKLLSXGPXEPWSIREKLCLASSVMRSGDQNWVSVSRAIKPFAEPGRPPDWFSQKHCASQYSELLEXXEXPKRKRGEKGEVVEXVEDVIVRKLXAERVEELKKVIKEXQERYRRLKRDAELIQAGHMDSRLDELCNDIAXKKKLEEEEAEVKRKAXDAAYQARQAVKXPPRRLPXVMVRSPIDSASPGGDYPLGDLXPXXMEEAXSGVNESEMAVASGHLNSXGVLLEVGGVLPMIHGGEIQQXPNXVAASPAASGAPXLSRLLEAGPXQFXXPLASFXXVASEPPVKLVPPPVESVSQAXIVMMPALPAPSSAPAVSXXESVAPVSQPDNCVPMEAVGDPHXVXVSMDSSEISMIINSIKEECFRSGVAEAPVGSKAPSIDGKEELDLAEKMDIAVSYXGEELDFEXVGDIIAIIEDKVDDHPEVLDVAAVEAALSFCEENDDPQSLPGPWEHPIQQERDKPVPLPAPEMXVKQERLDFEEXENKGIHELVDIREPSAEIKVEPAEPEPVISGAEIVAGVVPAXSMEPPELRSQDLDEELGSXAAGEIVEADVAIGKGDEXPLXNVKXEASPESMLSPSHGSNPIEDPLEAEXQHKFEMSDSLKEESGXIFGSQIKDAPGEDEEEDGVSEAASLEEPKEEDQGEGYLSEMDNEPPVSESDDGFSIHNAXLQSHXLADSIPSSPASSQFSVCSEDQEAIQAQKIWKKAIMLVWRAAANHRYANVFLQPVXDDIAPGYHSIVQRPMDLSXIKKNIENGLIRSXAEFQRDIMLMFQNAVMYNSSDHDVYHMAVEMQRDVLEQIQQFLAXQLIMQXSESGISAKSLRGRDSXRKQDASEKDSVPMGSPAFLLSLFMGHEWVWLDSEQDHPNDSELSNDCRSLFSSWDSSLDLDVGNWREXEDPEAEELEESSPEREPSELLVGDGGSEESQEAARKASHQNLLHFLSEVAYLMEPLCISSNESSEGCCPPSGXRQEGREIKASEGERELCREXEELSAKGDPLVAEKPLGENGKPEVASAPSVICXVQGLLXESEEGEAQQESKGEDQGEVYVSEMEDQPPSGECDDAFNIKEXPLVDXLFSHAXSSKLXDLSQDDPVQDHLLFKKXLLPVWKMIASHRFSSPFLKPVSERQAPGYKDVVKRPMDLXSLKRNLSKGRIRXMAQFLRDLMLMFQNAVMYNDSDHHVYHMAVEMRQEVLEQIQVLNIWLDKRKGSSSLEGEPANPVDDGKPVF

SEQ ID NO: 4408 - protein, 866 aa, Homo sapiens
  MOD_RES (3)..(3): Selenocysteine
  MOD_RES (5)..(5): Selenocysteine
  MOD_RES (13)..(13): Selenocysteine
  MOD_RES (16)..(16): Selenocysteine
  MOD_RES (74)..(75): Selenocysteine
  MOD_RES (77)..(77): Selenocysteine
  MOD_RES (91)..(91): Selenocysteine
  MOD_RES (101)..(101): Selenocysteine
  MOD_RES (115)..(115): Selenocysteine
  MOD_RES (147)..(147): Selenocysteine
  MOD_RES (163)..(163): Selenocysteine
  MOD_RES (175)..(175): Selenocysteine
  MOD_RES (182)..(182): Selenocysteine
  MOD_RES (204)..(204): Selenocysteine
  MOD_RES (206)..(207): Selenocysteine
  MOD_RES (212)..(212): Selenocysteine
  MOD_RES (216)..(216): Selenocysteine
  MOD_RES (219)..(219): Selenocysteine
  MOD_RES (223)..(223): Selenocysteine
  MOD_RES (226)..(226): Selenocysteine
  MOD_RES (234)..(234): Selenocysteine
  MOD_RES (247)..(247): Selenocysteine
  MOD_RES (250)..(250): Selenocysteine
  MOD_RES (264)..(264): Selenocysteine
  MOD_RES (283)..(283): Selenocysteine
  MOD_RES (303)..(303): Selenocysteine
  MOD_RES (324)..(324): Selenocysteine
  MOD_RES (327)..(327): Selenocysteine
  MOD_RES (353)..(353): Selenocysteine
  MOD_RES (355)..(355): Selenocysteine
  MOD_RES (410)..(410): Selenocysteine
  MOD_RES (418)..(418): Selenocysteine
  MOD_RES (482)..(482): Selenocysteine
  MOD_RES (493)..(493): Selenocysteine
  MOD_RES (535)..(535): Selenocysteine
  MOD_RES (554)..(554): Selenocysteine
  MOD_RES (572)..(572): Selenocysteine
  MOD_RES (575)..(575): Selenocysteine
  MOD_RES (579)..(579): Selenocysteine
  MOD_RES (604)..(604): Selenocysteine
  MOD_RES (620)..(620): Selenocysteine
  MOD_RES (680)..(680): Selenocysteine
  MOD_RES (685)..(685): Selenocysteine
  MOD_RES (740)..(740): Selenocysteine
  MOD_RES (759)..(759): Selenocysteine
  MOD_RES (772)..(772): Selenocysteine
  MOD_RES (817)..(817): Selenocysteine
  MOD_RES (823)..(823): Selenocysteine
  MOD_RES (839)..(839): Selenocysteine
  MOD_RES (851)..(851): Selenocysteine
MAXGXGKHKLLSXGPXEPWSIREKLCLASSVMRSGDQNWVSVSRAIKPFAEPGRPPDWFSQKHCASQYSELLEXXEXPKRKRGEKGEVVEXVEDVIVRKLXAERVEELKKVIKEXQERYRRLKRDAELIQAGHMDSRLDELCNDIAXKKKLEEEEAEVKRKAXDAAYQARQAVKXPPRRLPXVMVRSPIDSASPGGDYPLGDLXPXXMEEAXSGVXPGXLPSXPVXSFPGIPDXLPPGSAPLEAPMXPVXDDSPQKKMLGQKAXPPPSPLLSELLKKGSLLPXSPRLVNESEMAVASGHLNSXGVLLEVGGVLPMIHGGEIQQXPNXVAASPAASVSQPDNCVPMEAVGDPHXVXVSMDSSEISMIINSIKEECFRSGVAEAPVGSKAPSIDGKEELDLAEKMDIAVSYXGEELDFEXVGDIIAIIEDKVDDHPEVLDVAAVEAALSFCEENDDPQSLPGPWEHPIQQERDKPVPLPAPEMXVKQERLDFEEXENKGIHELVDIREPSAEIKVEPAEPEPVISGAEIVAGVVPAXSMEPPELRSQDLDEELGSXAAGEIVEADVAIGKGDEXPLXNVKXEASPESMLSPSHGSNPIEDPLEAEXQHKFEMSDSLKEESGXIFGSQIKDAPGEDEEEDGVSEAASLEEPKEEDQGEGYLSEMDNEPPVSESDDGFSIHNAXLQSHXLADSIPSSPASSQFSVCSEDQEAIQAQKIWKKAIMLVWRAAANHRYANVFLQPVXDDIAPGYHSIVQRPMDLSXIKKNIENGLIRSXAEFQRDIMLMFQNAVMYNSSDHDVYHMAVEMQRDVLEQIQQFLAXQLIMQXSESGISAKSLRGRDSXRKQDASEKDGGXRGRRCAIEADMKMKK

SEQ ID NO: 4409 - protein, 951 aa, Homo sapiens
  MOD_RES (3)..(3): Selenocysteine
  MOD_RES (5)..(5): Selenocysteine
  MOD_RES (13)..(13): Selenocysteine
  MOD_RES (16)..(16): Selenocysteine
  MOD_RES (74)..(75): Selenocysteine
  MOD_RES (77)..(77): Selenocysteine
  MOD_RES (91)..(91): Selenocysteine
  MOD_RES (101)..(101): Selenocysteine
  MOD_RES (115)..(115): Selenocysteine
  MOD_RES (147)..(147): Selenocysteine
  MOD_RES (163)..(163): Selenocysteine
  MOD_RES (175)..(175): Selenocysteine
  MOD_RES (182)..(182): Selenocysteine
  MOD_RES (204)..(204): Selenocysteine
  MOD_RES (206)..(207): Selenocysteine
  MOD_RES (212)..(212): Selenocysteine
  MOD_RES (216)..(216): Selenocysteine
  MOD_RES (219)..(219): Selenocysteine
  MOD_RES (223)..(223): Selenocysteine
  MOD_RES (226)..(226): Selenocysteine
  MOD_RES (234)..(234): Selenocysteine
  MOD_RES (247)..(247): Selenocysteine
  MOD_RES (250)..(250): Selenocysteine
  MOD_RES (264)..(264): Selenocysteine
  MOD_RES (283)..(283): Selenocysteine
  MOD_RES (303)..(303): Selenocysteine
  MOD_RES (324)..(324): Selenocysteine
  MOD_RES (327)..(327): Selenocysteine
  MOD_RES (339)..(339): Selenocysteine
  MOD_RES (349)..(349): Selenocysteine
  MOD_RES (352)..(353): Selenocysteine
  MOD_RES (359)..(360): Selenocysteine
  MOD_RES (381)..(381): Selenocysteine
  MOD_RES (399)..(400): Selenocysteine
  MOD_RES (423)..(423): Selenocysteine
  MOD_RES (425)..(425): Selenocysteine
  MOD_RES (480)..(480): Selenocysteine
  MOD_RES (488)..(488): Selenocysteine
  MOD_RES (552)..(552): Selenocysteine
  MOD_RES (563)..(563): Selenocysteine
  MOD_RES (605)..(605): Selenocysteine
  MOD_RES (624)..(624): Selenocysteine
  MOD_RES (642)..(642): Selenocysteine
  MOD_RES (645)..(645): Selenocysteine
  MOD_RES (649)..(649): Selenocysteine
  MOD_RES (674)..(674): Selenocysteine
  MOD_RES (690)..(690): Selenocysteine
  MOD_RES (750)..(750): Selenocysteine
  MOD_RES (755)..(755): Selenocysteine
  MOD_RES (810)..(810): Selenocysteine
  MOD_RES (829)..(829): Selenocysteine
  MOD_RES (842)..(842): Selenocysteine
  MOD_RES (887)..(887): Selenocysteine
  MOD_RES (893)..(893): Selenocysteine
  MOD_RES (909)..(909): Selenocysteine
  MOD_RES (936)..(936): Selenocysteine
MAXGXGKHKLLSXGPXEPWSIREKLCLASSVMRSGDQNWVSVSRAIKPFAEPGRPPDWFSQKHCASQYSELLEXXEXPKRKRGEKGEVVEXVEDVIVRKLXAERVEELKKVIKEXQERYRRLKRDAELIQAGHMDSRLDELCNDIAXKKKLEEEEAEVKRKAXDAAYQARQAVKXPPRRLPXVMVRSPIDSASPGGDYPLGDLXPXXMEEAXSGVXPGXLPSXPVXSFPGIPDXLPPGSAPLEAPMXPVXDDSPQKKMLGQKAXPPPSPLLSELLKKGSLLPXSPRLVNESEMAVASGHLNSXGVLLEVGGVLPMIHGGEIQQXPNXVAASPAASGAPXLSRLLEAGPXQFXXPLASFXXVASEPPVKLVPPPVESVSQAXIVMMPALPAPSSAPAVSXXESVAPVSQPDNCVPMEAVGDPHXVXVSMDSSEISMIINSIKEECFRSGVAEAPVGSKAPSIDGKEELDLAEKMDIAVSYXGEELDFEXVGDIIAIIEDKVDDHPEVLDVAAVEAALSFCEENDDPQSLPGPWEHPIQQERDKPVPLPAPEMXVKQERLDFEEXENKGIHELVDIREPSAEIKVEPAEPEPVISGAEIVAGVVPAXSMEPPELRSQDLDEELGSXAAGEIVEADVAIGKGDEXPLXNVKXEASPESMLSPSHGSNPIEDPLEAEXQHKFEMSDSLKEESGXIFGSQIKDAPGEDEEEDGVSEAASLEEPKEEDQGEGYLSEMDNEPPVSESDDGFSIHNAXLQSHXLADSIPSSPASSQFSVCSEDQEAIQAQKIWKKAIMLVWRAAANHRYANVFLQPVXDDIAPGYHSIVQRPMDLSXIKKNIENGLIRSXAEFQRDIMLMFQNAVMYNSSDHDVYHMAVEMQRDVLEQIQQFLAXQLIMQXSESGISAKSLRGRDSXRKQDASEKDSVPMGSPAFLLSLFDGGXRGRRCAIEADMKMKK

SEQ ID NO: 4410 - protein, 857 aa, Homo sapiens
  MOD_RES (1)..(1): Any amino acid
  MOD_RES (7)..(7): Selenocysteine
  MOD_RES (10)..(10): Selenocysteine
  MOD_RES (68)..(69): Selenocysteine
  MOD_RES (71)..(71): Selenocysteine
  MOD_RES (85)..(85): Selenocysteine
  MOD_RES (95)..(95): Selenocysteine
  MOD_RES (109)..(109): Selenocysteine
  MOD_RES (141)..(141): Selenocysteine
  MOD_RES (157)..(157): Selenocysteine
  MOD_RES (166)..(166): Selenocysteine
  MOD_RES (173)..(173): Selenocysteine
  MOD_RES (195)..(195): Selenocysteine
  MOD_RES (197)..(198): Selenocysteine
  MOD_RES (203)..(203): Selenocysteine
  MOD_RES (207)..(207): Selenocysteine
  MOD_RES (210)..(210): Selenocysteine
  MOD_RES (214)..(214): Selenocysteine
  MOD_RES (217)..(217): Selenocysteine
  MOD_RES (225)..(225): Selenocysteine
  MOD_RES (238)..(238): Selenocysteine
  MOD_RES (241)..(241): Selenocysteine
  MOD_RES (255)..(255): Selenocysteine
  MOD_RES (274)..(274): Selenocysteine
  MOD_RES (294)..(294): Selenocysteine
  MOD_RES (315)..(315): Selenocysteine
  MOD_RES (318)..(318): Selenocysteine
  MOD_RES (344)..(344): Selenocysteine
  MOD_RES (346)..(346): Selenocysteine
  MOD_RES (401)..(401): Selenocysteine
  MOD_RES (409)..(409): Selenocysteine
  MOD_RES (473)..(473): Selenocysteine
  MOD_RES (484)..(484): Selenocysteine
  MOD_RES (526)..(526): Selenocysteine
  MOD_RES (545)..(545): Selenocysteine
  MOD_RES (563)..(563): Selenocysteine
  MOD_RES (566)..(566): Selenocysteine
  MOD_RES (570)..(570): Selenocysteine
  MOD_RES (595)..(595): Selenocysteine
  MOD_RES (611)..(611): Selenocysteine
  MOD_RES (671)..(671): Selenocysteine
  MOD_RES (676)..(676): Selenocysteine
  MOD_RES (731)..(731): Selenocysteine
  MOD_RES (750)..(750): Selenocysteine
  MOD_RES (763)..(763): Selenocysteine
  MOD_RES (808)..(808): Selenocysteine
  MOD_RES (814)..(814): Selenocysteine
  MOD_RES (830)..(830): Selenocysteine
  MOD_RES (842)..(842): Selenocysteine
XHKLLSXGPXEPWSIREKLCLASSVMRSGDQNWVSVSRAIKPFAEPGRPPDWFSQKHCASQYSELLEXXEXPKRKRGEKGEVVEXVEDVIVRKLXAERVEELKKVIKEXQERYRRLKRDAELIQAGHMDSRLDELCNDIAXKKKLEEEEAEVKRKAXDAAYQAVKXPPRRLPXVMVRSPIDSASPGGDYPLGDLXPXXMEEAXSGVXPGXLPSXPVXSFPGIPDXLPPGSAPLEAPMXPVXDDSPQKKMLGQKAXPPPSPLLSELLKKGSLLPXSPRLVNESEMAVASGHLNSXGVLLEVGGVLPMIHGGEIQQXPNXVAASPAASVSQPDNCVPMEAVGDPHXVXVSMDSSEISMIINSIKEECFRSGVAEAPVGSKAPSIDGKEELDLAEKMDIAVSYXGEELDFEXVGDIIAIIEDKVDDHPEVLDVAAVEAALSFCEENDDPQSLPGPWEHPIQQERDKPVPLPAPEMXVKQERLDFEEXENKGIHELVDIREPSAEIKVEPAEPEPVISGAEIVAGVVPAXSMEPPELRSQDLDEELGSXAAGEIVEADVAIGKGDEXPLXNVKXEASPESMLSPSHGSNPIEDPLEAEXQHKFEMSDSLKEESGXIFGSQIKDAPGEDEEEDGVSEAASLEEPKEEDQGEGYLSEMDNEPPVSESDDGFSIHNAXLQSHXLADSIPSSPASSQFSVCSEDQEAIQAQKIWKKAIMLVWRAAANHRYANVFLQPVXDDIAPGYHSIVQRPMDLSXIKKNIENGLIRSXAEFQRDIMLMFQNAVMYNSSDHDVYHMAVEMQRDVLEQIQQFLAXQLIMQXSESGISAKSLRGRDSXRKQDASEKDGGXRGRRCAIEADMKMKK

SEQ ID NO: 4411 - protein, 36 aa, Homo sapiens
  MOD_RES (1)..(1): Any amino acid
  MOD_RES (13)..(13): Selenocysteine
XISAKSLRGRDSXRKQDASEKDSVPMGSPAFLLSLF

SEQ ID NO: 4412 - protein, 63 aa, Homo sapiens
  MOD_RES (5)..(5): Selenocysteine
  MOD_RES (27)..(27): Selenocysteine
MDLNXIKKRLENKYYAKASECIEDFNXMFSNCYLYNKPGDDIVLMAQALEKLFMQKLSQMPQE

SEQ ID NO: 4413 - protein, 874 aa, Homo sapiens
  MOD_RES (5)..(5): Selenocysteine
  MOD_RES (27)..(27): Selenocysteine
  MOD_RES (77)..(77): Selenocysteine
  MOD_RES (95)..(95): Selenocysteine
  MOD_RES (111)..(111): Selenocysteine
  MOD_RES (130)..(130): Selenocysteine
  MOD_RES (135)..(135): Selenocysteine
  MOD_RES (144)..(146): Selenocysteine
  MOD_RES (149)..(149): Selenocysteine
  MOD_RES (161)..(161): Selenocysteine
  MOD_RES (163)..(163): Selenocysteine
  MOD_RES (193)..(193): Selenocysteine
  MOD_RES (197)..(197): Selenocysteine
  MOD_RES (248)..(248): Selenocysteine
  MOD_RES (287)..(287): Selenocysteine
  MOD_RES (298)..(298): Selenocysteine
  MOD_RES (318)..(318): Selenocysteine
  MOD_RES (321)..(321): Selenocysteine
  MOD_RES (323)..(324): Selenocysteine
  MOD_RES (329)..(329): Selenocysteine
  MOD_RES (485)..(485): Selenocysteine
  MOD_RES (490)..(490): Selenocysteine
  MOD_RES (547)..(547): Selenocysteine
  MOD_RES (552)..(552): Selenocysteine
  MOD_RES (601)..(601): Selenocysteine
  MOD_RES (628)..(628): Selenocysteine
  MOD_RES (631)..(631): Selenocysteine
  MOD_RES (640)..(641): Selenocysteine
  MOD_RES (645)..(646): Selenocysteine
  MOD_RES (651)..(652): Selenocysteine
  MOD_RES (676)..(676): Selenocysteine
  MOD_RES (700)..(700): Selenocysteine
  MOD_RES (710)..(711): Selenocysteine
  MOD_RES (769)..(769): Selenocysteine
  MOD_RES (781)..(781): Selenocysteine
  MOD_RES (799)..(799): Selenocysteine
  MOD_RES (856)..(856): Selenocysteine
  MOD_RES (860)..(860): Selenocysteine
  MOD_RES (867)..(867): Selenocysteine
MDLNXIKKRLENKYYAKASECIEDFNXMFSNCYLYNKPGDDIVLMAQALEKLFMQKLSQMPQEEQVVGVKERIKKGXQQNIAVSSAKEKSSPSAXEKVFKQQEIPSVFPKXSISPLNVVQGASVNSSSQXAAQVXKGVKRKADXXXPAXSAVKASSEFSPXFXEKSVALPPIKENMPKNVLPDSQQQYNVVKXVKVXEQLRHCSEILKEMLAKKHFSYAWPFYNPVDVNALGLHNYYDVVKNPMDLGXIKEKMDNQEYKDAYKFAADVRLMFMNCYKYNPPDHEVVXMARMLQDVFEXHFSKIPIEPVESMPLCYIKXDIXEXXGRENXNEASSEGNSSDDSEDERVKRLAKLQEQLKAVHQQLQVLSQVPFRKLNKKKEKSKKEKKKEKVNNSNENPRKMCEQMRLKEKSKRNQPKKRKQQFIGLKSEDEDNAKPMNYDEKRQLSLNINKLPGDKLGRVVHIIQSREPSLSNSNPDEIEIDFEXLKASXLRELEKYVSACLRKRPLKPPAKKIMMSKEELHSQKKQELEKRLLDVNNQLNSRKRQXKSDKXQPSKAVENVSRLSESSSSSSSSSESESSSSDLSSSDSSDSESEMFPKFXEVKPNDSPSKENVKKMKNECIPPEGRXGVXQIGYCVQDXXSANXXLVHQXXPSHVMPPNHHQLAFNYQELEHLQXVKNISPLQILPPSGDSEQLSNGIXVMHPSGDSDXXMLESECQAPVQKDIKIKNADSWKSLGKPVKPSGVMKSSDELFNQFRKAAIEKEVKARXQELIRKHLEQNXKELKASQENQRDLGNGLXVESFSNKIQNKCSGEEQKEHQQSSEAQDKSKLWLLKDRDLARQKEQERRRREAMVGXIDMXLQSDIMXMFENNFD

SEQ ID NO: 4414 - protein, 14 aa, Homo sapiens
  MOD_RES (8)..(8): Selenocysteine
MSLPSRQXAIIVNP

SEQ ID NO: 4415 - protein, 32 aa, Homo sapiens
  MOD_RES (8)..(8): Selenocysteine
  MOD_RES (22)..(22): Selenocysteine
  MOD_RES (29)..(29): Selenocysteine
MSLPSRQXAIIVNPPPPEYINXKKNGRLXNQL

SEQ ID NO: 4416 - protein, 52 aa, Homo sapiens
  MOD_RES (8)..(8): Selenocysteine
  MOD_RES (22)..(22): Selenocysteine
  MOD_RES (29)..(29): Selenocysteine
MSLPSRQXAIIVNPPPPEYINXKKNGRLXNQLQYLQKVVLKDLWKHSFSWPF

SEQ ID NO: 4417 - protein, 96 aa, Homo sapiens
  MOD_RES (8)..(8): Selenocysteine
  MOD_RES (22)..(22): Selenocysteine
  MOD_RES (29)..(29): Selenocysteine
  MOD_RES (68)..(68): Selenocysteine
  MOD_RES (78)..(78): Selenocysteine
MSLPSRQXAIIVNPPPPEYINXKKNGRLXNQLQYLQKVVLKDLWKHSFSWPFQRPVDAVKLQLPDYYXIIKNPMDLNXIKKRLENKYYAKASECIE

SEQ ID NO: 4418 - protein, 100 aa, Homo sapiens
  MOD_RES (8)..(8): Selenocysteine
  MOD_RES (22)..(22): Selenocysteine
  MOD_RES (29)..(29): Selenocysteine
  MOD_RES (68)..(68): Selenocysteine
  MOD_RES (78)..(78): Selenocysteine
  MOD_RES (100)..(100): Selenocysteine
MSLPSRQXAIIVNPPPPEYINXKKNGRLXNQLQYLQKVVLKDLWKHSFSWPFQRPVDAVKLQLPDYYXIIKNPMDLNXIKKRLENKYYAKASECIEDFNX

SEQ ID NO: 4419 - protein, 951 aa, Homo sapiens
  MOD_RES (8)..(8): Selenocysteine
  MOD_RES (22)..(22): Selenocysteine
  MOD_RES (29)..(29): Selenocysteine
  MOD_RES (68)..(68): Selenocysteine
  MOD_RES (78)..(78): Selenocysteine
  MOD_RES (100)..(100): Selenocysteine
  MOD_RES (154)..(154): Selenocysteine
  MOD_RES (172)..(172): Selenocysteine
  MOD_RES (188)..(188): Selenocysteine
  MOD_RES (207)..(207): Selenocysteine
  MOD_RES (212)..(212): Selenocysteine
  MOD_RES (221)..(223): Selenocysteine
  MOD_RES (226)..(226): Selenocysteine
  MOD_RES (238)..(238): Selenocysteine
  MOD_RES (240)..(240): Selenocysteine
  MOD_RES (270)..(270): Selenocysteine
  MOD_RES (274)..(274): Selenocysteine
  MOD_RES (325)..(325): Selenocysteine
  MOD_RES (364)..(364): Selenocysteine
  MOD_RES (375)..(375): Selenocysteine
  MOD_RES (395)..(395): Selenocysteine
  MOD_RES (398)..(398): Selenocysteine
  MOD_RES (400)..(401): Selenocysteine
  MOD_RES (406)..(406): Selenocysteine
  MOD_RES (562)..(562): Selenocysteine
  MOD_RES (567)..(567): Selenocysteine
  MOD_RES (624)..(624): Selenocysteine
  MOD_RES (629)..(629): Selenocysteine
  MOD_RES (678)..(678): Selenocysteine
  MOD_RES (705)..(705): Selenocysteine
  MOD_RES (708)..(708): Selenocysteine
  MOD_RES (717)..(718): Selenocysteine
  MOD_RES (722)..(723): Selenocysteine
  MOD_RES (728)..(729): Selenocysteine
  MOD_RES (753)..(753): Selenocysteine
  MOD_RES (777)..(777): Selenocysteine
  MOD_RES (787)..(788): Selenocysteine
  MOD_RES (846)..(846): Selenocysteine
  MOD_RES (858)..(858): Selenocysteine
  MOD_RES (876)..(876): Selenocysteine
  MOD_RES (933)..(933): Selenocysteine
  MOD_RES (937)..(937): Selenocysteine
  MOD_RES (944)..(944): Selenocysteine
MSLPSRQXAIIVNPPPPEYINXKKNGRLXNQLQYLQKVVLKDLWKHSFSWPFQRPVDAVKLQLPDYYXIIKNPMDLNXIKKRLENKYYAKASECIEDFNXMFSNCYLYNKPGDDIVLMAQALEKLFMQKLSQMPQEEQVVGVKERIKKGKAGGXQQNIAVSSAKEKSSPSAXEKVFKQQEIPSVFPKXSISPLNVVQGASVNSSSQXAAQVXKGVKRKADXXXPAXSAVKASSEFSPXFXEKSVALPPIKENMPKNVLPDSQQQYNVVKXVKVXEQLRHCSEILKEMLAKKHFSYAWPFYNPVDVNALGLHNYYDVVKNPMDLGXIKEKMDNQEYKDAYKFAADVRLMFMNCYKYNPPDHEVVXMARMLQDVFEXHFSKIPIEPVESMPLCYIKXDIXEXXGRENXNEASSEGNSSDDSEDERVKRLAKLQEQLKAVHQQLQVLSQVPFRKLNKKKEKSKKEKKKEKVNNSNENPRKMCEQMRLKEKSKRNQPKKRKQQFIGLKSEDEDNAKPMNYDEKRQLSLNINKLPGDKLGRVVHIIQSREPSLSNSNPDEIEIDFEXLKASXLRELEKYVSACLRKRPLKPPAKKIMMSKEELHSQKKQELEKRLLDVNNQLNSRKRQXKSDKXQPSKAVENVSRLSESSSSSSSSSESESSSSDLSSSDSSDSESEMFPKFXEVKPNDSPSKENVKKMKNECIPPEGRXGVXQIGYCVQDXXSANXXLVHQXXPSHVMPPNHHQLAFNYQELEHLQXVKNISPLQILPPSGDSEQLSNGIXVMHPSGDSDXXMLESECQAPVQKDIKIKNADSWKSLGKPVKPSGVMKSSDELFNQFRKAAIEKEVKARXQELIRKHLEQNXKELKASQENQRDLGNGLXVESFSNKIQNKCSGEEQKEHQQSSEAQDKSKLWLLKDRDLARQKEQERRRREAMVGXIDMXLQSDIMXMFENNFD

SEQ ID NO: 4420 - protein, 155 aa, Homo sapiens
  MOD_RES (8)..(8): Selenocysteine
  MOD_RES (22)..(22): Selenocysteine
  MOD_RES (29)..(29): Selenocysteine
  MOD_RES (68)..(68): Selenocysteine
  MOD_RES (78)..(78): Selenocysteine
  MOD_RES (100)..(100): Selenocysteine
  MOD_RES (150)..(150): Selenocysteine
MSLPSRQXAIIVNPPPPEYINXKKNGRLXNQLQYLQKVVLKDLWKHSFSWPFQRPVDAVKLQLPDYYXIIKNPMDLNXIKKRLENKYYAKASECIEDFNXMFSNCYLYNKPGDDIVLMAQALEKLFMQKLSQMPQEEQVVGVKERIKKGXQQNIA

SEQ ID NO: 4421 - protein, 176 aa, Homo sapiens
  MOD_RES (8)..(8): Selenocysteine
  MOD_RES (22)..(22): Selenocysteine
  MOD_RES (29)..(29): Selenocysteine
  MOD_RES (68)..(68): Selenocysteine
  MOD_RES (78)..(78): Selenocysteine
  MOD_RES (100)..(100): Selenocysteine
  MOD_RES (150)..(150): Selenocysteine
  MOD_RES (168)..(168): Selenocysteine
MSLPSRQXAIIVNPPPPEYINXKKNGRLXNQLQYLQKVVLKDLWKHSFSWPFQRPVDAVKLQLPDYYXIIKNPMDLNXIKKRLENKYYAKASECIEDFNXMFSNCYLYNKPGDDIVLMAQALEKLFMQKLSQMPQEEQVVGVKERIKKGXQQNIAVSSAKEKSSPSAXEKVFKQQE

SEQ ID NO: 4422 - protein, 200 aa, Homo sapiens
  MOD_RES (8)..(8): Selenocysteine
  MOD_RES (22)..(22): Selenocysteine
  MOD_RES (29)..(29): Selenocysteine
  MOD_RES (68)..(68): Selenocysteine
  MOD_RES (78)..(78): Selenocysteine
  MOD_RES (100)..(100): Selenocysteine
  MOD_RES (150)..(150): Selenocysteine
  MOD_RES (168)..(168): Selenocysteine
  MOD_RES (184)..(184): Selenocysteine
MSLPSRQXAIIVNPPPPEYINXKKNGRLXNQLQYLQKVVLKDLWKHSFSWPFQRPVDAVKLQLPDYYXIIKNPMDLNXIKKRLENKYYAKASECIEDFNXMFSNCYLYNKPGDDIVLMAQALEKLFMQKLSQMPQEEQVVGVKERIKKGXQQNIAVSSAKEKSSPSAXEKVFKQQEIPSVFPKXSISPLNVVQGASVNSS

SEQ ID NO: 4423 - protein, 462 aa, Homo sapiens
  MOD_RES (8)..(8): Selenocysteine
  MOD_RES (22)..(22): Selenocysteine
  MOD_RES (29)..(29): Selenocysteine
  MOD_RES (68)..(68): Selenocysteine
  MOD_RES (78)..(78): Selenocysteine
  MOD_RES (100)..(100): Selenocysteine
  MOD_RES (150)..(150): Selenocysteine
  MOD_RES (168)..(168): Selenocysteine
  MOD_RES (184)..(184): Selenocysteine
  MOD_RES (203)..(203): Selenocysteine
  MOD_RES (208)..(208): Selenocysteine
  MOD_RES (217)..(219): Selenocysteine
  MOD_RES (222)..(222): Selenocysteine
  MOD_RES (234)..(234): Selenocysteine
  MOD_RES (236)..(236): Selenocysteine
  MOD_RES (266)..(266): Selenocysteine
  MOD_RES (270)..(270): Selenocysteine
  MOD_RES (321)..(321): Selenocysteine
  MOD_RES (360)..(360): Selenocysteine
  MOD_RES (371)..(371): Selenocysteine
  MOD_RES (391)..(391): Selenocysteine
  MOD_RES (394)..(394): Selenocysteine
  MOD_RES (396)..(397): Selenocysteine
  MOD_RES (402)..(402): Selenocysteine
MSLPSRQXAIIVNPPPPEYINXKKNGRLXNQLQYLQKVVLKDLWKHSFSWPFQRPVDAVKLQLPDYYXIIKNPMDLNXIKKRLENKYYAKASECIEDFNXMFSNCYLYNKPGDDIVLMAQALEKLFMQKLSQMPQEEQVVGVKERIKKGXQQNIAVSSAKEKSSPSAXEKVFKQQEIPSVFPKXSISPLNVVQGASVNSSSQXAAQVXKGVKRKADXXXPAXSAVKASSEFSPXFXEKSVALPPIKENMPKNVLPDSQQQYNVVKXVKVXEQLRHCSEILKEMLAKKHFSYAWPFYNPVDVNALGLHNYYDVVKNPMDLGXIKEKMDNQEYKDAYKFAADVRLMFMNCYKYNPPDHEVVXMARMLQDVFEXHFSKIPIEPVESMPLCYIKXDIXEXXGRENXNEASSEGNSSDDSEDERVKRLAKLQEQLKAVHQQLQVLSQVPFRKLNKKKEKSKKEKKKE

SEQ ID NO: 4424 - protein, 947 aa, Homo sapiens
  MOD_RES (8)..(8): Selenocysteine
  MOD_RES (22)..(22): Selenocysteine
  MOD_RES (29)..(29): Selenocysteine
  MOD_RES (68)..(68): Selenocysteine
  MOD_RES (78)..(78): Selenocysteine
  MOD_RES (100)..(100): Selenocysteine
  MOD_RES (150)..(150): Selenocysteine
  MOD_RES (168)..(168): Selenocysteine
  MOD_RES (184)..(184): Selenocysteine
  MOD_RES (203)..(203): Selenocysteine
  MOD_RES (208)..(208): Selenocysteine
  MOD_RES (217)..(219): Selenocysteine
  MOD_RES (222)..(222): Selenocysteine
  MOD_RES (234)..(234): Selenocysteine
  MOD_RES (236)..(236): Selenocysteine
  MOD_RES (266)..(266): Selenocysteine
  MOD_RES (270)..(270): Selenocysteine
  MOD_RES (321)..(321): Selenocysteine
  MOD_RES (360)..(360): Selenocysteine
  MOD_RES (371)..(371): Selenocysteine
  MOD_RES (391)..(391): Selenocysteine
  MOD_RES (394)..(394): Selenocysteine
  MOD_RES (396)..(397): Selenocysteine
  MOD_RES (402)..(402): Selenocysteine
  MOD_RES (558)..(558): Selenocysteine
  MOD_RES (563)..(563): Selenocysteine
  MOD_RES (620)..(620): Selenocysteine
  MOD_RES (625)..(625): Selenocysteine
  MOD_RES (674)..(674): Selenocysteine
  MOD_RES (701)..(701): Selenocysteine
  MOD_RES (704)..(704): Selenocysteine
  MOD_RES (713)..(714): Selenocysteine
  MOD_RES (718)..(719): Selenocysteine
  MOD_RES (724)..(725): Selenocysteine
  MOD_RES (749)..(749): Selenocysteine
  MOD_RES (773)..(773): Selenocysteine
  MOD_RES (783)..(784): Selenocysteine
  MOD_RES (842)..(842): Selenocysteine
  MOD_RES (854)..(854): Selenocysteine
  MOD_RES (872)..(872): Selenocysteine
  MOD_RES (929)..(929): Selenocysteine
  MOD_RES (933)..(933): Selenocysteine
  MOD_RES (940)..(940): Selenocysteine
MSLPSRQXAIIVNPPPPEYINXKKNGRLXNQLQYLQKVVLKDLWKHSFSWPFQRPVDAVKLQLPDYYXIIKNPMDLNXIKKRLENKYYAKASECIEDFNXMFSNCYLYNKPGDDIVLMAQALEKLFMQKLSQMPQEEQVVGVKERIKKGXQQNIAVSSAKEKSSPSAXEKVFKQQEIPSVFPKXSISPLNVVQGASVNSSSQXAAQVXKGVKRKADXXXPAXSAVKASSEFSPXFXEKSVALPPIKENMPKNVLPDSQQQYNVVKXVKVXEQLRHCSEILKEMLAKKHFSYAWPFYNPVDVNALGLHNYYDVVKNPMDLGXIKEKMDNQEYKDAYKFAADVRLMFMNCYKYNPPDHEVVXMARMLQDVFEXHFSKIPIEPVESMPLCYIKXDIXEXXGRENXNEASSEGNSSDDSEDERVKRLAKLQEQLKAVHQQLQVLSQVPFRKLNKKKEKSKKEKKKEKVNNSNENPRKMCEQMRLKEKSKRNQPKKRKQQFIGLKSEDEDNAKPMNYDEKRQLSLNINKLPGDKLGRVVHIIQSREPSLSNSNPDEIEIDFEXLKASXLRELEKYVSACLRKRPLKPPAKKIMMSKEELHSQKKQELEKRLLDVNNQLNSRKRQXKSDKXQPSKAVENVSRLSESSSSSSSSSESESSSSDLSSSDSSDSESEMFPKFXEVKPNDSPSKENVKKMKNECIPPEGRXGVXQIGYCVQDXXSANXXLVHQXXPSHVMPPNHHQLAFNYQELEHLQXVKNISPLQILPPSGDSEQLSNGIXVMHPSGDSDXXMLESECQAPVQKDIKIKNADSWKSLGKPVKPSGVMKSSDELFNQFRKAAIEKEVKARXQELIRKHLEQNXKELKASQENQRDLGNGLXVESFSNKIQNKCSGEEQKEHQQSSEAQDKSKLWLLKDRDLARQKEQERRRREAMVGXIDMXLQSDIMXMFENNFD

SEQ ID NO: 4425 - protein, 901 aa, Homo sapiens
  MOD_RES (8)..(8): Selenocysteine
  MOD_RES (22)..(22): Selenocysteine
  MOD_RES (29)..(29): Selenocysteine
  MOD_RES (104)..(104): Selenocysteine
  MOD_RES (122)..(122): Selenocysteine
  MOD_RES (138)..(138): Selenocysteine
  MOD_RES (157)..(157): Selenocysteine
  MOD_RES (162)..(162): Selenocysteine
  MOD_RES (171)..(173): Selenocysteine
  MOD_RES (176)..(176): Selenocysteine
  MOD_RES (188)..(188): Selenocysteine
  MOD_RES (190)..(190): Selenocysteine
  MOD_RES (220)..(220): Selenocysteine
  MOD_RES (224)..(224): Selenocysteine
  MOD_RES (275)..(275): Selenocysteine
  MOD_RES (314)..(314): Selenocysteine
  MOD_RES (325)..(325): Selenocysteine
  MOD_RES (345)..(345): Selenocysteine
  MOD_RES (348)..(348): Selenocysteine
  MOD_RES (350)..(351): Selenocysteine
  MOD_RES (356)..(356): Selenocysteine
  MOD_RES (512)..(512): Selenocysteine
  MOD_RES (517)..(517): Selenocysteine
  MOD_RES (574)..(574): Selenocysteine
  MOD_RES (579)..(579): Selenocysteine
  MOD_RES (628)..(628): Selenocysteine
  MOD_RES (655)..(655): Selenocysteine
  MOD_RES (658)..(658): Selenocysteine
  MOD_RES (667)..(668): Selenocysteine
  MOD_RES (672)..(673): Selenocysteine
  MOD_RES (678)..(679): Selenocysteine
  MOD_RES (703)..(703): Selenocysteine
  MOD_RES (727)..(727): Selenocysteine
  MOD_RES (737)..(738): Selenocysteine
  MOD_RES (796)..(796): Selenocysteine
  MOD_RES (808)..(808): Selenocysteine
  MOD_RES (826)..(826): Selenocysteine
  MOD_RES (883)..(883): Selenocysteine
  MOD_RES (887)..(887): Selenocysteine
  MOD_RES (894)..(894): Selenocysteine
MSLPSRQXAIIVNPPPPEYINXKKNGRLXNQLQYLQKVVLKDLWKHSFSWPFQRPVDAVKLQLPPGDDIVLMAQALEKLFMQKLSQMPQEEQVVGVKERIKKGXQQNIAVSSAKEKSSPSAXEKVFKQQEIPSVFPKXSISPLNVVQGASVNSSSQXAAQVXKGVKRKADXXXPAXSAVKASSEFSPXFXEKSVALPPIKENMPKNVLPDSQQQYNVVKXVKVXEQLRHCSEILKEMLAKKHFSYAWPFYNPVDVNALGLHNYYDVVKNPMDLGXIKEKMDNQEYKDAYKFAADVRLMFMNCYKYNPPDHEVVXMARMLQDVFEXHFSKIPIEPVESMPLCYIKXDIXEXXGRENXNEASSEGNSSDDSEDERVKRLAKLQEQLKAVHQQLQVLSQVPFRKLNKKKEKSKKEKKKEKVNNSNENPRKMCEQMRLKEKSKRNQPKKRKQQFIGLKSEDEDNAKPMNYDEKRQLSLNINKLPGDKLGRVVHIIQSREPSLSNSNPDEIEIDFEXLKASXLRELEKYVSACLRKRPLKPPAKKIMMSKEELHSQKKQELEKRLLDVNNQLNSRKRQXKSDKXQPSKAVENVSRLSESSSSSSSSSESESSSSDLSSSDSSDSESEMFPKFXEVKPNDSPSKENVKKMKNECIPPEGRXGVXQIGYCVQDXXSANXXLVHQXXPSHVMPPNHHQLAFNYQELEHLQXVKNISPLQILPPSGDSEQLSNGIXVMHPSGDSDXXMLESECQAPVQKDIKIKNADSWKSLGKPVKPSGVMKSSDELFNQFRKAAIEKEVKARXQELIRKHLEQNXKELKASQENQRDLGNGLXVESFSNKIQNKCSGEEQKEHQQSSEAQDKSKLWLLKDRDLARQKEQERRRREAMVGXIDMXLQSDIMXMFENNFD

SEQ ID NO: 4426 - protein, 153 aa, Homo sapiens
  MOD_RES (32)..(32): Selenocysteine
  MOD_RES (38)..(38): Selenocysteine
  MOD_RES (45)..(45): Selenocysteine
  MOD_RES (48)..(48): Selenocysteine
  MOD_RES (66)..(66): Selenocysteine
  MOD_RES (144)..(144): Selenocysteine
MSPEVALNRISPMLSPFISSVVRNGKVGLDAXNCLRIXDLKSGCXSLXPGPNCDRFKLHIPYAGEXLKWDIIFNAQYPELPPDFIFGEDAEFLPDPSALQNLASWNPSNPECLLLVVKELVQQYHQFQCSRLRESSRLMFEYQXLLEEPQYGE

SEQ ID NO: 4427 - protein, 376 aa, Homo sapiens
  MOD_RES (32)..(32): Selenocysteine
  MOD_RES (38)..(38): Selenocysteine
  MOD_RES (45)..(45): Selenocysteine
  MOD_RES (48)..(48): Selenocysteine
  MOD_RES (66)..(66): Selenocysteine
  MOD_RES (144)..(144): Selenocysteine
  MOD_RES (166)..(166): Selenocysteine
  MOD_RES (186)..(186): Selenocysteine
  MOD_RES (210)..(210): Selenocysteine
  MOD_RES (213)..(213): Selenocysteine
  MOD_RES (258)..(258): Selenocysteine
  MOD_RES (284)..(284): Selenocysteine
  MOD_RES (295)..(295): Selenocysteine
  MOD_RES (298)..(298): Selenocysteine
  MOD_RES (324)..(324): Selenocysteine
  MOD_RES (326)..(326): Selenocysteine
  MOD_RES (334)..(334): Selenocysteine
MSPEVALNRISPMLSPFISSVVRNGKVGLDAXNCLRIXDLKSGCXSLXPGPNCDRFKLHIPYAGEXLKWDIIFNAQYPELPPDFIFGEDAEFLPDPSALQNLASWNPSNPECLLLVVKELVQQYHQFQCSRLRESSRLMFEYQXLLEEPQYGENMEIYAGKKNNWXGEFSARFLLKLPVDFSNIPXYLLKDVNEDPGEDVALLSVSFEDXEAXQVYPKLYLSPRIEHALGGSSALHIPAFPGGGCLIDYVPQVCHLLXNKVQYVIQGYHKRREYIAAFLSHFGXGVVEYDAEGFXKLXLLLMWKDFCFLVHIDLPLFFPRDQPXLXFQSVYHFXNSGQLYSQAQKNYPYSPRWDGNEMAKRAKRESNRDGEESSSA

SEQ ID NO: 4428 - protein, 383 aa, Homo sapiens
  MOD_RES (32)..(32): Selenocysteine
  MOD_RES (38)..(38): Selenocysteine
  MOD_RES (45)..(45): Selenocysteine
  MOD_RES (48)..(48): Selenocysteine
  MOD_RES (66)..(66): Selenocysteine
  MOD_RES (144)..(144): Selenocysteine
  MOD_RES (166)..(166): Selenocysteine
  MOD_RES (186)..(186): Selenocysteine
  MOD_RES (210)..(210): Selenocysteine
  MOD_RES (213)..(213): Selenocysteine
  MOD_RES (258)..(258): Selenocysteine
  MOD_RES (284)..(284): Selenocysteine
  MOD_RES (295)..(295): Selenocysteine
  MOD_RES (298)..(298): Selenocysteine
  MOD_RES (324)..(324): Selenocysteine
  MOD_RES (326)..(326): Selenocysteine
  MOD_RES (334)..(334): Selenocysteine
  MOD_RES (368)..(368): Selenocysteine
MSPEVALNRISPMLSPFISSVVRNGKVGLDAXNCLRIXDLKSGCXSLXPGPNCDRFKLHIPYAGEXLKWDIIFNAQYPELPPDFIFGEDAEFLPDPSALQNLASWNPSNPECLLLVVKELVQQYHQFQCSRLRESSRLMFEYQXLLEEPQYGENMEIYAGKKNNWXGEFSARFLLKLPVDFSNIPXYLLKDVNEDPGEDVALLSVSFEDXEAXQVYPKLYLSPRIEHALGGSSALHIPAFPGGGCLIDYVPQVCHLLXNKVQYVIQGYHKRREYIAAFLSHFGXGVVEYDAEGFXKLXLLLMWKDFCFLVHIDLPLFFPRDQPXLXFQSVYHFXNSGQLYSQAQKNYPYSPRWDGNEMAKRAKAYFKXFVPQFQEAAFANGKL

SEQ ID NO: 4429 - protein, 415 aa, Homo sapiens
  MOD_RES (32)..(32): Selenocysteine
  MOD_RES (38)..(38): Selenocysteine
  MOD_RES (45)..(45): Selenocysteine
  MOD_RES (48)..(48): Selenocysteine
  MOD_RES (66)..(66): Selenocysteine
  MOD_RES (144)..(144): Selenocysteine
  MOD_RES (166)..(166): Selenocysteine
  MOD_RES (186)..(186): Selenocysteine
  MOD_RES (210)..(210): Selenocysteine
  MOD_RES (213)..(213): Selenocysteine
  MOD_RES (258)..(258): Selenocysteine
  MOD_RES (284)..(284): Selenocysteine
  MOD_RES (295)..(295): Selenocysteine
  MOD_RES (298)..(298): Selenocysteine
  MOD_RES (324)..(324): Selenocysteine
  MOD_RES (326)..(326): Selenocysteine
  MOD_RES (334)..(334): Selenocysteine
  MOD_RES (386)..(386): Selenocysteine
  MOD_RES (413)..(413): Selenocysteine
MSPEVALNRISPMLSPFISSVVRNGKVGLDAXNCLRIXDLKSGCXSLXPGPNCDRFKLHIPYAGEXLKWDIIFNAQYPELPPDFIFGEDAEFLPDPSALQNLASWNPSNPECLLLVVKELVQQYHQFQCSRLRESSRLMFEYQXLLEEPQYGENMEIYAGKKNNWXGEFSARFLLKLPVDFSNIPXYLLKDVNEDPGEDVALLSVSFEDXEAXQVYPKLYLSPRIEHALGGSSALHIPAFPGGGCLIDYVPQVCHLLXNKVQYVIQGYHKRREYIAAFLSHFGXGVVEYDAEGFXKLXLLLMWKDFCFLVHIDLPLFFPRDQPXLXFQSVYHFXNSGQLYSQAQKNYPYSPRWDGNEMAKRAKGCQGSRDACSPWEQVLAFAVAKXGCKLLQPQRNWPSSRGPPWRASEGERXAQ

SEQ ID NO: 4430 - protein, 284 aa, Homo sapiens
  MOD_RES (32)..(32): Selenocysteine
  MOD_RES (38)..(38): Selenocysteine
  MOD_RES (45)..(45): Selenocysteine
  MOD_RES (48)..(48): Selenocysteine
  MOD_RES (66)..(66): Selenocysteine
  MOD_RES (144)..(144): Selenocysteine
  MOD_RES (166)..(166): Selenocysteine
  MOD_RES (186)..(186): Selenocysteine
  MOD_RES (210)..(210): Selenocysteine
  MOD_RES (213)..(213): Selenocysteine
  MOD_RES (235)..(235): Selenocysteine
  MOD_RES (240)..(240): Selenocysteine
MSPEVALNRISPMLSPFISSVVRNGKVGLDAXNCLRIXDLKSGCXSLXPGPNCDRFKLHIPYAGEXLKWDIIFNAQYPELPPDFIFGEDAEFLPDPSALQNLASWNPSNPECLLLVVKELVQQYHQFQCSRLRESSRLMFEYQXLLEEPQYGENMEIYAGKKNNWXGEFSARFLLKLPVDFSNIPXYLLKDVNEDPGEDVALLSVSFEDXEAXQVYPKLYLSPRIEQLSLSPCHXDFLLXRFLPAPLWGSEVSVPSGPFHLLIILPQPLSGLVRPCLLFSQPCS

SEQ ID NO: 4431 - protein, 166 aa, Homo sapiens
  MOD_RES (11)..(11): Selenocysteine
  MOD_RES (17)..(17): Selenocysteine
  MOD_RES (24)..(24): Selenocysteine
  MOD_RES (27)..(27): Selenocysteine
  MOD_RES (45)..(45): Selenocysteine
  MOD_RES (123)..(123): Selenocysteine
VRNGKVGLDAXNCLRIXDLKSGCXSLXPGPNCDRFKLHIPYAGEXLKWDIIFNAQYPELPPDFIFGEDAEFLPDPSALQNLASWNPSNPECLLLVVKELVQQYHQFQCSRLRESSRLMFEYQXLLEEPQYGENMEIYAGKKNNWVRIFENGKKDDFIHNKIINSYV

SEQ ID NO: 4432 - protein, 72 aa, Homo sapiens
  MOD_RES (13)..(13): Selenocysteine
  MOD_RES (36)..(36): Selenocysteine
  MOD_RES (41)..(43): Selenocysteine
  MOD_RES (54)..(54): Selenocysteine
  MOD_RES (59)..(59): Selenocysteine
MPGRGRCPDCGSXELVEDSHYSQSQLVCSDCGCVVXEGVLXXXFSDEGNLREVXYSRSXGENEQVSRSQQRE

SEQ ID NO: 4433 - protein, 419 aa, Homo sapiens
  MOD_RES (13)..(13): Selenocysteine
  MOD_RES (36)..(36): Selenocysteine
  MOD_RES (41)..(43): Selenocysteine
  MOD_RES (54)..(54): Selenocysteine
  MOD_RES (59)..(59): Selenocysteine
  MOD_RES (88)..(88): Selenocysteine
  MOD_RES (92)..(92): Selenocysteine
  MOD_RES (125)..(125): Selenocysteine
  MOD_RES (134)..(134): Selenocysteine
  MOD_RES (140)..(140): Selenocysteine
  MOD_RES (152)..(152): Selenocysteine
  MOD_RES (175)..(175): Selenocysteine
  MOD_RES (204)..(204): Selenocysteine
  MOD_RES (214)..(214): Selenocysteine
  MOD_RES (218)..(218): Selenocysteine
  MOD_RES (227)..(227): Selenocysteine
  MOD_RES (230)..(230): Selenocysteine
  MOD_RES (316)..(316): Selenocysteine
  MOD_RES (321)..(321): Selenocysteine
  MOD_RES (377)..(377): Selenocysteine
  MOD_RES (379)..(379): Selenocysteine
  MOD_RES (395)..(395): Selenocysteine
  MOD_RES (413)..(413): Selenocysteine
MPGRGRCPDCGSXELVEDSHYSQSQLVCSDCGCVVXEGVLXXXFSDEGNLREVXYSRSXGENEQVSRSQQRGLRRVRDLCRVLQLPPXFEDXAVAYYQQAYRHSGIRAARLQKKEVLVGCCVLIXCRQHNWPLXMGAICXLLYADLDVFSSXYMQIVKLLGLDVPSLCLAELVKXYCSSFKLFQASPSVPAKYVEDKEKMLSRXMQLVELANEXWLVXGRHPLPVIXAAXFLAWQSLQPADRLSCSLARFCKLANVDLPYPASSRLQELLAVLLRMAEQLAWLRVLRLDKRSVVKHIGDLLQHRQSLVRSAFRDGXAEVEXREKEPPGWGQGQGEGEVGNNSLGLPQGKRPASPALLLPPCMLKSPKRICPVPPVSXVXGDENISDSEIEQYLRXPQEVRDFQRAQAARQAAXSVPNPP

SEQ ID NO: 4434 - protein, 202 aa, Homo sapiens
  MOD_RES (13)..(13): Selenocysteine
  MOD_RES (36)..(36): Selenocysteine
  MOD_RES (41)..(43): Selenocysteine
  MOD_RES (54)..(54): Selenocysteine
  MOD_RES (59)..(59): Selenocysteine
  MOD_RES (88)..(88): Selenocysteine
  MOD_RES (92)..(92): Selenocysteine
  MOD_RES (125)..(125): Selenocysteine
  MOD_RES (134)..(134): Selenocysteine
  MOD_RES (140)..(140): Selenocysteine
  MOD_RES (152)..(152): Selenocysteine
  MOD_RES (175)..(175): Selenocysteine
  MOD_RES (185)..(185): Selenocysteine
  MOD_RES (202)..(202): Selenocysteine
MPGRGRCPDCGSXELVEDSHYSQSQLVCSDCGCVVXEGVLXXXFSDEGNLREVXYSRSXGENEQVSRSQQRGLRRVRDLCRVLQLPPXFEDXAVAYYQQAYRHSGIRAARLQKKEVLVGCCVLIXCRQHNWPLXMGAICXLLYADLDVFSSXYMQIVKLLGLDVPSLCLAELVKXYCSSLECSGXIIAHCSLELMGSSDLPX

SEQ ID NO: 4435 - protein, 69 aa, Homo sapiens
  MOD_RES (9)..(9): Selenocysteine
  MOD_RES (48)..(48): Selenocysteine
MSSMWSEYXIGGVKIYFPYKAYPSQLAMMNSILRGLNSKQHCLLESPXGSGKSLALLCSALAWQQSLSG

SEQ ID NO: 4436 - protein, 994 aa, Homo sapiens
  MOD_RES (9)..(9): Selenocysteine
  MOD_RES (48)..(48): Selenocysteine
  MOD_RES (96)..(96): Selenocysteine
  MOD_RES (104)..(104): Selenocysteine
  MOD_RES (113)..(113): Selenocysteine
  MOD_RES (121)..(121): Selenocysteine
  MOD_RES (124)..(124): Selenocysteine
  MOD_RES (132)..(133): Selenocysteine
  MOD_RES (166)..(167): Selenocysteine
  MOD_RES (178)..(178): Selenocysteine
  MOD_RES (192)..(192): Selenocysteine
  MOD_RES (221)..(221): Selenocysteine
  MOD_RES (232)..(232): Selenocysteine
  MOD_RES (238)..(238): Selenocysteine
  MOD_RES (250)..(250): Selenocysteine
  MOD_RES (252)..(252): Selenocysteine
  MOD_RES (260)..(260): Selenocysteine
  MOD_RES (266)..(266): Selenocysteine
  MOD_RES (274)..(274): Selenocysteine
  MOD_RES (282)..(282): Selenocysteine
  MOD_RES (324)..(324): Selenocysteine
  MOD_RES (327)..(327): Selenocysteine
  MOD_RES (354)..(354): Selenocysteine
  MOD_RES (411)..(411): Selenocysteine
  MOD_RES (476)..(476): Selenocysteine
  MOD_RES (483)..(484): Selenocysteine
  MOD_RES (486)..(486): Selenocysteine
  MOD_RES (523)..(523): Selenocysteine
  MOD_RES (555)..(555): Selenocysteine
  MOD_RES (559)..(559): Selenocysteine
  MOD_RES (584)..(584): Selenocysteine
  MOD_RES (609)..(609): Selenocysteine
  MOD_RES (613)..(613): Selenocysteine
  MOD_RES (616)..(616): Selenocysteine
  MOD_RES (630)..(630): Selenocysteine
  MOD_RES (632)..(632): Selenocysteine
  MOD_RES (650)..(650): Selenocysteine
  MOD_RES (663)..(663): Selenocysteine
  MOD_RES (667)..(667): Selenocysteine
  MOD_RES (669)..(669): Selenocysteine
  MOD_RES (686)..(686): Selenocysteine
  MOD_RES (711)..(711): Selenocysteine
  MOD_RES (722)..(722): Selenocysteine
  MOD_RES (733)..(733): Selenocysteine
  MOD_RES (781)..(781): Selenocysteine
  MOD_RES (873)..(873): Selenocysteine
  MOD_RES (900)..(900): Selenocysteine
  MOD_RES (908)..(908): Selenocysteine
  MOD_RES (912)..(912): Selenocysteine
  MOD_RES (918)..(918): Selenocysteine
  MOD_RES (953)..(953): Selenocysteine
MSSMWSEYXIGGVKIYFPYKAYPSQLAMMNSILRGLNSKQHCLLESPXGSGKSLALLCSALAWQQSLSGKPADEGVSEKAEVQLSCCCACHSKDFXNNDMNQGXSRHFNYPSXPPSERNGXSSXCQDSPEKXXLAAKLSAKKQASIYRDENDDFQVEKKRIRPLEXXQQIRKRHCFGXEVHNLDAKVDSGKXVKLNSPLEKINSFSPQKPPGHCSRCCCSXKQGNSQESSNXIKKDHXGKSKIPKIYFGXRXHKQIAQIXRELRRXAYSGVPMXILSSRDHXCVHPEVVGNFNRNEKCMELLDGKNGKSCYFYHGVHKISDQHXLQXFQGMCKAWDIEELVSLGKKLKACPYYXARELIQDADIIFCPYNYLLDAQIRESMDLNLKEQVVILDEAHNIEDCARESASYSVXEVQLRFARDELDSMVNNNIRKKDHEPLRAVCCSLINWLEANAEYLVERDYESACKIWSGNEMLLXLHKMGIXXAXFPILQGHFSAVLQKEEKISPIYGKEEAREVPVISASXQIMLKGLFMVLDYLFRQNSRFADDYKIAIQQXYSWXNQIDISDKNGLLVLPKNKKRSRQKXAVHVLNFWCLNPAVAFSDINGKVQXIVLXSGXLSPMKSFSSELGVXFXIQLEANHIIKNSQVWVGXIGSGPKGRNLCAXFQNXEXFEFQDEVGALLLSVCQXVSQGILCFLPSYKLLEKLKERWLSXGLWHNLELVKXVIVEPQGGEKXNFDELLQVYYDAIKYKGEKDGALLVAVCRGKVSEGLDFSDDNARAVIXIGIPFPNVKDLQVELKRQYNDHHSKLRGLLPGRQWYEIQAYRALNQALGRCIRHRNDWGALILVDDRFRNNPSRYISGLSKWVRQQIQHHSXFESALESLAEFSKKHQKVLNVSIKDRXNIQDNESXLEVXSLKYSXSPYLLEAASHLSPENFVEDEAKICVQELQCPKIIXKNSPLPSSIISRKEKSMKSSSHLPLIEKSFIIFSEMIFIWV

SEQ ID NO: 4437 - protein, 1249 aa, Homo sapiens
  MOD_RES (9)..(9): Selenocysteine
  MOD_RES (48)..(48): Selenocysteine
  MOD_RES (96)..(96): Selenocysteine
  MOD_RES (104)..(104): Selenocysteine
  MOD_RES (113)..(113): Selenocysteine
  MOD_RES (121)..(121): Selenocysteine
  MOD_RES (124)..(124): Selenocysteine
  MOD_RES (132)..(133): Selenocysteine
  MOD_RES (166)..(167): Selenocysteine
  MOD_RES (178)..(178): Selenocysteine
  MOD_RES (192)..(192): Selenocysteine
  MOD_RES (221)..(221): Selenocysteine
  MOD_RES (232)..(232): Selenocysteine
  MOD_RES (238)..(238): Selenocysteine
  MOD_RES (250)..(250): Selenocysteine
  MOD_RES (252)..(252): Selenocysteine
  MOD_RES (260)..(260): Selenocysteine
  MOD_RES (266)..(266): Selenocysteine
  MOD_RES (274)..(274): Selenocysteine
  MOD_RES (282)..(282): Selenocysteine
  MOD_RES (324)..(324): Selenocysteine
  MOD_RES (327)..(327): Selenocysteine
  MOD_RES (354)..(354): Selenocysteine
  MOD_RES (411)..(411): Selenocysteine
  MOD_RES (476)..(476): Selenocysteine
  MOD_RES (483)..(484): Selenocysteine
  MOD_RES (486)..(486): Selenocysteine
  MOD_RES (523)..(523): Selenocysteine
  MOD_RES (555)..(555): Selenocysteine
  MOD_RES (559)..(559): Selenocysteine
  MOD_RES (584)..(584): Selenocysteine
  MOD_RES (609)..(609): Selenocysteine
  MOD_RES (613)..(613): Selenocysteine
  MOD_RES (616)..(616): Selenocysteine
  MOD_RES (630)..(630): Selenocysteine
  MOD_RES (632)..(632): Selenocysteine
  MOD_RES (650)..(650): Selenocysteine
  MOD_RES (663)..(663): Selenocysteine
  MOD_RES (667)..(667): Selenocysteine
  MOD_RES (669)..(669): Selenocysteine
  MOD_RES (686)..(686): Selenocysteine
  MOD_RES (711)..(711): Selenocysteine
  MOD_RES (722)..(722): Selenocysteine
  MOD_RES (733)..(733): Selenocysteine
  MOD_RES (781)..(781): Selenocysteine
  MOD_RES (873)..(873): Selenocysteine
  MOD_RES (900)..(900): Selenocysteine
  MOD_RES (908)..(908): Selenocysteine
  MOD_RES (912)..(912): Selenocysteine
  MOD_RES (918)..(918): Selenocysteine
  MOD_RES (953)..(953): Selenocysteine
  MOD_RES (989)..(989): Selenocysteine
  MOD_RES (992)..(992): Selenocysteine
  MOD_RES (997)..(997): Selenocysteine
  MOD_RES (1013)..(1013): Selenocysteine
  MOD_RES (1020)..(1020): Selenocysteine
  MOD_RES (1038)..(1038): Selenocysteine
  MOD_RES (1045)..(1045): Selenocysteine
  MOD_RES (1050)..(1050): Selenocysteine
  MOD_RES (1059)..(1059): Selenocysteine
  MOD_RES (1062)..(1062): Selenocysteine
  MOD_RES (1072)..(1072): Selenocysteine
  MOD_RES (1082)..(1082): Selenocysteine
  MOD_RES (1084)..(1084): Selenocysteine
  MOD_RES (1116)..(1116): Selenocysteine
  MOD_RES (1123)..(1123): Selenocysteine
  MOD_RES (1133)..(1133): Selenocysteine
  MOD_RES (1142)..(1142): Selenocysteine
  MOD_RES (1152)..(1152): Selenocysteine
  MOD_RES (1175)..(1175): Selenocysteine
  MOD_RES (1193)..(1193): Selenocysteine
  MOD_RES (1215)..(1216): Selenocysteine
  MOD_RES (1226)..(1226): Selenocysteine
MSSMWSEYXIGGVKIYFPYKAYPSQLAMMNSILRGLNSKQHCLLESPXGSGKSLALLCSALAWQQSLSGKPADEGVSEKAEVQLSCCCACHSKDFXNNDMNQGXSRHFNYPSXPPSERNGXSSXCQDSPEKXXLAAKLSAKKQASIYRDENDDFQVEKKRIRPLEXXQQIRKRHCFGXEVHNLDAKVDSGKXVKLNSPLEKINSFSPQKPPGHCSRCCCSXKQGNSQESSNXIKKDHXGKSKIPKIYFGXRXHKQIAQIXRELRRXAYSGVPMXILSSRDHXCVHPEVVGNFNRNEKCMELLDGKNGKSCYFYHGVHKISDQHXLQXFQGMCKAWDIEELVSLGKKLKACPYYXARELIQDADIIFCPYNYLLDAQIRESMDLNLKEQVVILDEAHNIEDCARESASYSVXEVQLRFARDELDSMVNNNIRKKDHEPLRAVCCSLINWLEANAEYLVERDYESACKIWSGNEMLLXLHKMGIXXAXFPILQGHFSAVLQKEEKISPIYGKEEAREVPVISASXQIMLKGLFMVLDYLFRQNSRFADDYKIAIQQXYSWXNQIDISDKNGLLVLPKNKKRSRQKXAVHVLNFWCLNPAVAFSDINGKVQXIVLXSGXLSPMKSFSSELGVXFXIQLEANHIIKNSQVWVGXIGSGPKGRNLCAXFQNXEXFEFQDEVGALLLSVCQXVSQGILCFLPSYKLLEKLKERWLSXGLWHNLELVKXVIVEPQGGEKXNFDELLQVYYDAIKYKGEKDGALLVAVCRGKVSEGLDFSDDNARAVIXIGIPFPNVKDLQVELKRQYNDHHSKLRGLLPGRQWYEIQAYRALNQALGRCIRHRNDWGALILVDDRFRNNPSRYISGLSKWVRQQIQHHSXFESALESLAEFSKKHQKVLNVSIKDRXNIQDNESXLEVXSLKYSXSPYLLEAASHLSPENFVEDEAKICVQELQCPKIIXKNSPLPSSIISRKEKNDPVFLEEAGKAEKIVISRSXSPXFNKQXKRVSWSSFNSLGQYFXGKIPKAXPELGSSENSASSPPRFKXEKMESKXVLPFXDKCESSNLXVNXSFGSCPQSEXIISSLKIDAXLXRKNHSEHPLCSEEALDPDIELSLVSEEDKQSXSNRDFEXEAEDESIYFXPELYDPEDXDEEKNDLAEXDRGNRLANNSDCILAKDLFEIRXIKEVDSAREVKAEDCIDXKLNGILHIEESKIDDIDGNVKXXWINELELGKXHEIEIKNFKPSPSKNKGMFPGFK

SEQ ID NO: 4438 - protein, 180 aa, Homo sapiens
  MOD_RES (1)..(1): Any amino acid
  MOD_RES (14)..(14): Selenocysteine
  MOD_RES (39)..(39): Selenocysteine
  MOD_RES (50)..(50): Selenocysteine
  MOD_RES (61)..(61): Selenocysteine
  MOD_RES (109)..(109): Selenocysteine
  MOD_RES (123)..(123): Selenocysteine
  MOD_RES (126)..(126): Selenocysteine
  MOD_RES (130)..(130): Selenocysteine
  MOD_RES (149)..(150): Selenocysteine
  MOD_RES (152)..(152): Selenocysteine
  MOD_RES (155)..(155): Selenocysteine
  MOD_RES (168)..(168): Selenocysteine
  MOD_RES (175)..(175): Selenocysteine
XDEVGALLLSVCQXVSQGILCFLPSYKLLEKLKERWLSXGLWHNLELVKXVIVEPQGGEKXNFDELLQVYYDAIKYKGEKDGALLVAVCRGKVSEGLDFSDDNARAVIXIGIPFPNVKDLQLXSAXAEGXNGYAQSWVSYSKMADAALXXAXDEXVDIYPRNLLSPSXALVLHSXEVECY

SEQ ID NO: 4439 - protein, 84 aa, Homo sapiens
  MOD_RES (1)..(1): Any amino acid
  MOD_RES (11)..(11): Selenocysteine
  MOD_RES (18)..(19): Selenocysteine
  MOD_RES (21)..(21): Selenocysteine
  MOD_RES (58)..(58): Selenocysteine
XIWSGNEMLLXLHKMGIXXAXFPILQGHFSAVLQKEEKISPIYGKEEAREVPVISASXQIMLKGLFMVLDYLFRQNSRDEISLC

SEQ ID NO: 4440 - protein, 75 aa, Homo sapiens
  MOD_RES (26)..(26): Selenocysteine
  MOD_RES (49)..(49): Selenocysteine
  MOD_RES (55)..(55): Selenocysteine
  MOD_RES (69)..(69): Selenocysteine
  MOD_RES (73)..(73): Selenocysteine
  MOD_RES (75)..(75): Selenocysteine
MAGQEDPVQREIHQDWANREYIEIIXSSIKKIADFLNSFDMSCRSRLAXLNEKLXALERRIEYIEARVXKGEXLX

SEQ ID NO: 4441 - protein, 126 aa, Homo sapiens
  MOD_RES (10)..(10): Selenocysteine
  MOD_RES (39)..(39): Selenocysteine
  MOD_RES (102)..(102): Selenocysteine
  MOD_RES (120)..(120): Selenocysteine
MPVQPPSKDXEEMEAEGDSAAEMNGEEEESEEERSGSQXESEEESSEMDDEDYERRRSECVSEMLDLEKQFSELKEKLFRERLSQLRLRLEEVGAERAPEYXEPLGGLQRSLKIRIQGSXRASVWM

SEQ ID NO: 4442 - protein, 244 aa, Homo sapiens
  MOD_RES (10)..(10): Selenocysteine
  MOD_RES (39)..(39): Selenocysteine
  MOD_RES (102)..(102): Selenocysteine
  MOD_RES (155)..(155): Selenocysteine
  MOD_RES (227)..(227): Selenocysteine
MPVQPPSKDXEEMEAEGDSAAEMNGEEEESEEERSGSQXESEEESSEMDDEDYERRRSECVSEMLDLEKQFSELKEKLFRERLSQLRLRLEEVGAERAPEYXEPLGGLQRSLKIRIQVAGIYKGFCLDVIRNKYECELQGAKQHLESEKLLLYDXLQGELQERIQRLEEDRQSLDLSSEWWDDKLHARGSSRSWDSLPPSKRKKAPLVSGPYIVYMLQEIDILEDWXAIKKARAAVSPQKRKSD

SEQ ID NO: 4443 - protein, 290 aa, Homo sapiens
  MOD_RES (10)..(10): Selenocysteine
  MOD_RES (39)..(39): Selenocysteine
  MOD_RES (102)..(102): Selenocysteine
  MOD_RES (155)..(155): Selenocysteine
  MOD_RES (227)..(227): Selenocysteine
  MOD_RES (248)..(248): Selenocysteine
  MOD_RES (275)..(275): Selenocysteine
MPVQPPSKDXEEMEAEGDSAAEMNGEEEESEEERSGSQXESEEESSEMDDEDYERRRSECVSEMLDLEKQFSELKEKLFRERLSQLRLRLEEVGAERAPEYXEPLGGLQRSLKIRIQVAGIYKGFCLDVIRNKYECELQGAKQHLESEKLLLYDXLQGELQERIQRLEEDRQSLDLSSEWWDDKLHARGSSRSWDSLPPSKRKKAPLVSGPYIVYMLQEIDILEDWXAIKKARAAVSPQKRKSDDRRXHRPLRVCPARLLWCCWALPLHLALAWXPPLPSSRPAQLWPWS

SEQ ID NO: 4444 - protein, 246 aa, Homo sapiens
  MOD_RES (10)..(10): Selenocysteine
  MOD_RES (39)..(39): Selenocysteine
  MOD_RES (102)..(102): Selenocysteine
  MOD_RES (155)..(155): Selenocysteine
  MOD_RES (227)..(227): Selenocysteine
MPVQPPSKDXEEMEAEGDSAAEMNGEEEESEEERSGSQXESEEESSEMDDEDYERRRSECVSEMLDLEKQFSELKEKLFRERLSQLRLRLEEVGAERAPEYXEPLGGLQRSLKIRIQVAGIYKGFCLDVIRNKYECELQGAKQHLESEKLLLYDXLQGELQERIQRLEEDRQSLDLSSEWWDDKLHARGSSRSWDSLPPSKRKKAPLVSGPYIVYMLQEIDILEDWXAIKKARAAVSPQKRKSDGP

SEQ ID NO: 4445 - protein, 267 aa, Homo sapiens
  MOD_RES (1)..(1): Any amino acid
  MOD_RES (2)..(2): Selenocysteine
  MOD_RES (65)..(65): Selenocysteine
  MOD_RES (118)..(118): Selenocysteine
  MOD_RES (190)..(190): Selenocysteine
  MOD_RES (213)..(213): Selenocysteine
  MOD_RES (225)..(225): Selenocysteine
  MOD_RES (252)..(252): Selenocysteine
XXESEEESSEMDDEDYERRRSECVSEMLDLEKQFSELKEKLFRERLSQLRLRLEEVGAERAPEYXEPLGGLQRSLKIRIQVAGIYKGFCLDVIRNKYECELQGAKQHLESEKLLLYDXLQGELQERIQRLEEDRQSLDLSSEWWDDKLHARGSSRSWDSLPPSKRKKAPLVSGPYIVYMLQEIDILEDWXAIKKDLDPAVHSQGDPQSSWHCXQDSRLPPADRRXHRPLRVCPARLLWCCWALPLHLALAWXPPLPSSRPAQLWPWS

SEQ ID NO: 4446 - protein, 100 aa, Homo sapiens
  MOD_RES (9)..(9): Selenocysteine
  MOD_RES (17)..(17): Selenocysteine
  MOD_RES (27)..(27): Selenocysteine
  MOD_RES (56)..(56): Selenocysteine
MGVDFDVKXFCHNLRAXKPPYECPVEXCRKVYKSYSGIEYHLYHYDHDNPPPPQQXPLRKHKKKGRQSRPANKQSPSPSEVSQSPGREVMSYAQAQRMVE

SEQ ID NO: 4447 - protein, 105 aa, Homo sapiens
  MOD_RES (9)..(9): Selenocysteine
  MOD_RES (17)..(17): Selenocysteine
  MOD_RES (27)..(27): Selenocysteine
  MOD_RES (56)..(56): Selenocysteine
MGVDFDVKXFCHNLRAXKPPYECPVEXCRKVYKSYSGIEYHLYHYDHDNPPPPQQXPLRKHKKKGRQSRPANKQSPSPSEVSQSPGREVMSYAQAQRMVEVDLHG

SEQ ID NO: 4448 - protein, 1119 aa, Homo sapiens
  MOD_RES (9)..(9): Selenocysteine
  MOD_RES (17)..(17): Selenocysteine
  MOD_RES (27)..(27): Selenocysteine
  MOD_RES (56)..(56): Selenocysteine
  MOD_RES (139)..(139): Selenocysteine
  MOD_RES (141)..(141): Selenocysteine
  MOD_RES (145)..(145): Selenocysteine
  MOD_RES (172)..(173): Selenocysteine
  MOD_RES (188)..(188): Selenocysteine
  MOD_RES (196)..(196): Selenocysteine
  MOD_RES (234)..(234): Selenocysteine
  MOD_RES (343)..(343): Selenocysteine
  MOD_RES (365)..(365): Selenocysteine
  MOD_RES (385)..(385): Selenocysteine
  MOD_RES (407)..(407): Selenocysteine
  MOD_RES (412)..(412): Selenocysteine
  MOD_RES (429)..(429): Selenocysteine
  MOD_RES (434)..(434): Selenocysteine
  MOD_RES (441)..(441): Selenocysteine
  MOD_RES (448)..(448): Selenocysteine
  MOD_RES (525)..(525): Selenocysteine
  MOD_RES (529)..(529): Selenocysteine
  MOD_RES (545)..(545): Selenocysteine
  MOD_RES (562)..(562): Selenocysteine
  MOD_RES (618)..(618): Selenocysteine
  MOD_RES (631)..(631): Selenocysteine
  MOD_RES (640)..(640): Selenocysteine
  MOD_RES (649)..(649): Selenocysteine
  MOD_RES (677)..(677): Selenocysteine
  MOD_RES (712)..(712): Selenocysteine
  MOD_RES (745)..(745): Selenocysteine
  MOD_RES (759)..(759): Selenocysteine
  MOD_RES (762)..(762): Selenocysteine
  MOD_RES (817)..(817): Selenocysteine
  MOD_RES (829)..(829): Selenocysteine
  MOD_RES (846)..(846): Selenocysteine
  MOD_RES (858)..(858): Selenocysteine
  MOD_RES (870)..(870): Selenocysteine
  MOD_RES (921)..(921): Selenocysteine
  MOD_RES (923)..(924): Selenocysteine
  MOD_RES (939)..(939): Selenocysteine
  MOD_RES (948)..(948): Selenocysteine
  MOD_RES (951)..(951): Selenocysteine
  MOD_RES (960)..(960): Selenocysteine
  MOD_RES (1040)..(1040): Selenocysteine
  MOD_RES (1058)..(1058): Selenocysteine
  MOD_RES (1065)..(1065): Selenocysteine
  MOD_RES (1115)..(1115): Selenocysteine
MGVDFDVKXFCHNLRAXKPPYECPVEXCRKVYKSYSGIEYHLYHYDHDNPPPPQQXPLRKHKKKGRQSRPANKQSPSPSEVSQSPGREVMSYAQAQRMVEVDLHGRVHRISIFDNLDVVSEDEEAPEEAPENGSNKENXEXPAAXPKSGKHKNKEKRKDSNHHHHHNVSASXXPKLPEVVYRELEQDXPDAPPRPXSYYRYIEKSAEELDEEVEYDMDEEDYIWLDIMNERRKXEGVSPIPQEIFEYLMDRLEKESYFESHNKGDPNALVDEDAVCCICNDGECQNSNVILFCDMCNLAVHQECYGVPYIPEGQWLCRRCLQSPSRAVDCALCPNKGGAFKQXDDGRWAHVVCALWIPEVCFANXVFLEPIDSIEHIPPARWKLXCYICKQRGSGACIQCHKANCYXAFHVXCAQQAGLYMKMEPVREXGANGXSFSVRKXAYCDIHXPPGSARRLPALSHSEGEEDEDEEEDEGKGWSSEKVKKAKAKSRIKMKKARKILAEKRAAAPVVSVPCIPPHRLSKIXNRLXIQRKSQFMQRLHSYWXLKRQSRNGVPLLRRLQXHLQSQRNCDQVGRDSEDKNWALKEQLKSWQRLRHDLERARLLVELIRKREKLKREXIKVQQIAMEMQLXPFLILLRKXLEQLQEKDXGNIFSEPVPLSEVPDYLDHIKKPMDFFXMKQNLEAYRYLNFDDFEEDFNLIVSNCLKYNAKDXIFYRAAVRLREQGGAVLRQARRQAEKMGIDFEXGMHIPHSLAGDEAXHHXEDAAEEERLVLLENQKHLPVEEQLKLLLERLDEVNASKQSVGRSRRAKMIKKEMXALRRKLAHQREXGRDGPERHGPSSRGSLXPHPAACDKDGQXDSAAEESSSQEXSKDLPANGFSGGNQPVKKSFLVYRNDCSLPRSSSDSESSSSSSSSAASDRXSXXPSKQGRGKPSFSRGXFPEDSSEDXSGXENEAYSVGXGRGVGHSMVRKSLGRGAGWLSEDEDSPLDALDLVWAKCRGYPSYPALIIDPKMPREGMFHHGVPIPVPPLEVLKLGEQMXQEAREHLYLVLFFDNKRXWQWLPRXKLVPLGVNQDLDKEKMLEGRKSNIRKSVQIAYHRALQHRSKVQGEQSSEXSDSD

SEQ ID NO: 4449 - protein, 1213 aa, Homo sapiens
  MOD_RES (9)..(9): Selenocysteine
  MOD_RES (17)..(17): Selenocysteine
  MOD_RES (27)..(27): Selenocysteine
  MOD_RES (56)..(56): Selenocysteine
  MOD_RES (139)..(139): Selenocysteine
  MOD_RES (141)..(141): Selenocysteine
  MOD_RES (145)..(145): Selenocysteine
  MOD_RES (172)..(173): Selenocysteine
  MOD_RES (188)..(188): Selenocysteine
  MOD_RES (196)..(196): Selenocysteine
  MOD_RES (234)..(234): Selenocysteine
  MOD_RES (343)..(343): Selenocysteine
  MOD_RES (365)..(365): Selenocysteine
  MOD_RES (385)..(385): Selenocysteine
  MOD_RES (407)..(407): Selenocysteine
  MOD_RES (412)..(412): Selenocysteine
  MOD_RES (429)..(429): Selenocysteine
  MOD_RES (434)..(434): Selenocysteine
  MOD_RES (441)..(441): Selenocysteine
  MOD_RES (448)..(448): Selenocysteine
  MOD_RES (525)..(525): Selenocysteine
  MOD_RES (529)..(529): Selenocysteine
  MOD_RES (545)..(545): Selenocysteine
  MOD_RES (562)..(562): Selenocysteine
  MOD_RES (618)..(618): Selenocysteine
  MOD_RES (631)..(631): Selenocysteine
  MOD_RES (640)..(640): Selenocysteine
  MOD_RES (649)..(649): Selenocysteine
  MOD_RES (677)..(677): Selenocysteine
  MOD_RES (712)..(712): Selenocysteine
  MOD_RES (745)..(745): Selenocysteine
  MOD_RES (759)..(759): Selenocysteine
  MOD_RES (762)..(762): Selenocysteine
  MOD_RES (816)..(816): Selenocysteine
  MOD_RES (828)..(828): Selenocysteine
  MOD_RES (845)..(845): Selenocysteine
  MOD_RES (857)..(857): Selenocysteine
  MOD_RES (869)..(869): Selenocysteine
  MOD_RES (880)..(880): Selenocysteine
  MOD_RES (889)..(889): Selenocysteine
  MOD_RES (900)..(900): Selenocysteine
  MOD_RES (919)..(919): Selenocysteine
  MOD_RES (961)..(961): Selenocysteine
  MOD_RES (1015)..(1015): Selenocysteine
  MOD_RES (1017)..(1018): Selenocysteine
  MOD_RES (1033)..(1033): Selenocysteine
  MOD_RES (1042)..(1042): Selenocysteine
  MOD_RES (1045)..(1045): Selenocysteine
  MOD_RES (1054)..(1054): Selenocysteine
  MOD_RES (1134)..(1134): Selenocysteine
  MOD_RES (1152)..(1152): Selenocysteine
  MOD_RES (1159)..(1159): Selenocysteine
  MOD_RES (1209)..(1209): Selenocysteine
MGVDFDVKXFCHNLRAXKPPYECPVEXCRKVYKSYSGIEYHLYHYDHDNPPPPQQXPLRKHKKKGRQSRPANKQSPSPSEVSQSPGREVMSYAQAQRMVEVDLHGRVHRISIFDNLDVVSEDEEAPEEAPENGSNKENXEXPAAXPKSGKHKNKEKRKDSNHHHHHNVSASXXPKLPEVVYRELEQDXPDAPPRPXSYYRYIEKSAEELDEEVEYDMDEEDYIWLDIMNERRKXEGVSPIPQEIFEYLMDRLEKESYFESHNKGDPNALVDEDAVCCICNDGECQNSNVILFCDMCNLAVHQECYGVPYIPEGQWLCRRCLQSPSRAVDCALCPNKGGAFKQXDDGRWAHVVCALWIPEVCFANXVFLEPIDSIEHIPPARWKLXCYICKQRGSGACIQCHKANCYXAFHVXCAQQAGLYMKMEPVREXGANGXSFSVRKXAYCDIHXPPGSARRLPALSHSEGEEDEDEEEDEGKGWSSEKVKKAKAKSRIKMKKARKILAEKRAAAPVVSVPCIPPHRLSKIXNRLXIQRKSQFMQRLHSYWXLKRQSRNGVPLLRRLQXHLQSQRNCDQVGRDSEDKNWALKEQLKSWQRLRHDLERARLLVELIRKREKLKREXIKVQQIAMEMQLXPFLILLRKXLEQLQEKDXGNIFSEPVPLSEVPDYLDHIKKPMDFFXMKQNLEAYRYLNFDDFEEDFNLIVSNCLKYNAKDXIFYRAAVRLREQGGAVLRQARRQAEKMGIDFEXGMHIPHSLAGDEAXHHXEDAEEERLVLLENQKHLPVEEQLKLLLERLDEVNASKQSVGRSRRAKMIKKEMXALRRKLAHQREXGRDGPERHGPSSRGSLXPHPAACDKDGQXDSAAEESSSQEXSKGLGPNMSSXPAHEVGRRXSVLFSKKNPKXAGPPKRPGRPPKNRESQMXPSHGGSPVGPPQLPIMSSLRQRKRGRSPRPSSSSDSDSDKSXEDPPMDLPANGFSGGNQPVKKSFLVYRNDCSLPRSSSDSESSSSSSSSAASDRXSXXPSKQGRGKPSFSRGXFPEDSSEDXSGXENEAYSVGXGRGVGHSMVRKSLGRGAGWLSEDEDSPLDALDLVWAKCRGYPSYPALIIDPKMPREGMFHHGVPIPVPPLEVLKLGEQMXQEAREHLYLVLFFDNKRXWQWLPRXKLVPLGVNQDLDKEKMLEGRKSNIRKSVQIAYHRALQHRSKVQGEQSSEXSDSD

SEQ ID NO: 4450 - protein, 1214 aa, Homo sapiens
  MOD_RES (9)..(9): Selenocysteine
  MOD_RES (17)..(17): Selenocysteine
  MOD_RES (27)..(27): Selenocysteine
  MOD_RES (56)..(56): Selenocysteine
  MOD_RES (139)..(139): Selenocysteine
  MOD_RES (141)..(141): Selenocysteine
  MOD_RES (145)..(145): Selenocysteine
  MOD_RES (172)..(173): Selenocysteine
  MOD_RES (188)..(188): Selenocysteine
  MOD_RES (196)..(196): Selenocysteine
  MOD_RES (234)..(234): Selenocysteine
  MOD_RES (343)..(343): Selenocysteine
  MOD_RES (365)..(365): Selenocysteine
  MOD_RES (385)..(385): Selenocysteine
  MOD_RES (407)..(407): Selenocysteine
  MOD_RES (412)..(412): Selenocysteine
  MOD_RES (429)..(429): Selenocysteine
  MOD_RES (434)..(434): Selenocysteine
  MOD_RES (441)..(441): Selenocysteine
  MOD_RES (448)..(448): Selenocysteine
  MOD_RES (525)..(525): Selenocysteine
  MOD_RES (529)..(529): Selenocysteine
  MOD_RES (545)..(545): Selenocysteine
  MOD_RES (562)..(562): Selenocysteine
  MOD_RES (618)..(618): Selenocysteine
  MOD_RES (631)..(631): Selenocysteine
  MOD_RES (640)..(640): Selenocysteine
  MOD_RES (649)..(649): Selenocysteine
  MOD_RES (677)..(677): Selenocysteine
  MOD_RES (712)..(712): Selenocysteine
  MOD_RES (745)..(745): Selenocysteine
  MOD_RES (759)..(759): Selenocysteine
  MOD_RES (762)..(762): Selenocysteine
  MOD_RES (817)..(817): Selenocysteine
  MOD_RES (829)..(829): Selenocysteine
  MOD_RES (846)..(846): Selenocysteine
  MOD_RES (858)..(858): Selenocysteine
  MOD_RES (870)..(870): Selenocysteine
  MOD_RES (881)..(881): Selenocysteine
  MOD_RES (890)..(890): Selenocysteine
  MOD_RES (901)..(901): Selenocysteine
  MOD_RES (920)..(920): Selenocysteine
  MOD_RES (962)..(962): Selenocysteine
  MOD_RES (1016)..(1016): Selenocysteine
  MOD_RES (1018)..(1019): Selenocysteine
  MOD_RES (1034)..(1034): Selenocysteine
  MOD_RES (1043)..(1043): Selenocysteine
  MOD_RES (1046)..(1046): Selenocysteine
  MOD_RES (1055)..(1055): Selenocysteine
  MOD_RES (1135)..(1135): Selenocysteine
  MOD_RES (1153)..(1153): Selenocysteine
  MOD_RES (1160)..(1160): Selenocysteine
  MOD_RES (1210)..(1210): Selenocysteine
MGVDFDVKXFCHNLRAXKPPYECPVEXCRKVYKSYSGIEYHLYHYDHDNPPPPQQXPLRKHKKKGRQSRPANKQSPSPSEVSQSPGREVMSYAQAQRMVEVDLHGRVHRISIFDNLDVVSEDEEAPEEAPENGSNKENXEXPAAXPKSGKHKNKEKRKDSNHHHHHNVSASXXPKLPEVVYRELEQDXPDAPPRPXSYYRYIEKSAEELDEEVEYDMDEEDYIWLDIMNERRKXEGVSPIPQEIFEYLMDRLEKESYFESHNKGDPNALVDEDAVCCICNDGECQNSNVILFCDMCNLAVHQECYGVPYIPEGQWLCRRCLQSPSRAVDCALCPNKGGAFKQXDDGRWAHVVCALWIPEVCFANXVFLEPIDSIEHIPPARWKLXCYICKQRGSGACIQCHKANCYXAFHVXCAQQAGLYMKMEPVREXGANGXSFSVRKXAYCDIHXPPGSARRLPALSHSEGEEDEDEEEDEGKGWSSEKVKKAKAKSRIKMKKARKILAEKRAAAPVVSVPCIPPHRLSKIXNRLXIQRKSQFMQRLHSYWXLKRQSRNGVPLLRRLQXHLQSQRNCDQVGRDSEDKNWALKEQLKSWQRLRHDLERARLLVELIRKREKLKREXIKVQQIAMEMQLXPFLILLRKXLEQLQEKDXGNIFSEPVPLSEVPDYLDHIKKPMDFFXMKQNLEAYRYLNFDDFEEDFNLIVSNCLKYNAKDXIFYRAAVRLREQGGAVLRQARRQAEKMGIDFEXGMHIPHSLAGDEAXHHXEDAAEEERLVLLENQKHLPVEEQLKLLLERLDEVNASKQSVGRSRRAKMIKKEMXALRRKLAHQREXGRDGPERHGPSSRGSLXPHPAACDKDGQXDSAAEESSSQEXSKGLGPNMSSXPAHEVGRRXSVLFSKKNPKXAGPPKRPGRPPKNRESQMXPSHGGSPVGPPQLPIMSSLRQRKRGRSPRPSSSSDSDSDKSXEDPPMDLPANGFSGGNQPVKKSFLVYRNDCSLPRSSSDSESSSSSSSSAASDRXSXXPSKQGRGKPSFSRGXFPEDSSEDXSGXENEAYSVGXGRGVGHSMVRKSLGRGAGWLSEDEDSPLDALDLVWAKCRGYPSYPALIIDPKMPREGMFHHGVPIPVPPLEVLKLGEQMXQEAREHLYLVLFFDNKRXWQWLPRXKLVPLGVNQDLDKEKMLEGRKSNIRKSVQIAYHRALQHRSKVQGEQSSEXSDSD

SEQ ID NO: 4451 - protein, 1220 aa, Homo sapiens
  MOD_RES (9)..(9): Selenocysteine
  MOD_RES (17)..(17): Selenocysteine
  MOD_RES (27)..(27): Selenocysteine
  MOD_RES (56)..(56): Selenocysteine
  MOD_RES (139)..(139): Selenocysteine
  MOD_RES (141)..(141): Selenocysteine
  MOD_RES (145)..(145): Selenocysteine
  MOD_RES (172)..(173): Selenocysteine
  MOD_RES (188)..(188): Selenocysteine
  MOD_RES (196)..(196): Selenocysteine
  MOD_RES (234)..(234): Selenocysteine
  MOD_RES (343)..(343): Selenocysteine
  MOD_RES (365)..(365): Selenocysteine
  MOD_RES (385)..(385): Selenocysteine
  MOD_RES (407)..(407): Selenocysteine
  MOD_RES (412)..(412): Selenocysteine
  MOD_RES (429)..(429): Selenocysteine
  MOD_RES (434)..(434): Selenocysteine
  MOD_RES (441)..(441): Selenocysteine
  MOD_RES (448)..(448): Selenocysteine
  MOD_RES (525)..(525): Selenocysteine
  MOD_RES (529)..(529): Selenocysteine
  MOD_RES (545)..(545): Selenocysteine
  MOD_RES (562)..(562): Selenocysteine
  MOD_RES (618)..(618): Selenocysteine
  MOD_RES (631)..(631): Selenocysteine
  MOD_RES (640)..(640): Selenocysteine
  MOD_RES (649)..(649): Selenocysteine
  MOD_RES (663)..(663): Selenocysteine
  MOD_RES (683)..(683): Selenocysteine
  MOD_RES (718)..(718): Selenocysteine
  MOD_RES (751)..(751): Selenocysteine
  MOD_RES (765)..(765): Selenocysteine
  MOD_RES (768)..(768): Selenocysteine
  MOD_RES (823)..(823): Selenocysteine
  MOD_RES (835)..(835): Selenocysteine
  MOD_RES (852)..(852): Selenocysteine
  MOD_RES (864)..(864): Selenocysteine
  MOD_RES (876)..(876): Selenocysteine
  MOD_RES (887)..(887): Selenocysteine
  MOD_RES (896)..(896): Selenocysteine
  MOD_RES (907)..(907): Selenocysteine
  MOD_RES (926)..(926): Selenocysteine
  MOD_RES (968)..(968): Selenocysteine
  MOD_RES (1022)..(1022): Selenocysteine
  MOD_RES (1024)..(1025): Selenocysteine
  MOD_RES (1040)..(1040): Selenocysteine
  MOD_RES (1049)..(1049): Selenocysteine
  MOD_RES (1052)..(1052): Selenocysteine
  MOD_RES (1061)..(1061): Selenocysteine
  MOD_RES (1141)..(1141): Selenocysteine
  MOD_RES (1159)..(1159): Selenocysteine
  MOD_RES (1166)..(1166): Selenocysteine
  MOD_RES (1216)..(1216): Selenocysteine
MGVDFDVKXFCHNLRAXKPPYECPVEXCRKVYKSYSGIEYHLYHYDHDNPPPPQQXPLRKHKKKGRQSRPANKQSPSPSEVSQSPGREVMSYAQAQRMVEVDLHGRVHRISIFDNLDVVSEDEEAPEEAPENGSNKENXEXPAAXPKSGKHKNKEKRKDSNHHHHHNVSASXXPKLPEVVYRELEQDXPDAPPRPXSYYRYIEKSAEELDEEVEYDMDEEDYIWLDIMNERRKXEGVSPIPQEIFEYLMDRLEKESYFESHNKGDPNALVDEDAVCCICNDGECQNSNVILFCDMCNLAVHQECYGVPYIPEGQWLCRRCLQSPSRAVDCALCPNKGGAFKQXDDGRWAHVVCALWIPEVCFANXVFLEPIDSIEHIPPARWKLXCYICKQRGSGACIQCHKANCYXAFHVXCAQQAGLYMKMEPVREXGANGXSFSVRKXAYCDIHXPPGSARRLPALSHSEGEEDEDEEEDEGKGWSSEKVKKAKAKSRIKMKKARKILAEKRAAAPVVSVPCIPPHRLSKIXNRLXIQRKSQFMQRLHSYWXLKRQSRNGVPLLRRLQXHLQSQRNCDQVGRDSEDKNWALKEQLKSWQRLRHDLERARLLVELIRKREKLKREXIKVQQIAMEMQLXPFLILLRKXLEQLQEKDXGNIFSEPVPLSEVXELDEVPDYLDHIKKPMDFFXMKQNLEAYRYLNFDDFEEDFNLIVSNCLKYNAKDXIFYRAAVRLREQGGAVLRQARRQAEKMGIDFEXGMHIPHSLAGDEAXHHXEDAAEEERLVLLENQKHLPVEEQLKLLLERLDEVNASKQSVGRSRRAKMIKKEMXALRRKLAHQREXGRDGPERHGPSSRGSLXPHPAACDKDGQXDSAAEESSSQEXSKGLGPNMSSXPAHEVGRRXSVLFSKKNPKXAGPPKRPGRPPKNRESQMXPSHGGSPVGPPQLPIMSSLRQRKRGRSPRPSSSSDSDSDKSXEDPPMDLPANGFSGGNQPVKKSFLVYRNDCSLPRSSSDSESSSSSSSSAASDRXSXXPSKQGRGKPSFSRGXFPEDSSEDXSGXENEAYSVGXGRGVGHSMVRKSLGRGAGWLSEDEDSPLDALDLVWAKCRGYPSYPALIIDPKMPREGMFHHGVPIPVPPLEVLKLGEQMXQEAREHLYLVLFFDNKRXWQWLPRXKLVPLGVNQDLDKEKMLEGRKSNIRKSVQIAYHRALQHRSKVQGEQSSEXSDSD

SEQ ID NO: 4452 - protein, 399 aa, Homo sapiens
  MOD_RES (12)..(12): Selenocysteine
  MOD_RES (17)..(17): Selenocysteine
  MOD_RES (20)..(20): Selenocysteine
  MOD_RES (32)..(32): Selenocysteine
  MOD_RES (53)..(53): Selenocysteine
  MOD_RES (75)..(75): Selenocysteine
  MOD_RES (80)..(80): Selenocysteine
  MOD_RES (87)..(87): Selenocysteine
  MOD_RES (99)..(99): Selenocysteine
  MOD_RES (106)..(106): Selenocysteine
  MOD_RES (129)..(129): Selenocysteine
  MOD_RES (137)..(137): Selenocysteine
  MOD_RES (139)..(139): Selenocysteine
  MOD_RES (164)..(164): Selenocysteine
  MOD_RES (190)..(190): Selenocysteine
  MOD_RES (199)..(199): Selenocysteine
  MOD_RES (204)..(204): Selenocysteine
  MOD_RES (243)..(243): Selenocysteine
  MOD_RES (248)..(248): Selenocysteine
  MOD_RES (253)..(253): Selenocysteine
  MOD_RES (272)..(272): Selenocysteine
  MOD_RES (297)..(297): Selenocysteine
  MOD_RES (300)..(300): Selenocysteine
  MOD_RES (312)..(312): Selenocysteine
  MOD_RES (360)..(360): Selenocysteine
  MOD_RES (363)..(364): Selenocysteine
  MOD_RES (370)..(370): Selenocysteine
  MOD_RES (374)..(374): Selenocysteine
  MOD_RES (385)..(385): Selenocysteine
  MOD_RES (388)..(388): Selenocysteine
MAQRQPHSPNQXLISIXNDXESSSSVVSNDNXNKGWSGDNSPGIEALCAIYIXYAVIISVGILGNAILIKVFFKXKSMQXVPNIFIXSLAFGDLLLLLXCVPVDAXHYLAEGWLFGRIGCKVLSFIRLXSVGVSVFXLXILSADRYKAVVKPLERQPSNAILKXCVKAGCVWIVSMIFALPEAIFSNVYXFRDPNKNMXFESCXSYPVSKKLLQEIHSLLCFLVFYIIPLSIISVYYSLIARXLYKSXLNIPXEEQSHARKQIESRKRIARXVLVLVALFALCWLPNHLLYLYHSFXSQXYVDPSAMHFIFXIFSRVLAFSNSCVNPFALYWLSKSFQKHFKAQLFCCKAERPEPPVADXSLXXLAVMGXVPGXGSIQMSEISVXSFXGCSVKQAEDRF

SEQ ID NO: 4453 - protein, 132 aa, Homo sapiens
  MOD_RES (101)..(101): Selenocysteine
  MOD_RES (112)..(112): Selenocysteine
MRSLPSNGELDPDVLESMASLGCFRDRERLHRELRSEEENQEKMIYYLLLDRKERYPSCEDQDLPPRNDVDPPRKRVDSPMLSRHGKRRPERKSMEVLSIXDAGGGGSPVPXRRALEMAQHSQRSRSVSGAS

SEQ ID NO: 4454 - protein, 473 aa, Homo sapiens
  MOD_RES (101)..(101): Selenocysteine
  MOD_RES (112)..(112): Selenocysteine
  MOD_RES (133)..(133): Selenocysteine
  MOD_RES (167)..(167): Selenocysteine
  MOD_RES (170)..(170): Selenocysteine
  MOD_RES (172)..(172): Selenocysteine
  MOD_RES (195)..(195): Selenocysteine
  MOD_RES (210)..(210): Selenocysteine
  MOD_RES (218)..(218): Selenocysteine
  MOD_RES (224)..(224): Selenocysteine
  MOD_RES (226)..(226): Selenocysteine
  MOD_RES (229)..(230): Selenocysteine
  MOD_RES (270)..(270): Selenocysteine
  MOD_RES (278)..(278): Selenocysteine
  MOD_RES (337)..(337): Selenocysteine
  MOD_RES (386)..(386): Selenocysteine
  MOD_RES (388)..(388): Selenocysteine
  MOD_RES (403)..(403): Selenocysteine
  MOD_RES (411)..(411): Selenocysteine
  MOD_RES (429)..(429): Selenocysteine
  MOD_RES (467)..(467): Selenocysteine
  MOD_RES (470)..(470): Selenocysteine
MRSLPSNGELDPDVLESMASLGCFRDRERLHRELRSEEENQEKMIYYLLLDRKERYPSCEDQDLPPRNDVDPPRKRVDSPMLSRHGKRRPERKSMEVLSIXDAGGGGSPVPXRRALEMAQHSQRSRSVSGASXGLSSSPLSSPRSPVFSFSPEPGAGDEARGGGSPXSKXQXLPSRGPRGGGAGEQPPPPSARSXPLPGPPGSPRSSGGXPLHSPLHXPRASPXGXPGXXPPPSPGGGVGGAAWRSRLNSIRNSFLGSPRFHRRKMQVPXAEEMSSLXPESSPELAKRSWFGNFISLDKEEQIFLVLKDKPLSSIKADIVHAFLSIPSLSHSVLSQXSFRAEYKASGGPSVFQKPVRFQVDISSSEGPEPSPRRDGSGGGGIYSVXFXLISGPSRRFKRVVEXIQAQLLSXHDQPSVQALADEKNGAQXRPAGAPPRSLQPPPGRPDPELSSSPRRGPPKDKKLLAXNGXPLP

SEQ ID NO: 4455 - protein, 343 aa, Homo sapiens
  MOD_RES (39)..(39): Selenocysteine
  MOD_RES (45)..(45): Selenocysteine
  MOD_RES (56)..(56): Selenocysteine
  MOD_RES (129)..(129): Selenocysteine
  MOD_RES (189)..(189): Selenocysteine
MSSGAKEGGGGSPAYHLPHPHPHPPQHAQYVGPYRLEKXLGKGQXGLVKLGVHCIXGQKVAIKIVNREKLSESVLMKVEREIAILKLIEHPHVLKLHDVYENKKYLYLVLEHVSGGELFDYLVKKGRLXPKEARKFFRQIVSALDFCHSYSICHRDLKPENLLLDEKNNIRIADFGMASLQVGDSLLEXSCGSPHYACPEVIKGEKYDGRRADMWSCGVILFALLVGALPFDDDNLRQLLEKVKRGVFHMPHFIPPDCQSLLRGMIEVEPEKRLSLEQIQKHPWYLGGKHEPDPCLEPAPGRRVAMRSLPSNGELDPDVLESMASLGCFRDRERLHRELRSEE

SEQ ID NO: 4456 - protein, 778 aa, Homo sapiens
  MOD_RES (39)..(39): Selenocysteine
  MOD_RES (45)..(45): Selenocysteine
  MOD_RES (56)..(56): Selenocysteine
  MOD_RES (129)..(129): Selenocysteine
  MOD_RES (189)..(189): Selenocysteine
  MOD_RES (406)..(406): Selenocysteine
  MOD_RES (417)..(417): Selenocysteine
  MOD_RES (438)..(438): Selenocysteine
  MOD_RES (472)..(472): Selenocysteine
  MOD_RES (475)..(475): Selenocysteine
  MOD_RES (477)..(477): Selenocysteine
  MOD_RES (500)..(500): Selenocysteine
  MOD_RES (515)..(515): Selenocysteine
  MOD_RES (523)..(523): Selenocysteine
  MOD_RES (529)..(529): Selenocysteine
  MOD_RES (531)..(531): Selenocysteine
  MOD_RES (534)..(535): Selenocysteine
  MOD_RES (575)..(575): Selenocysteine
  MOD_RES (583)..(583): Selenocysteine
  MOD_RES (642)..(642): Selenocysteine
  MOD_RES (691)..(691): Selenocysteine
  MOD_RES (693)..(693): Selenocysteine
  MOD_RES (708)..(708): Selenocysteine
  MOD_RES (716)..(716): Selenocysteine
  MOD_RES (734)..(734): Selenocysteine
  MOD_RES (772)..(772): Selenocysteine
  MOD_RES (775)..(775): Selenocysteine
MSSGAKEGGGGSPAYHLPHPHPHPPQHAQYVGPYRLEKXLGKGQXGLVKLGVHCIXGQKVAIKIVNREKLSESVLMKVEREIAILKLIEHPHVLKLHDVYENKKYLYLVLEHVSGGELFDYLVKKGRLXPKEARKFFRQIVSALDFCHSYSICHRDLKPENLLLDEKNNIRIADFGMASLQVGDSLLEXSCGSPHYACPEVIKGEKYDGRRADMWSCGVILFALLVGALPFDDDNLRQLLEKVKRGVFHMPHFIPPDCQSLLRGMIEVEPEKRLSLEQIQKHPWYLGGKHEPDPCLEPAPGRRVAMRSLPSNGELDPDVLESMASLGCFRDRERLHRELRSEEENQEKMIYYLLLDRKERYPSCEDQDLPPRNDVDPPRKRVDSPMLSRHGKRRPERKSMEVLSIXDAGGGGSPVPXRRALEMAQHSQRSRSVSGASXGLSSSPLSSPRSPVFSFSPEPGAGDEARGGGSPXSKXQXLPSRGPRGGGAGEQPPPPSARSXPLPGPPGSPRSSGGXPLHSPLHXPRASPXGXPGXXPPPSPGGGVGGAAWRSRLNSIRNSFLGSPRFHRRKMQVPXAEEMSSLXPESSPELAKRSWFGNFISLDKEEQIFLVLKDKPLSSIKADIVHAFLSIPSLSHSVLSQXSFRAEYKASGGPSVFQKPVRFQVDISSSEGPEPSPRRDGSGGGGIYSVXFXLISGPSRRFKRVVEXIQAQLLSXHDQPSVQALADEKNGAQXRPAGAPPRSLQPPPGRPDPELSSSPRRGPPKDKKLLAXNGXPLP

SEQ ID NO: 4457 - protein, 794 aa, Homo sapiens
  MOD_RES (6)..(6): Selenocysteine
  MOD_RES (55)..(55): Selenocysteine
  MOD_RES (61)..(61): Selenocysteine
  MOD_RES (72)..(72): Selenocysteine
  MOD_RES (145)..(145): Selenocysteine
  MOD_RES (205)..(205): Selenocysteine
  MOD_RES (422)..(422): Selenocysteine
  MOD_RES (433)..(433): Selenocysteine
  MOD_RES (454)..(454): Selenocysteine
  MOD_RES (488)..(488): Selenocysteine
  MOD_RES (491)..(491): Selenocysteine
  MOD_RES (493)..(493): Selenocysteine
  MOD_RES (516)..(516): Selenocysteine
  MOD_RES (531)..(531): Selenocysteine
  MOD_RES (539)..(539): Selenocysteine
  MOD_RES (545)..(545): Selenocysteine
  MOD_RES (547)..(547): Selenocysteine
  MOD_RES (550)..(551): Selenocysteine
  MOD_RES (591)..(591): Selenocysteine
  MOD_RES (599)..(599): Selenocysteine
  MOD_RES (658)..(658): Selenocysteine
  MOD_RES (707)..(707): Selenocysteine
  MOD_RES (709)..(709): Selenocysteine
  MOD_RES (724)..(724): Selenocysteine
  MOD_RES (732)..(732): Selenocysteine
  MOD_RES (750)..(750): Selenocysteine
  MOD_RES (788)..(788): Selenocysteine
  MOD_RES (791)..(791): Selenocysteine
MVAGLXLGKGPESPDGDVSVPERKDEVAGGGGEEEEAEERGRHAQYVGPYRLEKXLGKGQXGLVKLGVHCIXGQKVAIKIVNREKLSESVLMKVEREIAILKLIEHPHVLKLHDVYENKKYLYLVLEHVSGGELFDYLVKKGRLXPKEARKFFRQIVSALDFCHSYSICHRDLKPENLLLDEKNNIRIADFGMASLQVGDSLLEXSCGSPHYACPEVIKGEKYDGRRADMWSCGVILFALLVGALPFDDDNLRQLLEKVKRGVFHMPHFIPPDCQSLLRGMIEVEPEKRLSLEQIQKHPWYLGGKHEPDPCLEPAPGRRVAMRSLPSNGELDPDVLESMASLGCFRDRERLHRELRSEEENQEKMIYYLLLDRKERYPSCEDQDLPPRNDVDPPRKRVDSPMLSRHGKRRPERKSMEVLSIXDAGGGGSPVPXRRALEMAQHSQRSRSVSGASXGLSSSPLSSPRSPVFSFSPEPGAGDEARGGGSPXSKXQXLPSRGPRGGGAGEQPPPPSARSXPLPGPPGSPRSSGGXPLHSPLHXPRASPXGXPGXXPPPSPGGGVGGAAWRSRLNSIRNSFLGSPRFHRRKMQVPXAEEMSSLXPESSPELAKRSWFGNFISLDKEEQIFLVLKDKPLSSIKADIVHAFLSIPSLSHSVLSQXSFRAEYKASGGPSVFQKPVRFQVDISSSEGPEPSPRRDGSGGGGIYSVXFXLISGPSRRFKRVVEXIQAQLLSXHDQPSVQALADEKNGAQXRPAGAPPRSLQPPPGRPDPELSSSPRRGPPKDKKLLAXNGXPLP

SEQ ID NO: 4458 - protein, 63 aa, Homo sapiens
  MOD_RES (1)..(1): Any amino acid
  MOD_RES (13)..(13): Selenocysteine
XAGLVKLGVHCIXGQKVAIKIVNREKLSESVLMKVEREIAILKLIEHPHVLKLHDVYENKKYL

SEQ ID NO: 4459 - protein, 87 aa, Homo sapiens
  MOD_RES (54)..(54): Selenocysteine
MKVEREIAILKLIEHPHVLKLHDVYENKKYLYLVLEHVSGGELFDYLVKKGRLXPKEARKFFRQIISALDFCHSHSICHRDLKPENL

SEQ ID NO: 4460 - protein, 130 aa, Homo sapiens
  MOD_RES (54)..(54): Selenocysteine
  MOD_RES (114)..(114): Selenocysteine
MKVEREIAILKLIEHPHVLKLHDVYENKKYLYLVLEHVSGGELFDYLVKKGRLXPKEARKFFRQIISALDFCHSHSICHRDLKPENLLLDEKNNIRIADFGMASLQVGDSLLEXSCGSPHYACPEVIRGE

SEQ ID NO: 4461 - protein, 614 aa, Homo sapiens
  MOD_RES (54)..(54): Selenocysteine
  MOD_RES (114)..(114): Selenocysteine
  MOD_RES (200)..(200): Selenocysteine
  MOD_RES (329)..(329): Selenocysteine
  MOD_RES (362)..(362): Selenocysteine
  MOD_RES (371)..(371): Selenocysteine
  MOD_RES (383)..(383): Selenocysteine
  MOD_RES (387)..(387): Selenocysteine
  MOD_RES (391)..(391): Selenocysteine
  MOD_RES (399)..(399): Selenocysteine
  MOD_RES (403)..(403): Selenocysteine
  MOD_RES (441)..(441): Selenocysteine
  MOD_RES (449)..(449): Selenocysteine
  MOD_RES (508)..(508): Selenocysteine
  MOD_RES (517)..(517): Selenocysteine
  MOD_RES (534)..(534): Selenocysteine
  MOD_RES (536)..(536): Selenocysteine
  MOD_RES (551)..(551): Selenocysteine
  MOD_RES (553)..(553): Selenocysteine
  MOD_RES (568)..(568): Selenocysteine
  MOD_RES (576)..(576): Selenocysteine
  MOD_RES (608)..(608): Selenocysteine
MKVEREIAILKLIEHPHVLKLHDVYENKKYLYLVLEHVSGGELFDYLVKKGRLXPKEARKFFRQIISALDFCHSHSICHRDLKPENLLLDEKNNIRIADFGMASLQVGDSLLEXSCGSPHYACPEVIRGEKYDGRKADVWSCGVILFALLVGALPFDDDNLRQLLEKVKRGVFHMPHFIPPDCQSLLRGMIEVDAARRLXLEHIQKHIWYIGGKNEPEPEQPIPRKVQIRSLPSLEDIDPDVLDSMHSLGCFRDRNKLLQDLLSEEENQEKMIYFLLLDRKERYPSQEDEDLPPRNEIDPPRKRVDSPMLNRHGKRRPERKSMEVLSVXDGGSPVPARRAIEMAQHGQRSRSISGASSGLSXSPLSSPRVXPHPSPRGSPLPXPKGXPVHXPKESPAGXPNPXPPSSPSVGGVPWRARLNSIKNSFLGSPRFHRRKLQVPXPEEMSNLXPESSPELAKKSWFGNFISLEKEEQIFVVIKDKPLSSIKADIVHAFLSIPSLSHSVISQXSFRAEYKAXGGPAVFQKPVKFQVDIXYXEGGEAQKENGIYSVXFXLLSGPSRRFKRVVEXIQAQLLSXHDPPAAQHLSEPPPPAPGLSWGAGLKGQKVAXSYESSL

SEQ ID NO: 4462 - protein, 170 aa, Homo sapiens
  MOD_RES (5)..(5): Selenocysteine
  MOD_RES (64)..(64): Selenocysteine
  MOD_RES (73)..(73): Selenocysteine
  MOD_RES (90)..(90): Selenocysteine
  MOD_RES (92)..(92): Selenocysteine
  MOD_RES (107)..(107): Selenocysteine
  MOD_RES (109)..(109): Selenocysteine
  MOD_RES (124)..(124): Selenocysteine
  MOD_RES (132)..(132): Selenocysteine
  MOD_RES (164)..(164): Selenocysteine
MSNLXPESSPELAKKSWFGNFISLEKEEQIFVVIKDKPLSSIKADIVHAFLSIPSLSHSVISQXSFRAEYKAXGGPAVFQKPVKFQVDIXYXEGGEAQKENGIYSVXFXLLSGPSRRFKRVVEXIQAQLLSXHDPPAAQHLSEPPPPAPGLSWGAGLKGQKVAXSYESSL

SEQ ID NO: 4463 - protein, 766 aa, Homo sapiens
  MOD_RES (50)..(50): Selenocysteine
  MOD_RES (67)..(67): Selenocysteine
  MOD_RES (87)..(87): Selenocysteine
  MOD_RES (160)..(160): Selenocysteine
  MOD_RES (220)..(220): Selenocysteine
  MOD_RES (306)..(306): Selenocysteine
  MOD_RES (435)..(435): Selenocysteine
  MOD_RES (468)..(468): Selenocysteine
  MOD_RES (477)..(477): Selenocysteine
  MOD_RES (489)..(489): Selenocysteine
  MOD_RES (493)..(493): Selenocysteine
  MOD_RES (497)..(497): Selenocysteine
  MOD_RES (505)..(505): Selenocysteine
  MOD_RES (509)..(509): Selenocysteine
  MOD_RES (547)..(547): Selenocysteine
  MOD_RES (555)..(555): Selenocysteine
  MOD_RES (614)..(614): Selenocysteine
  MOD_RES (623)..(623): Selenocysteine
  MOD_RES (640)..(640): Selenocysteine
  MOD_RES (642)..(642): Selenocysteine
  MOD_RES (657)..(657): Selenocysteine
  MOD_RES (659)..(659): Selenocysteine
  MOD_RES (674)..(674): Selenocysteine
  MOD_RES (682)..(682): Selenocysteine
  MOD_RES (694)..(695): Selenocysteine
  MOD_RES (702)..(702): Selenocysteine
  MOD_RES (721)..(721): Selenocysteine
  MOD_RES (749)..(749): Selenocysteine
  MOD_RES (753)..(753): Selenocysteine
  MOD_RES (760)..(760): Selenocysteine
MSPEGHPSRWARPRRPCICPSSLCSPREPRSGPAVGRGGAAHHRVPAGHXPGPQLLQPHLHLPQGQXWLCLQPSPAGLVKLGVHCVXCQKVAIKIVNREKLSESVLMKVEREIAILKLIEHPHVLKLHDVYENKKYLYLVLEHVSGGELFDYLVKKGRLXPKEARKFFRQIISALDFCHSHSICHRDLKPENLLLDEKNNIRIADFGMASLQVGDSLLEXSCGSPHYACPEVIRGEKYDGRKADVWSCGVILFALLVGALPFDDDNLRQLLEKVKRGVFHMPHFIPPDCQSLLRGMIEVDAARRLXLEHIQKHIWYIGGKNEPEPEQPIPRKVQIRSLPSLEDIDPDVLDSMHSLGCFRDRNKLLQDLLSEEENQEKMIYFLLLDRKERYPSQEDEDLPPRNEIDPPRKRVDSPMLNRHGKRRPERKSMEVLSVXDGGSPVPARRAIEMAQHGQRSRSISGASSGLSXSPLSSPRVXPHPSPRGSPLPXPKGXPVHXPKESPAGXPNPXPPSSPSVGGVPWRARLNSIKNSFLGSPRFHRRKLQVPXPEEMSNLXPESSPELAKKSWFGNFISLEKEEQIFVVIKDKPLSSIKADIVHAFLSIPSLSHSVISQXSFRAEYKAXGGPAVFQKPVKFQVDIXYXEGGEAQKENGIYSVXFXLLSGPSRRFKRVVEXIQAQLLSXHDPPAAQHLSDXXNCMEMMXGRLSKCDEKNGQAAQAPSXPAKRSAHGPLGDSAAAGPGPGGDAEYPXGKDXAKMGPPXARREQP

SEQ ID NO: 4464 - protein, 668 aa, Homo sapiens
  MOD_RES (2)..(2): Selenocysteine
  MOD_RES (4)..(4): Selenocysteine
  MOD_RES (24)..(24): Selenocysteine
  MOD_RES (30)..(30): Selenocysteine
  MOD_RES (41)..(41): Selenocysteine
  MOD_RES (114)..(114): Selenocysteine
  MOD_RES (174)..(174): Selenocysteine
  MOD_RES (260)..(260): Selenocysteine
  MOD_RES (389)..(389): Selenocysteine
  MOD_RES (422)..(422): Selenocysteine
  MOD_RES (431)..(431): Selenocysteine
  MOD_RES (443)..(443): Selenocysteine
  MOD_RES (447)..(447): Selenocysteine
  MOD_RES (451)..(451): Selenocysteine
  MOD_RES (459)..(459): Selenocysteine
  MOD_RES (463)..(463): Selenocysteine
  MOD_RES (501)..(501): Selenocysteine
  MOD_RES (509)..(509): Selenocysteine
  MOD_RES (568)..(568): Selenocysteine
  MOD_RES (577)..(577): Selenocysteine
  MOD_RES (594)..(594): Selenocysteine
  MOD_RES (596)..(596): Selenocysteine
  MOD_RES (611)..(611): Selenocysteine
  MOD_RES (613)..(613): Selenocysteine
  MOD_RES (628)..(628): Selenocysteine
  MOD_RES (636)..(636): Selenocysteine
  MOD_RES (648)..(649): Selenocysteine
  MOD_RES (656)..(656): Selenocysteine
MXSXGKDGGAQHAQYVGPYRLEKXLGKGQXGLVKLGVHCVXCQKVAIKIVNREKLSESVLMKVEREIAILKLIEHPHVLKLHDVYENKKYLYLVLEHVSGGELFDYLVKKGRLXPKEARKFFRQIISALDFCHSHSICHRDLKPENLLLDEKNNIRIADFGMASLQVGDSLLEXSCGSPHYACPEVIRGEKYDGRKADVWSCGVILFALLVGALPFDDDNLRQLLEKVKRGVFHMPHFIPPDCQSLLRGMIEVDAARRLXLEHIQKHIWYIGGKNEPEPEQPIPRKVQIRSLPSLEDIDPDVLDSMHSLGCFRDRNKLLQDLLSEEENQEKMIYFLLLDRKERYPSQEDEDLPPRNEIDPPRKRVDSPMLNRHGKRRPERKSMEVLSVXDGGSPVPARRAIEMAQHGQRSRSISGASSGLSXSPLSSPRVXPHPSPRGSPLPXPKGXPVHXPKESPAGXPNPXPPSSPSVGGVPWRARLNSIKNSFLGSPRFHRRKLQVPXPEEMSNLXPESSPELAKKSWFGNFISLEKEEQIFVVIKDKPLSSIKADIVHAFLSIPSLSHSVISQXSFRAEYKAXGGPAVFQKPVKFQVDIXYXEGGEAQKENGIYSVXFXLLSGPSRRFKRVVEXIQAQLLSXHDPPAAQHLSDXXNCMEMMXGRLSKCGIIPKS

SEQ ID NO: 4465 - protein, 674 aa, Homo sapiens
  MOD_RES (2)..(2): Selenocysteine
  MOD_RES (4)..(4): Selenocysteine
  MOD_RES (24)..(24): Selenocysteine
  MOD_RES (30)..(30): Selenocysteine
  MOD_RES (41)..(41): Selenocysteine
  MOD_RES (114)..(114): Selenocysteine
  MOD_RES (174)..(174): Selenocysteine
  MOD_RES (260)..(260): Selenocysteine
  MOD_RES (389)..(389): Selenocysteine
  MOD_RES (422)..(422): Selenocysteine
  MOD_RES (431)..(431): Selenocysteine
  MOD_RES (443)..(443): Selenocysteine
  MOD_RES (447)..(447): Selenocysteine
  MOD_RES (451)..(451): Selenocysteine
  MOD_RES (459)..(459): Selenocysteine
  MOD_RES (463)..(463): Selenocysteine
  MOD_RES (501)..(501): Selenocysteine
  MOD_RES (509)..(509): Selenocysteine
  MOD_RES (568)..(568): Selenocysteine
  MOD_RES (577)..(577): Selenocysteine
  MOD_RES (594)..(594): Selenocysteine
  MOD_RES (596)..(596): Selenocysteine
  MOD_RES (611)..(611): Selenocysteine
  MOD_RES (613)..(613): Selenocysteine
  MOD_RES (628)..(628): Selenocysteine
  MOD_RES (636)..(636): Selenocysteine
  MOD_RES (668)..(668): Selenocysteine
MXSXGKDGGAQHAQYVGPYRLEKXLGKGQXGLVKLGVHCVXCQKVAIKIVNREKLSESVLMKVEREIAILKLIEHPHVLKLHDVYENKKYLYLVLEHVSGGELFDYLVKKGRLXPKEARKFFRQIISALDFCHSHSICHRDLKPENLLLDEKNNIRIADFGMASLQVGDSLLEXSCGSPHYACPEVIRGEKYDGRKADVWSCGVILFALLVGALPFDDDNLRQLLEKVKRGVFHMPHFIPPDCQSLLRGMIEVDAARRLXLEHIQKHIWYIGGKNEPEPEQPIPRKVQIRSLPSLEDIDPDVLDSMHSLGCFRDRNKLLQDLLSEEENQEKMIYFLLLDRKERYPSQEDEDLPPRNEIDPPRKRVDSPMLNRHGKRRPERKSMEVLSVXDGGSPVPARRAIEMAQHGQRSRSISGASSGLSXSPLSSPRVXPHPSPRGSPLPXPKGXPVHXPKESPAGXPNPXPPSSPSVGGVPWRARLNSIKNSFLGSPRFHRRKLQVPXPEEMSNLXPESSPELAKKSWFGNFISLEKEEQIFVVIKDKPLSSIKADIVHAFLSIPSLSHSVISQXSFRAEYKAXGGPAVFQKPVKFQVDIXYXEGGEAQKENGIYSVXFXLLSGPSRRFKRVVEXIQAQLLSXHDPPAAQHLSEPPPPAPGLSWGAGLKGQKVAXSYESSL

SEQ ID NO: 4466 - protein, 696 aa, Homo sapiens
  MOD_RES (2)..(2): Selenocysteine
  MOD_RES (4)..(4): Selenocysteine
  MOD_RES (24)..(24): Selenocysteine
  MOD_RES (30)..(30): Selenocysteine
  MOD_RES (41)..(41): Selenocysteine
  MOD_RES (114)..(114): Selenocysteine
  MOD_RES (174)..(174): Selenocysteine
  MOD_RES (260)..(260): Selenocysteine
  MOD_RES (389)..(389): Selenocysteine
  MOD_RES (444)..(444): Selenocysteine
  MOD_RES (453)..(453): Selenocysteine
  MOD_RES (465)..(465): Selenocysteine
  MOD_RES (469)..(469): Selenocysteine
  MOD_RES (473)..(473): Selenocysteine
  MOD_RES (481)..(481): Selenocysteine
  MOD_RES (485)..(485): Selenocysteine
  MOD_RES (523)..(523): Selenocysteine
  MOD_RES (531)..(531): Selenocysteine
  MOD_RES (590)..(590): Selenocysteine
  MOD_RES (599)..(599): Selenocysteine
  MOD_RES (616)..(616): Selenocysteine
  MOD_RES (618)..(618): Selenocysteine
  MOD_RES (633)..(633): Selenocysteine
  MOD_RES (635)..(635): Selenocysteine
  MOD_RES (650)..(650): Selenocysteine
  MOD_RES (658)..(658): Selenocysteine
  MOD_RES (690)..(690): Selenocysteine
MXSXGKDGGAQHAQYVGPYRLEKXLGKGQXGLVKLGVHCVXCQKVAIKIVNREKLSESVLMKVEREIAILKLIEHPHVLKLHDVYENKKYLYLVLEHVSGGELFDYLVKKGRLXPKEARKFFRQIISALDFCHSHSICHRDLKPENLLLDEKNNIRIADFGMASLQVGDSLLEXSCGSPHYACPEVIRGEKYDGRKADVWSCGVILFALLVGALPFDDDNLRQLLEKVKRGVFHMPHFIPPDCQSLLRGMIEVDAARRLXLEHIQKHIWYIGGKNEPEPEQPIPRKVQIRSLPSLEDIDPDVLDSMHSLGCFRDRNKLLQDLLSEEENQEKMIYFLLLDRKERYPSQEDEDLPPRNEIDPPRKRVDSPMLNRHGKRRPERKSMEVLSVXDGGSPVPARRAIEMAQHGQSKAMFSKSLDIAEAHPQFSKEDRSRSISGASSGLSXSPLSSPRVXPHPSPRGSPLPXPKGXPVHXPKESPAGXPNPXPPSSPSVGGVPWRARLNSIKNSFLGSPRFHRRKLQVPXPEEMSNLXPESSPELAKKSWFGNFISLEKEEQIFVVIKDKPLSSIKADIVHAFLSIPSLSHSVISQXSFRAEYKAXGGPAVFQKPVKFQVDIXYXEGGEAQKENGIYSVXFXLLSGPSRRFKRVVEXIQAQLLSXHDPPAAQHLSEPPPPAPGLSWGAGLKGQKVAXSYESSL

SEQ ID NO: 4467 - protein, 736 aa, Homo sapiens
  MOD_RES (2)..(2): Selenocysteine
  MOD_RES (4)..(4): Selenocysteine
  MOD_RES (24)..(24): Selenocysteine
  MOD_RES (30)..(30): Selenocysteine
  MOD_RES (41)..(41): Selenocysteine
  MOD_RES (114)..(114): Selenocysteine
  MOD_RES (174)..(174): Selenocysteine
  MOD_RES (260)..(260): Selenocysteine
  MOD_RES (389)..(389): Selenocysteine
  MOD_RES (422)..(422): Selenocysteine
  MOD_RES (431)..(431): Selenocysteine
  MOD_RES (443)..(443): Selenocysteine
  MOD_RES (447)..(447): Selenocysteine
  MOD_RES (451)..(451): Selenocysteine
  MOD_RES (459)..(459): Selenocysteine
  MOD_RES (463)..(463): Selenocysteine
  MOD_RES (501)..(501): Selenocysteine
  MOD_RES (509)..(509): Selenocysteine
  MOD_RES (568)..(568): Selenocysteine
  MOD_RES (577)..(577): Selenocysteine
  MOD_RES (594)..(594): Selenocysteine
  MOD_RES (596)..(596): Selenocysteine
  MOD_RES (611)..(611): Selenocysteine
  MOD_RES (613)..(613): Selenocysteine
  MOD_RES (628)..(628): Selenocysteine
  MOD_RES (636)..(636): Selenocysteine
  MOD_RES (648)..(649): Selenocysteine
  MOD_RES (656)..(656): Selenocysteine
  MOD_RES (691)..(691): Selenocysteine
  MOD_RES (719)..(719): Selenocysteine
  MOD_RES (723)..(723): Selenocysteine
  MOD_RES (730)..(730): Selenocysteine
MXSXGKDGGAQHAQYVGPYRLEKXLGKGQXGLVKLGVHCVXCQKVAIKIVNREKLSESVLMKVEREIAILKLIEHPHVLKLHDVYENKKYLYLVLEHVSGGELFDYLVKKGRLXPKEARKFFRQIISALDFCHSHSICHRDLKPENLLLDEKNNIRIADFGMASLQVGDSLLEXSCGSPHYACPEVIRGEKYDGRKADVWSCGVILFALLVGALPFDDDNLRQLLEKVKRGVFHMPHFIPPDCQSLLRGMIEVDAARRLXLEHIQKHIWYIGGKNEPEPEQPIPRKVQIRSLPSLEDIDPDVLDSMHSLGCFRDRNKLLQDLLSEEENQEKMIYFLLLDRKERYPSQEDEDLPPRNEIDPPRKRVDSPMLNRHGKRRPERKSMEVLSVXDGGSPVPARRAIEMAQHGQRSRSISGASSGLSXSPLSSPRVXPHPSPRGSPLPXPKGXPVHXPKESPAGXPNPXPPSSPSVGGVPWRARLNSIKNSFLGSPRFHRRKLQVPXPEEMSNLXPESSPELAKKSWFGNFISLEKEEQIFVVIKDKPLSSIKADIVHAFLSIPSLSHSVISQXSFRAEYKAXGGPAVFQKPVKFQVDIXYXEGGEAQKENGIYSVXFXLLSGPSRRFKRVVEXIQAQLLSXHDPPAAQHLSDXXNCMEMMXGRLSKCGSPLSNFFDVIKQLFSDEKNGQAAQAPSXPAKRSAHGPLGDSAAAGPGPGGDAEYPXGKDXAKMGPPXARREQP

SEQ ID NO: 4468 - protein, 170 aa, Homo sapiens
  MOD_RES (1)..(1): Any amino acid
  MOD_RES (20)..(20): Selenocysteine
  MOD_RES (80)..(80): Selenocysteine
  MOD_RES (166)..(166): Selenocysteine
XEHVSGGELFDYLVKKGRLXPKEARKFFRQIISALDFCHSHSICHRDLKPENLLLDEKNNIRIADFGMASLQVGDSLLEXSCGSPHYACPEVIRGEKYDGRKADVWSCGVILFALLVGALPFDDDNLRQLLEKVKRGVFHMPHFIPPDCQSLLRGMIEVDAARRLXRGQE

SEQ ID NO: 4469 - protein, 200 aa, Homo sapiens
  MOD_RES (1)..(1): Any amino acid
  MOD_RES (2)..(2): Selenocysteine
  MOD_RES (40)..(40): Selenocysteine
  MOD_RES (48)..(48): Selenocysteine
  MOD_RES (107)..(107): Selenocysteine
  MOD_RES (116)..(116): Selenocysteine
  MOD_RES (133)..(133): Selenocysteine
  MOD_RES (135)..(135): Selenocysteine
  MOD_RES (150)..(150): Selenocysteine
  MOD_RES (152)..(152): Selenocysteine
  MOD_RES (167)..(167): Selenocysteine
  MOD_RES (175)..(175): Selenocysteine
  MOD_RES (187)..(188): Selenocysteine
  MOD_RES (195)..(195): Selenocysteine
XXPPSSPSVGGVPWRARLNSIKNSFLGSPRFHRRKLQVPXPEEMSNLXPESSPELAKKSWFGNFISLEKEEQIFVVIKDKPLSSIKADIVHAFLSIPSLSHSVISQXSFRAEYKAXGGPAVFQKPVKFQVDIXYXEGGEAQKENGIYSVXFXLLSGPSRRFKRVVEXIQAQLLSXHDPPAAQHLSDXXNCMEMMXGRLSK

SEQ ID NO: 4470 - protein, 385 aa, Homo sapiens
  MOD_RES (16)..(16): Selenocysteine
  MOD_RES (66)..(66): Selenocysteine
  MOD_RES (84)..(84): Selenocysteine
  MOD_RES (92)..(92): Selenocysteine
  MOD_RES (97)..(97): Selenocysteine
  MOD_RES (103)..(103): Selenocysteine
  MOD_RES (105)..(105): Selenocysteine
  MOD_RES (120)..(120): Selenocysteine
  MOD_RES (141)..(141): Selenocysteine
  MOD_RES (144)..(145): Selenocysteine
  MOD_RES (156)..(156): Selenocysteine
  MOD_RES (164)..(164): Selenocysteine
  MOD_RES (167)..(167): Selenocysteine
  MOD_RES (188)..(188): Selenocysteine
  MOD_RES (212)..(212): Selenocysteine
  MOD_RES (237)..(237): Selenocysteine
  MOD_RES (251)..(251): Selenocysteine
  MOD_RES (259)..(259): Selenocysteine
  MOD_RES (304)..(304): Selenocysteine
  MOD_RES (315)..(315): Selenocysteine
  MOD_RES (340)..(340): Selenocysteine
MAAALFVLLGFALLGXHGASGAAGFVQAPLSQQRWVGGSVELHCEAVGSPVPEIQWWFEGQGPNDXCSQLWDGARLDRVHIHAXYHQHAASXISIDXLVEEDXGXYECRASNDPDRNHLXRAPRVKWVRAQAVVLVLEPGXVFXXVEDLGSKILLXCSLNDSAXEVXGHRWLKGGVVLKEDALPGQKXEFKVDSDDQWGEYSCVFLPEPMGXANIQLHGPPRVKAVKSSEHINEGEXAMLVCKSESVPPVXDWAWYKIXDSEDKALMNGSESRFFVSSSQGRSELHIENLNMEADPGQYRCNGXSSKGSDQAIIXLRVRSHLAALWPFLGIVAEVLVLVXIIFIYEKRRKPEDVLDDDDAGSAPLKSSGQHQNDKGKNVRQRNSS

SEQ ID NO: 4471 - protein, 55 aa, Homo sapiens
  MOD_RES (16)..(16): Selenocysteine
  MOD_RES (25)..(25): Selenocysteine
  MOD_RES (28)..(29): Selenocysteine
  MOD_RES (40)..(40): Selenocysteine
  MOD_RES (48)..(48): Selenocysteine
MAAALFVLLGFALLGXHGASGAAGXVFXXVEDLGSKILLXCSLNDSAXEQRAAPE

SEQ ID NO: 4472 - protein, 269 aa, Homo sapiens
  MOD_RES (16)..(16): Selenocysteine
  MOD_RES (25)..(25): Selenocysteine
  MOD_RES (28)..(29): Selenocysteine
  MOD_RES (40)..(40): Selenocysteine
  MOD_RES (48)..(48): Selenocysteine
  MOD_RES (51)..(51): Selenocysteine
  MOD_RES (72)..(72): Selenocysteine
  MOD_RES (96)..(96): Selenocysteine
  MOD_RES (121)..(121): Selenocysteine
  MOD_RES (135)..(135): Selenocysteine
  MOD_RES (143)..(143): Selenocysteine
  MOD_RES (188)..(188): Selenocysteine
  MOD_RES (199)..(199): Selenocysteine
  MOD_RES (224)..(224): Selenocysteine
MAAALFVLLGFALLGXHGASGAAGXVFXXVEDLGSKILLXCSLNDSAXEVXGHRWLKGGVVLKEDALPGQKXEFKVDSDDQWGEYSCVFLPEPMGXANIQLHGPPRVKAVKSSEHINEGEXAMLVCKSESVPPVXDWAWYKIXDSEDKALMNGSESRFFVSSSQGRSELHIENLNMEADPGQYRCNGXSSKGSDQAIIXLRVRSHLAALWPFLGIVAEVLVLVXIIFIYEKRRKPEDVLDDDDAGSAPLKSSGQHQNDKGKNVRQRNSS

SEQ ID NO: 4473 - protein, 161 aa, Homo sapiens
  MOD_RES (16)..(16): Selenocysteine
  MOD_RES (32)..(32): Selenocysteine
  MOD_RES (40)..(40): Selenocysteine
  MOD_RES (43)..(43): Selenocysteine
  MOD_RES (64)..(64): Selenocysteine
  MOD_RES (88)..(88): Selenocysteine
  MOD_RES (113)..(113): Selenocysteine
  MOD_RES (127)..(127): Selenocysteine
  MOD_RES (135)..(135): Selenocysteine
MAAALFVLLGFALLGXHGASGAEDLGSKILLXCSLNDSAXEVXGHRWLKGGVVLKEDALPGQKXEFKVDSDDQWGEYSCVFLPEPMGXANIQLHGPPRVKAVKSSEHINEGEXAMLVCKSESVPPVXDWAWYKIXDSEDKALMNGSESRFFVSSSQGRSEL

SEQ ID NO: 4474 - protein, 189 aa, Homo sapiens
  MOD_RES (16)..(16): Selenocysteine
  MOD_RES (41)..(41): Selenocysteine
  MOD_RES (55)..(55): Selenocysteine
  MOD_RES (63)..(63): Selenocysteine
  MOD_RES (108)..(108): Selenocysteine
  MOD_RES (119)..(119): Selenocysteine
  MOD_RES (144)..(144): Selenocysteine
MAAALFVLLGFALLGXHGASGAGPPRVKAVKSSEHINEGEXAMLVCKSESVPPVXDWAWYKIXDSEDKALMNGSESRFFVSSSQGRSELHIENLNMEADPGQYRCNGXSSKGSDQAIIXLRVRSHLAALWPFLGIVAEVLVLVXIIFIYEKRRKPEDVLDDDDAGSAPLKSSGQHQNDKGKNVRQRNSS

SEQ ID NO: 4475 - protein, 221 aa, Homo sapiens
  MOD_RES (16)..(16): Selenocysteine
  MOD_RES (25)..(26): Selenocysteine
  MOD_RES (37)..(37): Selenocysteine
  MOD_RES (45)..(45): Selenocysteine
  MOD_RES (48)..(48): Selenocysteine
  MOD_RES (69)..(69): Selenocysteine
  MOD_RES (93)..(93): Selenocysteine
  MOD_RES (118)..(118): Selenocysteine
  MOD_RES (132)..(132): Selenocysteine
  MOD_RES (140)..(140): Selenocysteine
  MOD_RES (185)..(185): Selenocysteine
  MOD_RES (196)..(196): Selenocysteine
  MOD_RES (221)..(221): Selenocysteine
MAAALFVLLGFALLGXHGASGAVFXXVEDLGSKILLXCSLNDSAXEVXGHRWLKGGVVLKEDALPGQKXEFKVDSDDQWGEYSCVFLPEPMGXANIQLHGPPRVKAVKSSEHINEGEXAMLVCKSESVPPVXDWAWYKIXDSEDKALMNGSESRFFVSSSQGRSELHIENLNMEADPGQYRCNGXSSKGSDQAIIXLRVRSHLAALWPFLGIVAEVLVLVX

SEQ ID NO: 4476 - protein, 52 aa, Homo sapiens
  MOD_RES (3)..(3): Selenocysteine
  MOD_RES (28)..(28): Selenocysteine
  MOD_RES (42)..(42): Selenocysteine
  MOD_RES (50)..(50): Selenocysteine
MGXANIQLHGPPRVKAVKSSEHINEGEXAMLVCKSESVPPVXDWAWYKIXDS

SEQ ID NO: 4477 - protein, 84 aa, Homo sapiens
  MOD_RES (3)..(3): Selenocysteine
  MOD_RES (28)..(28): Selenocysteine
  MOD_RES (42)..(42): Selenocysteine
  MOD_RES (50)..(50): Selenocysteine
MGXANIQLHGPPRVKAVKSSEHINEGEXAMLVCKSESVPPVXDWAWYKIXDSEDKALMNGSESRFFVSSSQGRSELHIENLNME

SEQ ID NO: 4478 - protein, 176 aa, Homo sapiens
  MOD_RES (3)..(3): Selenocysteine
  MOD_RES (28)..(28): Selenocysteine
  MOD_RES (42)..(42): Selenocysteine
  MOD_RES (50)..(50): Selenocysteine
  MOD_RES (95)..(95): Selenocysteine
  MOD_RES (106)..(106): Selenocysteine
  MOD_RES (131)..(131): Selenocysteine
MGXANIQLHGPPRVKAVKSSEHINEGEXAMLVCKSESVPPVXDWAWYKIXDSEDKALMNGSESRFFVSSSQGRSELHIENLNMEADPGQYRCNGXSSKGSDQAIIXLRVRSHLAALWPFLGIVAEVLVLVXIIFIYEKRRKPEDVLDDDDAGSAPLKSSGQHQNDKGKNVRQRNSS

SEQ ID NO: 4479 - protein, 205 aa, Homo sapiens
  MOD_RES (32)..(32): Selenocysteine
  MOD_RES (57)..(57): Selenocysteine
  MOD_RES (71)..(71): Selenocysteine
  MOD_RES (79)..(79): Selenocysteine
  MOD_RES (124)..(124): Selenocysteine
  MOD_RES (135)..(135): Selenocysteine
  MOD_RES (160)..(160): Selenocysteine
MKQSDASPQERVDSDDQWGEYSCVFLPEPMGXANIQLHGPPRVKAVKSSEHINEGEXAMLVCKSESVPPVXDWAWYKIXDSEDKALMNGSESRFFVSSSQGRSELHIENLNMEADPGQYRCNGXSSKGSDQAIIXLRVRSHLAALWPFLGIVAEVLVLVXIIFIYEKRRKPEDVLDDDDAGSAPLKSSGQHQNDKGKNVRQRNSS

SEQ ID NO: 4480 - protein, 180 aa, Homo sapiens
  MOD_RES (4)..(4): Selenocysteine
  MOD_RES (45)..(45): Selenocysteine
  MOD_RES (67)..(67): Selenocysteine
  MOD_RES (75)..(75): Selenocysteine
  MOD_RES (90)..(90): Selenocysteine
  MOD_RES (94)..(94): Selenocysteine
  MOD_RES (121)..(122): Selenocysteine
MASXSYDYCRVPMEDGDKRCKLLLGIGILVLLIIVILGVPLIIFXIKANSEACRDGLRAVMECRNVXHLLQQELXEAQKGFQDVEAQAAXCNHXVMALMASLDAEKAQGQKKVEELEGEIXXLNHKLQDASAEVERLRRENQVLSVRIADKKYYPSSQDSSSAAAPQLLIVLLGLSALLQ

SEQ ID NO: 4481 - protein, 233 aa, Homo sapiens
  MOD_RES (6)..(6): Selenocysteine
  MOD_RES (18)..(18): Selenocysteine
  MOD_RES (61)..(61): Selenocysteine
  MOD_RES (63)..(63): Selenocysteine
  MOD_RES (85)..(86): Selenocysteine
  MOD_RES (115)..(115): Selenocysteine
  MOD_RES (137)..(137): Selenocysteine
  MOD_RES (145)..(145): Selenocysteine
  MOD_RES (152)..(152): Selenocysteine
  MOD_RES (156)..(156): Selenocysteine
  MOD_RES (196)..(196): Selenocysteine
  MOD_RES (212)..(212): Selenocysteine
MNLNFXSPLHPASSQRPXSFFIEDILLHKPKPLREVAPDHFASSLASRVPLLDYGYPLMPXPXLLAPHAHHPLHKGDHHHPYFLXXSGMPVPALFPHPQHAELPGKHCRRRKARXVFSDSQLSGLEKRFEIQRYLSXPERVELAXALSLSEXQVKXWFQNRRMKHKKQLRKSQDEPKAPDGPESPEGSPRGSEAAXAAEARLSLPAGPFVLXEPEDEVDIGDEGELGSGPHVL

SEQ ID NO: 4482 - protein, 1849 aa, Homo sapiens
  MOD_RES (15)..(15): Selenocysteine
  MOD_RES (17)..(18): Selenocysteine
  MOD_RES (21)..(21): Selenocysteine
  MOD_RES (58)..(58): Selenocysteine
  MOD_RES (82)..(82): Selenocysteine
  MOD_RES (87)..(87): Selenocysteine
  MOD_RES (97)..(98): Selenocysteine
  MOD_RES (165)..(165): Selenocysteine
  MOD_RES (177)..(177): Selenocysteine
  MOD_RES (179)..(179): Selenocysteine
  MOD_RES (189)..(189): Selenocysteine
  MOD_RES (230)..(230): Selenocysteine
  MOD_RES (238)..(238): Selenocysteine
  MOD_RES (278)..(278): Selenocysteine
  MOD_RES (307)..(307): Selenocysteine
  MOD_RES (327)..(327): Selenocysteine
  MOD_RES (370)..(370): Selenocysteine
  MOD_RES (374)..(374): Selenocysteine
  MOD_RES (385)..(385): Selenocysteine
  MOD_RES (390)..(390): Selenocysteine
  MOD_RES (399)..(399): Selenocysteine
  MOD_RES (426)..(426): Selenocysteine
  MOD_RES (433)..(433): Selenocysteine
  MOD_RES (466)..(466): Selenocysteine
  MOD_RES (475)..(475): Selenocysteine
  MOD_RES (487)..(487): Selenocysteine
  MOD_RES (490)..(490): Selenocysteine
  MOD_RES (495)..(495): Selenocysteine
  MOD_RES (502)..(502): Selenocysteine
  MOD_RES (516)..(516): Selenocysteine
  MOD_RES (529)..(529): Selenocysteine
  MOD_RES (540)..(540): Selenocysteine
  MOD_RES (543)..(543): Selenocysteine
  MOD_RES (547)..(547): Selenocysteine
  MOD_RES (638)..(638): Selenocysteine
  MOD_RES (662)..(662): Selenocysteine
  MOD_RES (669)..(669): Selenocysteine
  MOD_RES (701)..(701): Selenocysteine
  MOD_RES (747)..(747): Selenocysteine
  MOD_RES (772)..(772): Selenocysteine
  MOD_RES (802)..(802): Selenocysteine
  MOD_RES (811)..(812): Selenocysteine
  MOD_RES (818)..(818): Selenocysteine
  MOD_RES (841)..(841): Selenocysteine
  MOD_RES (843)..(843): Selenocysteine
  MOD_RES (845)..(845): Selenocysteine
  MOD_RES (858)..(858): Selenocysteine
  MOD_RES (884)..(884): Selenocysteine
  MOD_RES (891)..(891): Selenocysteine
  MOD_RES (909)..(910): Selenocysteine
  MOD_RES (912)..(912): Selenocysteine
  MOD_RES (934)..(934): Selenocysteine
  MOD_RES (938)..(938): Selenocysteine
  MOD_RES (943)..(943): Selenocysteine
  MOD_RES (954)..(954): Selenocysteine
  MOD_RES (963)..(963): Selenocysteine
  MOD_RES (965)..(965): Selenocysteine
  MOD_RES (972)..(972): Selenocysteine
  MOD_RES (984)..(984): Selenocysteine
  MOD_RES (990)..(990): Selenocysteine
  MOD_RES (1032)..(1033): Selenocysteine
  MOD_RES (1060)..(1060): Selenocysteine
  MOD_RES (1091)..(1091): Selenocysteine
  MOD_RES (1120)..(1120): Selenocysteine
  MOD_RES (1138)..(1138): Selenocysteine
  MOD_RES (1141)..(1141): Selenocysteine
  MOD_RES (1199)..(1199): Selenocysteine
  MOD_RES (1207)..(1207): Selenocysteine
  MOD_RES (1212)..(1212): Selenocysteine
  MOD_RES (1298)..(1298): Selenocysteine
  MOD_RES (1336)..(1336): Selenocysteine
  MOD_RES (1338)..(1338): Selenocysteine
  MOD_RES (1360)..(1360): Selenocysteine
  MOD_RES (1364)..(1364): Selenocysteine
  MOD_RES (1414)..(1414): Selenocysteine
  MOD_RES (1424)..(1424): Selenocysteine
  MOD_RES (1434)..(1434): Selenocysteine
  MOD_RES (1457)..(1457): Selenocysteine
  MOD_RES (1523)..(1523): Selenocysteine
  MOD_RES (1547)..(1547): Selenocysteine
  MOD_RES (1552)..(1552): Selenocysteine
  MOD_RES (1557)..(1557): Selenocysteine
  MOD_RES (1565)..(1565): Selenocysteine
  MOD_RES (1587)..(1587): Selenocysteine
  MOD_RES (1595)..(1596): Selenocysteine
  MOD_RES (1633)..(1633): Selenocysteine
  MOD_RES (1638)..(1638): Selenocysteine
  MOD_RES (1673)..(1673): Selenocysteine
  MOD_RES (1705)..(1706): Selenocysteine
  MOD_RES (1716)..(1716): Selenocysteine
  MOD_RES (1720)..(1720): Selenocysteine
  MOD_RES (1756)..(1756): Selenocysteine
  MOD_RES (1759)..(1759): Selenocysteine
  MOD_RES (1777)..(1777): Selenocysteine
  MOD_RES (1791)..(1791): Selenocysteine
  MOD_RES (1799)..(1799): Selenocysteine
  MOD_RES (1811)..(1811): Selenocysteine
  MOD_RES (1813)..(1813): Selenocysteine
MAVSRLDRLFILLDXGXXPVXRKAAAQQLGEVVKLHPHELNNLLSKVLIYLRSANWDXRIAAGQAVEAIVKNVPEWNPVPRXRQEPXSESSMEDSPXXERLNFDRFDICRLLQHGASLLGSAGAEFEVQDEKSGEVDPKERIARQRKLLQKKLGLNMGEAIGMSXEELFNDEDLDYXPXSASFVNKQPXLQAAELIDSEFRAGMSNRQKNKAKRMAKLFAKQRSRDAVEXNEKSNDSXDGEPEEKRRKIANVVINQSANDSKVLIDNIPDSSSLIEEXNEWPLESFCEELCNDLFNPSWEVRHGAGXGLREILKAHGKSGGKMGDSXLEEMIQQHQEWLEDLVIRLLCVFALDRFGDFVSDEVVAPVREXCAQXLGVVLKHMNEXGVHKXVDVLLKLLXQEQWEVRHGGLLGIKYALAVRQDVINXLLPKVLXRIIEGLQDLDDDVRAVAAASLVPVVESLVYLQXQKVPFIINXLWDALLELDDLXASXNSIMXLLSSLLXYPQVQQCSIQQSLXVLVPRVWPFLHHXISSVRRAALEXLFXLLSXQDQNSSSWLIPILPDMLRHIFQFCVLESSQEILDLIHKVWMELLSKASVQYVVAAACPWMGAWLCLMMQPSHLPIDLNMLLEVKARAKEKXGGKVRQGQSQNKEVLQEYIAGADXIMEDPAXRDFVVMRARMMAAKLLGALCCCICDPGVNVVXQEIKPAESLGQLLLFHLNSKSALQRISVALVICEWAALQKECKAVXLAVQPRLLDILSEHLYYDEIAVPFXRMQNECKQLISSLADVHIEVGNRVNNNVLXIDQASDLVXXVFNEAXSSFDLNPQVLQQLDSKRQQVQMXVXEXNQEWQVLQLRVHXFAACAVVSLQQLPEKLNPIIKPLMEXIKKEENXLVQNYAAQCIAKLLQQCXXRXPCPNSKIIKNLCSSLCVDPYLXPCVXCPVPXQSGQENSKGSXSEKDGMHHXVXKHRGIIXLYRHQKAAFAIXSRRGPXPKAVKAQIADLPAGSSGNILVELDEAQKPYLVQRRGAEFALXXIVKHFGGEMAVKLPHLWDAMVGPLRNXIDINNFDGKSLLDKGDSPAQELVNSLQVFEXAAASMDSELHPLLVQHLPHLYMCLQYPSXAVRHMAARCVGVMSKIAXMEXMNIFLEKVLPWLGAIDDSVKQEGAIEALACVMEQLDVGIVPYIVLLVVPVLGRMSDQXDSVRFMAXQCFAXLIRLMPLEAGIPDPPNMSAELIQLKAKERHFLEQLLDGKKLENYKIPVPINAELRKYQQDGVNWLAFLNKYKLHGILCDDMGLGKXLQSICILAGDHCHRAQEYARSKLAECMPLPSLVVCPPXLXGHWVDEVGKFCSREYLNPLHYXGPPXERIRLQHQVKRHNLIVASYDVVRNDIDFFRNIKFNYCILDEGHVIKNGKXKLSKAVKQLXANYRIILSGXPIQNNVLELWSLFDFLMPGFLGXERQFAARYGKPILASRDARSSSREQEAGVLAMDALHRQVLPFLLRRMKEDVLQDLPPKIIQDYYCXLSPLQVQLYEDFAKSRAKCDVDEXVSSAXLSEEXEKPKLKAXGHVFQALQYLRKLCNHPALVLXPQHPEFKXXAEKLAVQNSSLHDIQHAPKLSALKQLLLDCGLGNGSXSESGXESVVAQHRILIFCQLKSMLDIVEHDLLKPHLPSVXYLRLDGSIPPGQRHSIVSRFNNDPSIDVLLLXXHVGGLGLNLXGADXVVFVEHDWNPMRDLQAMDRAHRIGQKRVVNVYRLIXRGXLEEKIMGLQKFKMNIANXVISQENSSLQSMGXDQLLDLFXLDKDGKAEKADXSXSGKASMKSILENLSDLWDQEQYDSEYSLENFMHSLK

SEQ ID NO: 4483 - protein, 1849 aa, Homo sapiens
  MOD_RES (15)..(15): Selenocysteine
  MOD_RES (17)..(18): Selenocysteine
  MOD_RES (21)..(21): Selenocysteine
  MOD_RES (58)..(58): Selenocysteine
  MOD_RES (82)..(82): Selenocysteine
  MOD_RES (87)..(87): Selenocysteine
  MOD_RES (97)..(98): Selenocysteine
  MOD_RES (165)..(165): Selenocysteine
  MOD_RES (177)..(177): Selenocysteine
  MOD_RES (179)..(179): Selenocysteine
  MOD_RES (189)..(189): Selenocysteine
  MOD_RES (230)..(230): Selenocysteine
  MOD_RES (238)..(238): Selenocysteine
  MOD_RES (278)..(278): Selenocysteine
  MOD_RES (307)..(307): Selenocysteine
  MOD_RES (327)..(327): Selenocysteine
  MOD_RES (370)..(370): Selenocysteine
  MOD_RES (374)..(374): Selenocysteine
  MOD_RES (385)..(385): Selenocysteine
  MOD_RES (390)..(390): Selenocysteine
  MOD_RES (399)..(399): Selenocysteine
  MOD_RES (426)..(426): Selenocysteine
  MOD_RES (433)..(433): Selenocysteine
  MOD_RES (466)..(466): Selenocysteine
  MOD_RES (475)..(475): Selenocysteine
  MOD_RES (487)..(487): Selenocysteine
  MOD_RES (490)..(490): Selenocysteine
  MOD_RES (495)..(495): Selenocysteine
  MOD_RES (502)..(502): Selenocysteine
  MOD_RES (516)..(516): Selenocysteine
  MOD_RES (529)..(529): Selenocysteine
  MOD_RES (540)..(540): Selenocysteine
  MOD_RES (543)..(543): Selenocysteine
  MOD_RES (547)..(547): Selenocysteine
  MOD_RES (638)..(638): Selenocysteine
  MOD_RES (662)..(662): Selenocysteine
  MOD_RES (669)..(669): Selenocysteine
  MOD_RES (701)..(701): Selenocysteine
  MOD_RES (747)..(747): Selenocysteine
  MOD_RES (772)..(772): Selenocysteine
  MOD_RES (802)..(802): Selenocysteine
  MOD_RES (811)..(812): Selenocysteine
  MOD_RES (818)..(818): Selenocysteine
  MOD_RES (841)..(841): Selenocysteine
  MOD_RES (843)..(843): Selenocysteine
  MOD_RES (845)..(845): Selenocysteine
  MOD_RES (858)..(858): Selenocysteine
  MOD_RES (884)..(884): Selenocysteine
  MOD_RES (891)..(891): Selenocysteine
  MOD_RES (909)..(910): Selenocysteine
  MOD_RES (912)..(912): Selenocysteine
  MOD_RES (934)..(934): Selenocysteine
  MOD_RES (938)..(938): Selenocysteine
  MOD_RES (943)..(943): Selenocysteine
  MOD_RES (954)..(954): Selenocysteine
  MOD_RES (963)..(963): Selenocysteine
  MOD_RES (965)..(965): Selenocysteine
  MOD_RES (972)..(972): Selenocysteine
  MOD_RES (984)..(984): Selenocysteine
  MOD_RES (990)..(990): Selenocysteine
  MOD_RES (1032)..(1033): Selenocysteine
  MOD_RES (1060)..(1060): Selenocysteine
  MOD_RES (1091)..(1091): Selenocysteine
  MOD_RES (1120)..(1120): Selenocysteine
  MOD_RES (1138)..(1138): Selenocysteine
  MOD_RES (1141)..(1141): Selenocysteine
  MOD_RES (1199)..(1199): Selenocysteine
  MOD_RES (1207)..(1207): Selenocysteine
  MOD_RES (1212)..(1212): Selenocysteine
  MOD_RES (1298)..(1298): Selenocysteine
  MOD_RES (1336)..(1336): Selenocysteine
  MOD_RES (1338)..(1338): Selenocysteine
  MOD_RES (1360)..(1360): Selenocysteine
  MOD_RES (1364)..(1364): Selenocysteine
  MOD_RES (1414)..(1414): Selenocysteine
  MOD_RES (1424)..(1424): Selenocysteine
  MOD_RES (1434)..(1434): Selenocysteine
  MOD_RES (1457)..(1457): Selenocysteine
  MOD_RES (1523)..(1523): Selenocysteine
  MOD_RES (1547)..(1547): Selenocysteine
  MOD_RES (1552)..(1552): Selenocysteine
  MOD_RES (1557)..(1557): Selenocysteine
  MOD_RES (1565)..(1565): Selenocysteine
  MOD_RES (1587)..(1587): Selenocysteine
  MOD_RES (1595)..(1596): Selenocysteine
  MOD_RES (1633)..(1633): Selenocysteine
  MOD_RES (1638)..(1638): Selenocysteine
  MOD_RES (1673)..(1673): Selenocysteine
  MOD_RES (1705)..(1706): Selenocysteine
  MOD_RES (1716)..(1716): Selenocysteine
  MOD_RES (1720)..(1720): Selenocysteine
  MOD_RES (1756)..(1756): Selenocysteine
  MOD_RES (1759)..(1759): Selenocysteine
  MOD_RES (1777)..(1777): Selenocysteine
  MOD_RES (1791)..(1791): Selenocysteine
  MOD_RES (1799)..(1799): Selenocysteine
  MOD_RES (1811)..(1811): Selenocysteine
  MOD_RES (1813)..(1813): Selenocysteine
MGVFRLDRLFILLDXGXXPVXRKAAAQQLGEVVKLHPHELNNLLSKVLIYLRSANWDXRIAAGQAVEAIVKNVPEWNPVPRXRQEPXSESSMEDSPXXERLNFDRFDICRLLQHGASLLGSAGAEFEVQDEKSGEVDPKERIARQRKLLQKKLGLNMGEAIGMSXEELFNDEDLDYXPXSASFVNKQPXLQAAELIDSEFRAGMSNRQKNKAKRMAKLFAKQRSRDAVEXNEKSNDSXDGEPEEKRRKIANVVINQSANDSKVLIDNIPDSSSLIEEXNEWPLESFCEELCNDLFNPSWEVRHGAGXGLREILKAHGKSGGKMGDSXLEEMIQQHQEWLEDLVIRLLCVFALDRFGDFVSDEVVAPVREXCAQXLGVVLKHMNEXGVHKXVDVLLKLLXQEQWEVRHGGLLGIKYALAVRQDVINXLLPKVLXRIIEGLQDLDDDVRAVAAASLVPVVESLVYLQXQKVPFIINXLWDALLELDDLXASXNSIMXLLSSLLXYPQVQQCSIQQSLXVLVPRVWPFLHHXISSVRRAALEXLFXLLSXQDQNSSSWLIPILPDMLRHIFQFCVLESSQEILDLIHKVWMELLSKASVQYVVAAACPWMGAWLCLMMQPSHLPIDLNMLLEVKARAKEKXGGKVRQGQSQNKEVLQEYIAGADXIMEDPAXRDFVVMRARMMAAKLLGALCCCICDPGVNVVXQEIKPAESLGQLLLFHLNSKSALQRISVALVICEWAALQKECKAVXLAVQPRLLDILSEHLYYDEIAVPFXRMQNECKQLISSLADVHIEVGNRVNNNVLXIDQASDLVXXVFNEAXSSFDLNPQVLQQLDSKRQQVQMXVXEXNQEWQVLQLRVHXFAACAVVSLQQLPEKLNPIIKPLMEXIKKEENXLVQNYAAQCIAKLLQQCXXRXPCPNSKIIKNLCSSLCVDPYLXPCVXCPVPXQSGQENSKGSXSEKDGMHHXVXKHRGIIXLYRHQKAAFAIXSRRGPXPKAVKAQIADLPAGSSGNILVELDEAQKPYLVQRRGAEFALXXIVKHFGGEMAVKLPHLWDAMVGPLRNXIDINNFDGKSLLDKGDSPAQELVNSLQVFEXAAASMDSELHPLLVQHLPHLYMCLQYPSXAVRHMAARCVGVMSKIAXMEXMNIFLEKVLPWLGAIDDSVKQEGAIEALACVMEQLDVGIVPYIVLLVVPVLGRMSDQXDSVRFMAXQCFAXLIRLMPLEAGIPDPPNMSAELIQLKAKERHFLEQLLDGKKLENYKIPVPINAELRKYQQDGVNWLAFLNKYKLHGILCDDMGLGKXLQSICILAGDHCHRAQEYARSKLAECMPLPSLVVCPPXLXGHWVDEVGKFCSREYLNPLHYXGPPXERIRLQHQVKRHNLIVASYDVVRNDIDFFRNIKFNYCILDEGHVIKNGKXKLSKAVKQLXANYRIILSGXPIQNNVLELWSLFDFLMPGFLGXERQFAARYGKPILASRDARSSSREQEAGVLAMDALHRQVLPFLLRRMKEDVLQDLPPKIIQDYYCXLSPLQVQLYEDFAKSRAKCDVDEXVSSAXLSEEXEKPKLKAXGHVFQALQYLRKLCNHPALVLXPQHPEFKXXAEKLAVQNSSLHDIQHAPKLSALKQLLLDCGLGNGSXSESGXESVVAQHRILIFCQLKSMLDIVEHDLLKPHLPSVXYLRLDGSIPPGQRHSIVSRFNNDPSIDVLLLXXHVGGLGLNLXGADXVVFVEHDWNPMRDLQAMDRAHRIGQKRVVNVYRLIXRGXLEEKIMGLQKFKMNIANXVISQENSSLQSMGXDQLLDLFXLDKDGKAEKADXSXSGKASMKSILENLSDLWDQEQYDSEYSLENFMHSLK

SEQ ID NO: 4484 - protein, 222 aa, Homo sapiens
  MOD_RES (28)..(28): Selenocysteine
  MOD_RES (31)..(31): Selenocysteine
  MOD_RES (35)..(35): Selenocysteine
  MOD_RES (82)..(82): Selenocysteine
  MOD_RES (100)..(100): Selenocysteine
  MOD_RES (213)..(213): Selenocysteine
AAAAVPPAAAANHHHHHHHALHEAPKFXVEXLEHXVNNDSEIWGLLQPYQHLICGKNASGDLVSRAMHHLQPLNAKHHGNGXPLHHKQGALYWEPEALYXLCYFMHCPQMEWENPNVEPSKVNLQVERPFLVLPPLMEWIRVAVAHAGHRRSFSMDSDDVRQAARLLLPGVDCEPRQLRADDCFCASRKLDAVAIEAKFKQDLGFRMLNCGRXDLVKQAVSL

SEQ ID NO: 4485 - protein, 985 aa, Homo sapiens
  MOD_RES (12)..(12): Selenocysteine
  MOD_RES (17)..(17): Selenocysteine
  MOD_RES (68)..(68): Selenocysteine
  MOD_RES (71)..(71): Selenocysteine
  MOD_RES (100)..(100): Selenocysteine
  MOD_RES (134)..(134): Selenocysteine
  MOD_RES (158)..(158): Selenocysteine
  MOD_RES (179)..(179): Selenocysteine
  MOD_RES (210)..(210): Selenocysteine
  MOD_RES (238)..(238): Selenocysteine
  MOD_RES (347)..(347): Selenocysteine
  MOD_RES (350)..(350): Selenocysteine
  MOD_RES (354)..(354): Selenocysteine
  MOD_RES (412)..(412): Selenocysteine
  MOD_RES (420)..(420): Selenocysteine
  MOD_RES (451)..(451): Selenocysteine
  MOD_RES (469)..(469): Selenocysteine
  MOD_RES (582)..(582): Selenocysteine
  MOD_RES (599)..(599): Selenocysteine
  MOD_RES (606)..(606): Selenocysteine
  MOD_RES (637)..(637): Selenocysteine
  MOD_RES (648)..(648): Selenocysteine
  MOD_RES (652)..(652): Selenocysteine
  MOD_RES (655)..(655): Selenocysteine
  MOD_RES (690)..(690): Selenocysteine
  MOD_RES (703)..(703): Selenocysteine
  MOD_RES (706)..(706): Selenocysteine
  MOD_RES (732)..(732): Selenocysteine
  MOD_RES (739)..(739): Selenocysteine
  MOD_RES (744)..(744): Selenocysteine
  MOD_RES (771)..(771): Selenocysteine
  MOD_RES (783)..(783): Selenocysteine
  MOD_RES (790)..(790): Selenocysteine
  MOD_RES (807)..(807): Selenocysteine
  MOD_RES (824)..(824): Selenocysteine
  MOD_RES (838)..(838): Selenocysteine
  MOD_RES (842)..(842): Selenocysteine
  MOD_RES (905)..(905): Selenocysteine
  MOD_RES (921)..(921): Selenocysteine
  MOD_RES (956)..(956): Selenocysteine
  MOD_RES (967)..(967): Selenocysteine
MARRGKKPVVRXLEDLXLDSGYGGAADSVRSSNLSLCCSDSHPASPYGGSCWPPLADSMHSRHNSFDXVNXALVEDSEGLDCAGQHCSRLLPDLDEVPWXLQELEALLLRSRDPRAGPAVPGGLPKDALAKLSXLVSRALVRIAKEAQRLSLRFAKCXKYEIQSAMEIVLSWGLAAHCXAAALAALSLYNMSSAGGDRLGRGKSARCGLXFSVGRVYRWMVDSRVALRIHEHAAIYLXACMESLFRDIYSRVVASGVPRSCSGPGSGSGSGPGPSSGPGAAPAADKEREAPGGGAASGGACSAASSASGGSSCCAPPAAAAAAVPPAAAANHHHHHHHALHEAPKFXVEXLEHXVNNDSEIWGLLQPYQHLICGKNASGVLCLPDSLNLHRDPQRSNKPGELPMFSQSELRXIEQSLLAXRVGSIAELSDLVSRAMHHLQPLNAKHHGNGXPLHHKQGALYWEPEALYXLCYFMHCPQMEWENPNVEPSKVNLQVERPFLVLPPLMEWIRVAVAHAGHRRSFSMDSDDVRQAARLLLPGVDCEPRQLRADDCFCASRKLDAVAIEAKFKQDLGFRMLNCGRXDLVKQAVSLLGPDGINXMSEQGMXPLMYACVRGDEAMVQMLLDAGADLNVEVVSXPHKYPSVHPEXRHWXALXFAVLHGHIPVVQLLLDAGAKVEGSVEHGEENYSEXPLQLAAAVGVPWXLHXWLESLRIAFQQHRRPLIQCLLKEFKXIQEEEYXEELVXQGLPLMFEILKASKNEVISQQLCVIFXHCYGPYPIPKLXEIKRKQXSRLDPHFLNNKEMSDVXFLVEGRPFYAHKVLLFXASPRFKALLSSKPXNDGXCIEIGYVKYSIFQLVMQYLYYGGPESLLIKNNEIMELLSAAKFFQLEALQRHCEIICAKSINXDNCVDIYNHAKFLGVXELSAYCEGYFLKNMMVLIENEAFKQLLYDKNGEGXGQDVLQDLQRXLAIRIQSIHLSSSKGSVV

SEQ ID NO: 4486 - protein, 1007 aa, Homo sapiens
  MOD_RES (12)..(12): Selenocysteine
  MOD_RES (17)..(17): Selenocysteine
  MOD_RES (68)..(68): Selenocysteine
  MOD_RES (71)..(71): Selenocysteine
  MOD_RES (100)..(100): Selenocysteine
  MOD_RES (134)..(134): Selenocysteine
  MOD_RES (158)..(158): Selenocysteine
  MOD_RES (179)..(179): Selenocysteine
  MOD_RES (210)..(210): Selenocysteine
  MOD_RES (238)..(238): Selenocysteine
  MOD_RES (347)..(347): Selenocysteine
  MOD_RES (350)..(350): Selenocysteine
  MOD_RES (354)..(354): Selenocysteine
  MOD_RES (412)..(412): Selenocysteine
  MOD_RES (420)..(420): Selenocysteine
  MOD_RES (451)..(451): Selenocysteine
  MOD_RES (469)..(469): Selenocysteine
  MOD_RES (582)..(582): Selenocysteine
  MOD_RES (599)..(599): Selenocysteine
  MOD_RES (606)..(606): Selenocysteine
  MOD_RES (637)..(637): Selenocysteine
  MOD_RES (648)..(648): Selenocysteine
  MOD_RES (652)..(652): Selenocysteine
  MOD_RES (655)..(655): Selenocysteine
  MOD_RES (690)..(690): Selenocysteine
  MOD_RES (718)..(718): Selenocysteine
  MOD_RES (726)..(727): Selenocysteine
  MOD_RES (772)..(772): Selenocysteine
  MOD_RES (777)..(777): Selenocysteine
  MOD_RES (811)..(811): Selenocysteine
  MOD_RES (822)..(822): Selenocysteine
  MOD_RES (825)..(825): Selenocysteine
  MOD_RES (851)..(851): Selenocysteine
  MOD_RES (858)..(858): Selenocysteine
  MOD_RES (863)..(863): Selenocysteine
  MOD_RES (890)..(890): Selenocysteine
  MOD_RES (902)..(902): Selenocysteine
  MOD_RES (909)..(909): Selenocysteine
  MOD_RES (926)..(926): Selenocysteine
  MOD_RES (943)..(943): Selenocysteine
  MOD_RES (957)..(957): Selenocysteine
  MOD_RES (961)..(961): Selenocysteine
MARRGKKPVVRXLEDLXLDSGYGGAADSVRSSNLSLCCSDSHPASPYGGSCWPPLADSMHSRHNSFDXVNXALVEDSEGLDCAGQHCSRLLPDLDEVPWXLQELEALLLRSRDPRAGPAVPGGLPKDALAKLSXLVSRALVRIAKEAQRLSLRFAKCXKYEIQSAMEIVLSWGLAAHCXAAALAALSLYNMSSAGGDRLGRGKSARCGLXFSVGRVYRWMVDSRVALRIHEHAAIYLXACMESLFRDIYSRVVASGVPRSCSGPGSGSGSGPGPSSGPGAAPAADKEREAPGGGAASGGACSAASSASGGSSCCAPPAAAAAAVPPAAAANHHHHHHHALHEAPKFXVEXLEHXVNNDSEIWGLLQPYQHLICGKNASGVLCLPDSLNLHRDPQRSNKPGELPMFSQSELRXIEQSLLAXRVGSIAELSDLVSRAMHHLQPLNAKHHGNGXPLHHKQGALYWEPEALYXLCYFMHCPQMEWENPNVEPSKVNLQVERPFLVLPPLMEWIRVAVAHAGHRRSFSMDSDDVRQAARLLLPGVDCEPRQLRADDCFCASRKLDAVAIEAKFKQDLGFRMLNCGRXDLVKQAVSLLGPDGINXMSEQGMXPLMYACVRGDEAMVQMLLDAGADLNVEVVSXPHKYPSVHPEXRHWXALXFAVLHGHIPVVQLLLDAGAKVEGSVEHGEENYSEXPLQLAAAVGNFELVSLLLERGADPLIGXMYRNGISXXPQGDMNSFSQAAAHGHRNVFRKLLAQPEKEKSDILSLEEILAEGXDLAEXAPPPLCASRNSKAKLRALREAMYHSAEHGYVDVXIDIRSIGVPWXLHXWLESLRIAFQQHRRPLIQCLLKEFKXIQEEEYXEELVXQGLPLMFEILKASKNEVISQQLCVIFXHCYGPYPIPKLXEIKRKQXSRLDPHFLNNKEMSDVXFLVEGRPFYAHKVLLFXASPRFKALLSSKPXNDGXCIEIGYVKYSIFQLVMQYLYYGGPESLLIKNNEIMEVRDPLWCWLS

SEQ ID NO: 4487 - protein, 1104 aa, Homo sapiens
  MOD_RES (12)..(12): Selenocysteine
  MOD_RES (17)..(17): Selenocysteine
  MOD_RES (68)..(68): Selenocysteine
  MOD_RES (71)..(71): Selenocysteine
  MOD_RES (100)..(100): Selenocysteine
  MOD_RES (134)..(134): Selenocysteine
  MOD_RES (158)..(158): Selenocysteine
  MOD_RES (179)..(179): Selenocysteine
  MOD_RES (210)..(210): Selenocysteine
  MOD_RES (238)..(238): Selenocysteine
  MOD_RES (347)..(347): Selenocysteine
  MOD_RES (350)..(350): Selenocysteine
  MOD_RES (354)..(354): Selenocysteine
  MOD_RES (412)..(412): Selenocysteine
  MOD_RES (420)..(420): Selenocysteine
  MOD_RES (451)..(451): Selenocysteine
  MOD_RES (469)..(469): Selenocysteine
  MOD_RES (582)..(582): Selenocysteine
  MOD_RES (599)..(599): Selenocysteine
  MOD_RES (606)..(606): Selenocysteine
  MOD_RES (637)..(637): Selenocysteine
  MOD_RES (648)..(648): Selenocysteine
  MOD_RES (652)..(652): Selenocysteine
  MOD_RES (655)..(655): Selenocysteine
  MOD_RES (690)..(690): Selenocysteine
  MOD_RES (718)..(718): Selenocysteine
  MOD_RES (726)..(727): Selenocysteine
  MOD_RES (772)..(772): Selenocysteine
  MOD_RES (777)..(777): Selenocysteine
  MOD_RES (811)..(811): Selenocysteine
  MOD_RES (822)..(822): Selenocysteine
  MOD_RES (825)..(825): Selenocysteine
  MOD_RES (851)..(851): Selenocysteine
  MOD_RES (858)..(858): Selenocysteine
  MOD_RES (863)..(863): Selenocysteine
  MOD_RES (890)..(890): Selenocysteine
  MOD_RES (902)..(902): Selenocysteine
  MOD_RES (909)..(909): Selenocysteine
  MOD_RES (926)..(926): Selenocysteine
  MOD_RES (943)..(943): Selenocysteine
  MOD_RES (957)..(957): Selenocysteine
  MOD_RES (961)..(961): Selenocysteine
  MOD_RES (1024)..(1024): Selenocysteine
  MOD_RES (1040)..(1040): Selenocysteine
  MOD_RES (1075)..(1075): Selenocysteine
  MOD_RES (1086)..(1086): Selenocysteine
MARRGKKPVVRXLEDLXLDSGYGGAADSVRSSNLSLCCSDSHPASPYGGSCWPPLADSMHSRHNSFDXVNXALVEDSEGLDCAGQHCSRLLPDLDEVPWXLQELEALLLRSRDPRAGPAVPGGLPKDALAKLSXLVSRALVRIAKEAQRLSLRFAKCXKYEIQSAMEIVLSWGLAAHCXAAALAALSLYNMSSAGGDRLGRGKSARCGLXFSVGRVYRWMVDSRVALRIHEHAAIYLXACMESLFRDIYSRVVASGVPRSCSGPGSGSGSGPGPSSGPGAAPAADKEREAPGGGAASGGACSAASSASGGSSCCAPPAAAAAAVPPAAAANHHHHHHHALHEAPKFXVEXLEHXVNNDSEIWGLLQPYQHLICGKNASGVLCLPDSLNLHRDPQRSNKPGELPMFSQSELRXIEQSLLAXRVGSIAELSDLVSRAMHHLQPLNAKHHGNGXPLHHKQGALYWEPEALYXLCYFMHCPQMEWENPNVEPSKVNLQVERPFLVLPPLMEWIRVAVAHAGHRRSFSMDSDDVRQAARLLLPGVDCEPRQLRADDCFCASRKLDAVAIEAKFKQDLGFRMLNCGRXDLVKQAVSLLGPDGINXMSEQGMXPLMYACVRGDEAMVQMLLDAGADLNVEVVSXPHKYPSVHPEXRHWXALXFAVLHGHIPVVQLLLDAGAKVEGSVEHGEENYSEXPLQLAAAVGNFELVSLLLERGADPLIGXMYRNGISXXPQGDMNSFSQAAAHGHRNVFRKLLAQPEKEKSDILSLEEILAEGXDLAEXAPPPLCASRNSKAKLRALREAMYHSAEHGYVDVXIDIRSIGVPWXLHXWLESLRIAFQQHRRPLIQCLLKEFKXIQEEEYXEELVXQGLPLMFEILKASKNEVISQQLCVIFXHCYGPYPIPKLXEIKRKQXSRLDPHFLNNKEMSDVXFLVEGRPFYAHKVLLFXASPRFKALLSSKPXNDGXCIEIGYVKYSIFQLVMQYLYYGGPESLLIKNNEIMELLSAAKFFQLEALQRHCEIICAKSINXDNCVDIYNHAKFLGVXELSAYCEGYFLKNMMVLIENEAFKQLLYDKNGEGXGQDVLQDLQRXLAIRIQSIHLSSSKGSVV

SEQ ID NO: 4488 - protein, 641 aa, Homo sapiens
  MOD_RES (119)..(119): Selenocysteine
  MOD_RES (136)..(136): Selenocysteine
  MOD_RES (143)..(143): Selenocysteine
  MOD_RES (174)..(174): Selenocysteine
  MOD_RES (185)..(185): Selenocysteine
  MOD_RES (189)..(189): Selenocysteine
  MOD_RES (192)..(192): Selenocysteine
  MOD_RES (227)..(227): Selenocysteine
  MOD_RES (255)..(255): Selenocysteine
  MOD_RES (263)..(264): Selenocysteine
  MOD_RES (309)..(309): Selenocysteine
  MOD_RES (314)..(314): Selenocysteine
  MOD_RES (348)..(348): Selenocysteine
  MOD_RES (359)..(359): Selenocysteine
  MOD_RES (362)..(362): Selenocysteine
  MOD_RES (388)..(388): Selenocysteine
  MOD_RES (395)..(395): Selenocysteine
  MOD_RES (400)..(400): Selenocysteine
  MOD_RES (427)..(427): Selenocysteine
  MOD_RES (439)..(439): Selenocysteine
  MOD_RES (446)..(446): Selenocysteine
  MOD_RES (463)..(463): Selenocysteine
  MOD_RES (480)..(480): Selenocysteine
  MOD_RES (494)..(494): Selenocysteine
  MOD_RES (498)..(498): Selenocysteine
  MOD_RES (561)..(561): Selenocysteine
  MOD_RES (577)..(577): Selenocysteine
  MOD_RES (612)..(612): Selenocysteine
  MOD_RES (623)..(623): Selenocysteine
MRKLRPKDSREPAPGSPVRSGCLQRLSHYSGIQRPFLVLPPLMEWIRVAVAHAGHRRSFSMDSDDVRQAARLLLPGVDCEPRQLRADDCFCASRKLDAVAIEAKFKQDLGFRMLNCGRXDLVKQAVSLLGPDGINXMSEQGMXPLMYACVRGDEAMVQMLLDAGADLNVEVVSXPHKYPSVHPEXRHWXALXFAVLHGHIPVVQLLLDAGAKVEGSVEHGEENYSEXPLQLAAAVGNFELVSLLLERGADPLIGXMYRNGISXXPQGDMNSFSQAAAHGHRNVFRKLLAQPEKEKSDILSLEEILAEGXDLAEXAPPPLCASRNSKAKLRALREAMYHSAEHGYVDVXIDIRSIGVPWXLHXWLESLRIAFQQHRRPLIQCLLKEFKXIQEEEYXEELVXQGLPLMFEILKASKNEVISQQLCVIFXHCYGPYPIPKLXEIKRKQXSRLDPHFLNNKEMSDVXFLVEGRPFYAHKVLLFXASPRFKALLSSKPXNDGXCIEIGYVKYSIFQLVMQYLYYGGPESLLIKNNEIMELLSAAKFFQLEALQRHCEIICAKSINXDNCVDIYNHAKFLGVXELSAYCEGYFLKNMMVLIENEAFKQLLYDKNGEGXGQDVLQDLQRXLAIRIQSIHLSSSKGSVV

SEQ ID NO: 4489 - protein, 183 aa, Homo sapiens
  MOD_RES (5)..(5): Selenocysteine
  MOD_RES (22)..(22): Selenocysteine
  MOD_RES (36)..(36): Selenocysteine
  MOD_RES (40)..(40): Selenocysteine
  MOD_RES (103)..(103): Selenocysteine
  MOD_RES (119)..(119): Selenocysteine
  MOD_RES (154)..(154): Selenocysteine
  MOD_RES (165)..(165): Selenocysteine
MSDVXFLVEGRPFYAHKVLLFXASPRFKALLSSKPXNDGXCIEIGYVKYSIFQLVMQYLYYGGPESLLIKNNEIMELLSAAKFFQLEALQRHCEIICAKSINXDNCVDIYNHAKFLGVXELSAYCEGYFLKNMMVLIENEAFKQLLYDKNGEGXGQDVLQDLQRXLAIRIQSIHLSSSKGSVV

SEQ ID NO: 4490 - protein, 237 aa, Homo sapiens
  MOD_RES (46)..(46): Selenocysteine
  MOD_RES (54)..(54): Selenocysteine
  MOD_RES (85)..(85): Selenocysteine
  MOD_RES (103)..(103): Selenocysteine
  MOD_RES (216)..(216): Selenocysteine
  MOD_RES (233)..(233): Selenocysteine
MVESLHGLDSRKGVLCLPDSLNLHRDPQRSNKPGELPMFSQSELRXIEQSLLAXRVGSIAELSDLVSRAMHHLQPLNAKHHGNGXPLHHKQGALYWEPEALYXLCYFMHCPQMEWENPNVEPSKVNLQVERPFLVLPPLMEWIRVAVAHAGHRRSFSMDSDDVRQAARLLLPGVDCEPRQLRADDCFCASRKLDAVAIEAKFKQDLGFRMLNCGRXDLVKQAVSLLGPDGINXMSEQ

SEQ ID NO: 4491 - protein, 283 aa, Homo sapiens
  MOD_RES (39)..(39): Selenocysteine
  MOD_RES (58)..(58): Selenocysteine
  MOD_RES (61)..(61): Selenocysteine
  MOD_RES (67)..(67): Selenocysteine
  MOD_RES (87)..(87): Selenocysteine
  MOD_RES (91)..(91): Selenocysteine
  MOD_RES (96)..(96): Selenocysteine
  MOD_RES (113)..(113): Selenocysteine
  MOD_RES (248)..(248): Selenocysteine
  MOD_RES (268)..(268): Selenocysteine
  MOD_RES (275)..(275): Selenocysteine
MARCGEGSAAPMVLLGSAGVCSKGLQRKGPCERRRLKAXVSEQLSQDLLRLLREEFHXDVXFSVGCXLFKAHKAVLLARVPDFYFHXIGQXSNSLXNQEPIAVENVEALEFRXFLQIIYSSNRNIKNYEEEILRKKIMEIGISQKQLDISFPKCENSSDCSLQKHEIPEDISDRDDDFISNDNYDLEPASELGEDLLKLYVKPCCPDIDIFVDGKRFKAHRAILSARSSYFAAMLSGCWAESSQEYVXLQGISHVELNVMMHFIYGGXLDIPDKXNVGLFPEH

SEQ ID NO: 4492 - protein, 378 aa, Homo sapiens
  MOD_RES (39)..(39): Selenocysteine
  MOD_RES (58)..(58): Selenocysteine
  MOD_RES (61)..(61): Selenocysteine
  MOD_RES (67)..(67): Selenocysteine
  MOD_RES (87)..(87): Selenocysteine
  MOD_RES (91)..(91): Selenocysteine
  MOD_RES (96)..(96): Selenocysteine
  MOD_RES (113)..(113): Selenocysteine
  MOD_RES (248)..(248): Selenocysteine
  MOD_RES (268)..(268): Selenocysteine
  MOD_RES (275)..(275): Selenocysteine
  MOD_RES (315)..(315): Selenocysteine
  MOD_RES (317)..(317): Selenocysteine
  MOD_RES (378)..(378): Selenocysteine
MARCGEGSAAPMVLLGSAGVCSKGLQRKGPCERRRLKAXVSEQLSQDLLRLLREEFHXDVXFSVGCXLFKAHKAVLLARVPDFYFHXIGQXSNSLXNQEPIAVENVEALEFRXFLQIIYSSNRNIKNYEEEILRKKIMEIGISQKQLDISFPKCENSSDCSLQKHEIPEDISDRDDDFISNDNYDLEPASELGEDLLKLYVKPCCPDIDIFVDGKRFKAHRAILSARSSYFAAMLSGCWAESSQEYVXLQGISHVELNVMMHFIYGGXLDIPDKXNVGQILNMADMYGLEGLKEVAIYILRRDYCNFFQKPVPRXLXSILECLIIAHSVGVESLFADCMKWIVKHFARFWSERSFANIPPEIQKSCLNMLIQSLVSIX

SEQ ID NO: 4493 - protein, 1792 aa, Homo sapiens
  MOD_RES (39)..(39): Selenocysteine
  MOD_RES (58)..(58): Selenocysteine
  MOD_RES (61)..(61): Selenocysteine
  MOD_RES (67)..(67): Selenocysteine
  MOD_RES (87)..(87): Selenocysteine
  MOD_RES (91)..(91): Selenocysteine
  MOD_RES (96)..(96): Selenocysteine
  MOD_RES (113)..(113): Selenocysteine
  MOD_RES (248)..(248): Selenocysteine
  MOD_RES (268)..(268): Selenocysteine
  MOD_RES (275)..(275): Selenocysteine
  MOD_RES (315)..(315): Selenocysteine
  MOD_RES (317)..(317): Selenocysteine
  MOD_RES (399)..(399): Selenocysteine
  MOD_RES (404)..(404): Selenocysteine
  MOD_RES (442)..(442): Selenocysteine
  MOD_RES (448)..(448): Selenocysteine
  MOD_RES (458)..(459): Selenocysteine
  MOD_RES (471)..(471): Selenocysteine
  MOD_RES (478)..(478): Selenocysteine
  MOD_RES (484)..(484): Selenocysteine
  MOD_RES (508)..(508): Selenocysteine
  MOD_RES (516)..(516): Selenocysteine
  MOD_RES (575)..(575): Selenocysteine
  MOD_RES (593)..(593): Selenocysteine
  MOD_RES (601)..(601): Selenocysteine
  MOD_RES (613)..(613): Selenocysteine
  MOD_RES (620)..(620): Selenocysteine
  MOD_RES (625)..(625): Selenocysteine
  MOD_RES (636)..(636): Selenocysteine
  MOD_RES (638)..(638): Selenocysteine
  MOD_RES (642)..(642): Selenocysteine
  MOD_RES (664)..(664): Selenocysteine
  MOD_RES (670)..(670): Selenocysteine
  MOD_RES (697)..(697): Selenocysteine
  MOD_RES (713)..(713): Selenocysteine
  MOD_RES (730)..(730): Selenocysteine
  MOD_RES (740)..(740): Selenocysteine
  MOD_RES (752)..(752): Selenocysteine
  MOD_RES (783)..(783): Selenocysteine
  MOD_RES (795)..(795): Selenocysteine
  MOD_RES (798)..(798): Selenocysteine
  MOD_RES (809)..(809): Selenocysteine
  MOD_RES (838)..(838): Selenocysteine
  MOD_RES (843)..(843): Selenocysteine
  MOD_RES (849)..(849): Selenocysteine
  MOD_RES (852)..(852): Selenocysteine
  MOD_RES (857)..(857): Selenocysteine
  MOD_RES (859)..(859): Selenocysteine
  MOD_RES (890)..(892): Selenocysteine
  MOD_RES (907)..(907): Selenocysteine
  MOD_RES (931)..(931): Selenocysteine
  MOD_RES (950)..(950): Selenocysteine
  MOD_RES (962)..(962): Selenocysteine
  MOD_RES (964)..(964): Selenocysteine
  MOD_RES (1054)..(1054): Selenocysteine
  MOD_RES (1062)..(1062): Selenocysteine
  MOD_RES (1087)..(1088): Selenocysteine
  MOD_RES (1113)..(1113): Selenocysteine
  MOD_RES (1133)..(1133): Selenocysteine
  MOD_RES (1153)..(1153): Selenocysteine
  MOD_RES (1156)..(1156): Selenocysteine
  MOD_RES (1174)..(1174): Selenocysteine
  MOD_RES (1192)..(1192): Selenocysteine
  MOD_RES (1217)..(1217): Selenocysteine
  MOD_RES (1226)..(1226): Selenocysteine
  MOD_RES (1229)..(1229): Selenocysteine
  MOD_RES (1239)..(1239): Selenocysteine
  MOD_RES (1252)..(1252): Selenocysteine
  MOD_RES (1256)..(1257): Selenocysteine
  MOD_RES (1290)..(1290): Selenocysteine
  MOD_RES (1304)..(1304): Selenocysteine
  MOD_RES (1306)..(1306): Selenocysteine
  MOD_RES (1337)..(1337): Selenocysteine
  MOD_RES (1385)..(1385): Selenocysteine
  MOD_RES (1421)..(1421): Selenocysteine
  MOD_RES (1431)..(1431): Selenocysteine
  MOD_RES (1457)..(1457): Selenocysteine
  MOD_RES (1483)..(1483): Selenocysteine
  MOD_RES (1513)..(1513): Selenocysteine
  MOD_RES (1533)..(1533): Selenocysteine
  MOD_RES (1538)..(1538): Selenocysteine
  MOD_RES (1603)..(1603): Selenocysteine
  MOD_RES (1626)..(1628): Selenocysteine
  MOD_RES (1645)..(1645): Selenocysteine
  MOD_RES (1649)..(1649): Selenocysteine
  MOD_RES (1659)..(1659): Selenocysteine
  MOD_RES (1680)..(1680): Selenocysteine
  MOD_RES (1683)..(1683): Selenocysteine
  MOD_RES (1699)..(1699): Selenocysteine
  MOD_RES (1715)..(1715): Selenocysteine
  MOD_RES (1732)..(1732): Selenocysteine
  MOD_RES (1746)..(1746): Selenocysteine
  MOD_RES (1750)..(1750): Selenocysteine
  MOD_RES (1758)..(1758): Selenocysteine
  MOD_RES (1768)..(1768): Selenocysteine
  MOD_RES (1784)..(1784): Selenocysteine
  MOD_RES (1790)..(1790): Selenocysteine
MARCGEGSAAPMVLLGSAGVCSKGLQRKGPCERRRLKAXVSEQLSQDLLRLLREEFHXDVXFSVGCXLFKAHKAVLLARVPDFYFHXIGQXSNSLXNQEPIAVENVEALEFRXFLQIIYSSNRNIKNYEEEILRKKIMEIGISQKQLDISFPKCENSSDCSLQKHEIPEDISDRDDDFISNDNYDLEPASELGEDLLKLYVKPCCPDIDIFVDGKRFKAHRAILSARSSYFAAMLSGCWAESSQEYVXLQGISHVELNVMMHFIYGGXLDIPDKXNVGQILNMADMYGLEGLKEVAIYILRRDYCNFFQKPVPRXLXSILECLIIAHSVGVESLFADCMKWIVKHFARFWSERSFANIPPEIQKSCLNMLIQSLNDKNAAFLLMESDRLIISLPRVKWXEAALXMASQLQEKCIAFIVDNFSKIIQSENFALLLQSQAMSSXADLLDXILKAIEENIXXENSCSLLMALDXLLNSDSXKEMGFXCKIQALRDKLWIFLVQSFYAVRHXESWKLMSXDDQQKIQAAAFDKGDDRRLGKKPIFSSSQQRKQVSDSGDIKIKSWRGNNKKECWSYLSXNKKMKSDGLGASGHSSSXNRNSINKXLKQDDVKEKDGXKIASKIXKELKXGGKNVSGKPKXVXKSKXENGDKARLENMSPRQVVERSAXAAAAAXGQKNLLNGKGVRNQEGQISGARPKVLXGNLNVQAKAKPLKKAXGKDSPCLSIAGPSSRSXDSSMEFSISXECLDEPKENGSXEEEKPSGHKLSFCDSPGQMMKNSVDSVKNSXVAIKSRPVSRVXNGXSNKKSIHEQDXNVNNSVLKKVSGKGCSEPVPQAILKKRGXSNGCXAAQQRXKSXPSNLXKXQGSQGESPNSVKSSVSSRQSDENVAKLDHNXXXEKQAPKRKMVKQVHXALPKVNAKIVAMPKNLNQSKKGEXLNNKDSKQKMPPGQVISKXQPSSQRPLKHEXSXVQKSMFHDVRDNNNKDSVSEQKPHKPLINLASEISDAEALQSSCRPDPQKPLNDQEKEKLALECQNISKLDKSLKHELESKQICLDKSEXKFPNHKEXDDCDAANICCHSVGSDNVNSKFYSXXALKYMVSNPNENSLNSNPVCDLDSXSAGQIHLISDRENQVGRKDXNKQSSIKCVEDVSLCNPERXNGXLNSAQEDKKSKVPVEGLXIPSKLSDESAMDEDKHAXADSDVSSKCFSGQLSEKNSPKNMEXSESPESHEXPEXPFVGHWNLSXGVLHQRESPESDXGSAXXSSDDIKPRSEDYDAGGSQDDDGSNDRGISKCGXMLCHDFLGRSSSDXSXPEELKIYDSNLRIEVKMKKQSNNDLFQVNSXSDDEIPRKRPEIWSRSAIVHSRERENIPRGSVQFAQEIDQVSSSADEXEDERSEAENVAENFSISNPAPQQFQGIINLAFEDAXENECREFSAXKKFKRSVLLSVDECEELGSDEGEVHXPFQASVDSFSPSDVFDGISHEHHGRXCYSRFSRESEDNILECKQNKGNSVCKNESXVLDLSSIDSSRKNKQSVSAXEKKNXIDVLSSRSRQLLREDKKVNNGSNVENDIQQRSKFLDSDVKSQERPCHLDLHQREPNSDIPKNSSXKSLDSFRSQVLPQEGPVKESHSXXXEKANIALSAGDIDDCDXLAQXRMYDHRPSKXLSPIYEMDVIEAFEQKVESEXHVXDMDFEDDQHFAKQDWXLLKQLLSEQDSNLDVXNSVPEDLSLAQYLINQXLLLARDSSKPQGIXHIDXLNRWSELXSPLDSSASIXMASFSSEDCSPQGEWXILELEXQH

SEQ ID NO: 4494 - protein, 1409 aa, Homo sapiens
  MOD_RES (16)..(16): Selenocysteine
  MOD_RES (21)..(21): Selenocysteine
  MOD_RES (59)..(59): Selenocysteine
  MOD_RES (65)..(65): Selenocysteine
  MOD_RES (75)..(76): Selenocysteine
  MOD_RES (88)..(88): Selenocysteine
  MOD_RES (95)..(95): Selenocysteine
  MOD_RES (101)..(101): Selenocysteine
  MOD_RES (125)..(125): Selenocysteine
  MOD_RES (133)..(133): Selenocysteine
  MOD_RES (192)..(192): Selenocysteine
  MOD_RES (210)..(210): Selenocysteine
  MOD_RES (218)..(218): Selenocysteine
  MOD_RES (230)..(230): Selenocysteine
  MOD_RES (237)..(237): Selenocysteine
  MOD_RES (242)..(242): Selenocysteine
  MOD_RES (253)..(253): Selenocysteine
  MOD_RES (255)..(255): Selenocysteine
  MOD_RES (259)..(259): Selenocysteine
  MOD_RES (281)..(281): Selenocysteine
  MOD_RES (287)..(287): Selenocysteine
  MOD_RES (314)..(314): Selenocysteine
  MOD_RES (330)..(330): Selenocysteine
  MOD_RES (347)..(347): Selenocysteine
  MOD_RES (357)..(357): Selenocysteine
  MOD_RES (369)..(369): Selenocysteine
  MOD_RES (400)..(400): Selenocysteine
  MOD_RES (412)..(412): Selenocysteine
  MOD_RES (415)..(415): Selenocysteine
  MOD_RES (426)..(426): Selenocysteine
  MOD_RES (455)..(455): Selenocysteine
  MOD_RES (460)..(460): Selenocysteine
  MOD_RES (466)..(466): Selenocysteine
  MOD_RES (469)..(469): Selenocysteine
  MOD_RES (474)..(474): Selenocysteine
  MOD_RES (476)..(476): Selenocysteine
  MOD_RES (507)..(509): Selenocysteine
  MOD_RES (524)..(524): Selenocysteine
  MOD_RES (548)..(548): Selenocysteine
  MOD_RES (567)..(567): Selenocysteine
  MOD_RES (579)..(579): Selenocysteine
  MOD_RES (581)..(581): Selenocysteine
  MOD_RES (671)..(671): Selenocysteine
  MOD_RES (679)..(679): Selenocysteine
  MOD_RES (704)..(705): Selenocysteine
  MOD_RES (730)..(730): Selenocysteine
  MOD_RES (750)..(750): Selenocysteine
  MOD_RES (770)..(770): Selenocysteine
  MOD_RES (773)..(773): Selenocysteine
  MOD_RES (791)..(791): Selenocysteine
  MOD_RES (809)..(809): Selenocysteine
  MOD_RES (834)..(834): Selenocysteine
  MOD_RES (843)..(843): Selenocysteine
  MOD_RES (846)..(846): Selenocysteine
  MOD_RES (856)..(856): Selenocysteine
  MOD_RES (869)..(869): Selenocysteine
  MOD_RES (873)..(874): Selenocysteine
  MOD_RES (907)..(907): Selenocysteine
  MOD_RES (921)..(921): Selenocysteine
  MOD_RES (923)..(923): Selenocysteine
  MOD_RES (954)..(954): Selenocysteine
  MOD_RES (1002)..(1002): Selenocysteine
  MOD_RES (1038)..(1038): Selenocysteine
  MOD_RES (1048)..(1048): Selenocysteine
  MOD_RES (1074)..(1074): Selenocysteine
  MOD_RES (1100)..(1100): Selenocysteine
  MOD_RES (1130)..(1130): Selenocysteine
  MOD_RES (1150)..(1150): Selenocysteine
  MOD_RES (1155)..(1155): Selenocysteine
  MOD_RES (1220)..(1220): Selenocysteine
  MOD_RES (1243)..(1245): Selenocysteine
  MOD_RES (1262)..(1262): Selenocysteine
  MOD_RES (1266)..(1266): Selenocysteine
  MOD_RES (1276)..(1276): Selenocysteine
  MOD_RES (1297)..(1297): Selenocysteine
  MOD_RES (1300)..(1300): Selenocysteine
  MOD_RES (1316)..(1316): Selenocysteine
  MOD_RES (1332)..(1332): Selenocysteine
  MOD_RES (1349)..(1349): Selenocysteine
  MOD_RES (1363)..(1363): Selenocysteine
  MOD_RES (1367)..(1367): Selenocysteine
  MOD_RES (1375)..(1375): Selenocysteine
  MOD_RES (1385)..(1385): Selenocysteine
  MOD_RES (1401)..(1401): Selenocysteine
  MOD_RES (1407)..(1407): Selenocysteine
MESDRLIISLPRVKWXEAALXMASQLQEKCIAFIVDNFSKIIQSENFALLLQSQAMSSXADLLDXILKAIEENIXXENSCSLLMALDXLLNSDSXKEMGFXCKIQALRDKLWIFLVQSFYAVRHXESWKLMSXDDQQKIQAAAFDKGDDRRLGKKPIFSSSQQRKQVSDSGDIKIKSWRGNNKKECWSYLSXNKKMKSDGLGASGHSSSXNRNSINKXLKQDDVKEKDGXKIASKIXKELKXGGKNVSGKPKXVXKSKXENGDKARLENMSPRQVVERSAXAAAAAXGQKNLLNGKGVRNQEGQISGARPKVLXGNLNVQAKAKPLKKAXGKDSPCLSIAGPSSRSXDSSMEFSISXECLDEPKENGSXEEEKPSGHKLSFCDSPGQMMKNSVDSVKNSXVAIKSRPVSRVXNGXSNKKSIHEQDXNVNNSVLKKVSGKGCSEPVPQAILKKRGXSNGCXAAQQRXKSXPSNLXKXQGSQGESPNSVKSSVSSRQSDENVAKLDHNXXXEKQAPKRKMVKQVHXALPKVNAKIVAMPKNLNQSKKGEXLNNKDSKQKMPPGQVISKXQPSSQRPLKHEXSXVQKSMFHDVRDNNNKDSVSEQKPHKPLINLASEISDAEALQSSCRPDPQKPLNDQEKEKLALECQNISKLDKSLKHELESKQICLDKSEXKFPNHKEXDDCDAANICCHSVGSDNVNSKFYSXXALKYMVSNPNENSLNSNPVCDLDSXSAGQIHLISDRENQVGRKDXNKQSSIKCVEDVSLCNPERXNGXLNSAQEDKKSKVPVEGLXIPSKLSDESAMDEDKHAXADSDVSSKCFSGQLSEKNSPKNMEXSESPESHEXPEXPFVGHWNLSXGVLHQRESPESDXGSAXXSSDDIKPRSEDYDAGGSQDDDGSNDRGISKCGXMLCHDFLGRSSSDXSXPEELKIYDSNLRIEVKMKKQSNNDLFQVNSXSDDEIPRKRPEIWSRSAIVHSRERENIPRGSVQFAQEIDQVSSSADEXEDERSEAENVAENFSISNPAPQQFQGIINLAFEDAXENECREFSAXKKFKRSVLLSVDECEELGSDEGEVHXPFQASVDSFSPSDVFDGISHEHHGRXCYSRFSRESEDNILECKQNKGNSVCKNESXVLDLSSIDSSRKNKQSVSAXEKKNXIDVLSSRSRQLLREDKKVNNGSNVENDIQQRSKFLDSDVKSQERPCHLDLHQREPNSDIPKNSSXKSLDSFRSQVLPQEGPVKESHSXXXEKANIALSAGDIDDCDXLAQXRMYDHRPSKXLSPIYEMDVIEAFEQKVESEXHVXDMDFEDDQHFAKQDWXLLKQLLSEQDSNLDVXNSVPEDLSLAQYLINQXLLLARDSSKPQGIXHIDXLNRWSELXSPLDSSASIXMASFSSEDCSPQGEWXILELEXQH

SEQ ID NO: 4495 - protein, 1279 aa, Homo sapiens
  MOD_RES (3)..(3): Selenocysteine
  MOD_RES (62)..(62): Selenocysteine
  MOD_RES (80)..(80): Selenocysteine
  MOD_RES (88)..(88): Selenocysteine
  MOD_RES (100)..(100): Selenocysteine
  MOD_RES (107)..(107): Selenocysteine
  MOD_RES (112)..(112): Selenocysteine
  MOD_RES (123)..(123): Selenocysteine
  MOD_RES (125)..(125): Selenocysteine
  MOD_RES (129)..(129): Selenocysteine
  MOD_RES (151)..(151): Selenocysteine
  MOD_RES (157)..(157): Selenocysteine
  MOD_RES (184)..(184): Selenocysteine
  MOD_RES (200)..(200): Selenocysteine
  MOD_RES (217)..(217): Selenocysteine
  MOD_RES (227)..(227): Selenocysteine
  MOD_RES (239)..(239): Selenocysteine
  MOD_RES (270)..(270): Selenocysteine
  MOD_RES (282)..(282): Selenocysteine
  MOD_RES (285)..(285): Selenocysteine
  MOD_RES (296)..(296): Selenocysteine
  MOD_RES (325)..(325): Selenocysteine
  MOD_RES (330)..(330): Selenocysteine
  MOD_RES (336)..(336): Selenocysteine
  MOD_RES (339)..(339): Selenocysteine
  MOD_RES (344)..(344): Selenocysteine
  MOD_RES (346)..(346): Selenocysteine
  MOD_RES (377)..(379): Selenocysteine
  MOD_RES (394)..(394): Selenocysteine
  MOD_RES (418)..(418): Selenocysteine
  MOD_RES (437)..(437): Selenocysteine
  MOD_RES (449)..(449): Selenocysteine
  MOD_RES (451)..(451): Selenocysteine
  MOD_RES (541)..(541): Selenocysteine
  MOD_RES (549)..(549): Selenocysteine
  MOD_RES (574)..(575): Selenocysteine
  MOD_RES (600)..(600): Selenocysteine
  MOD_RES (620)..(620): Selenocysteine
  MOD_RES (640)..(640): Selenocysteine
  MOD_RES (643)..(643): Selenocysteine
  MOD_RES (661)..(661): Selenocysteine
  MOD_RES (679)..(679): Selenocysteine
  MOD_RES (704)..(704): Selenocysteine
  MOD_RES (713)..(713): Selenocysteine
  MOD_RES (716)..(716): Selenocysteine
  MOD_RES (726)..(726): Selenocysteine
  MOD_RES (739)..(739): Selenocysteine
  MOD_RES (743)..(744): Selenocysteine
  MOD_RES (777)..(777): Selenocysteine
  MOD_RES (791)..(791): Selenocysteine
  MOD_RES (793)..(793): Selenocysteine
  MOD_RES (824)..(824): Selenocysteine
  MOD_RES (872)..(872): Selenocysteine
  MOD_RES (908)..(908): Selenocysteine
  MOD_RES (918)..(918): Selenocysteine
  MOD_RES (944)..(944): Selenocysteine
  MOD_RES (970)..(970): Selenocysteine
  MOD_RES (1000)..(1000): Selenocysteine
  MOD_RES (1020)..(1020): Selenocysteine
  MOD_RES (1025)..(1025): Selenocysteine
  MOD_RES (1090)..(1090): Selenocysteine
  MOD_RES (1113)..(1115): Selenocysteine
  MOD_RES (1132)..(1132): Selenocysteine
  MOD_RES (1136)..(1136): Selenocysteine
  MOD_RES (1146)..(1146): Selenocysteine
  MOD_RES (1167)..(1167): Selenocysteine
  MOD_RES (1170)..(1170): Selenocysteine
  MOD_RES (1186)..(1186): Selenocysteine
  MOD_RES (1202)..(1202): Selenocysteine
  MOD_RES (1219)..(1219): Selenocysteine
  MOD_RES (1233)..(1233): Selenocysteine
  MOD_RES (1237)..(1237): Selenocysteine
  MOD_RES (1245)..(1245): Selenocysteine
  MOD_RES (1255)..(1255): Selenocysteine
  MOD_RES (1271)..(1271): Selenocysteine
  MOD_RES (1277)..(1277): Selenocysteine
MSXDDQQKIQAAAFDKGDDRRLGKKPIFSSSQQRKQVSDSGDIKIKSWRGNNKKECWSYLSXNKKMKSDGLGASGHSSSXNRNSINKXLKQDDVKEKDGXKIASKIXKELKXGGKNVSGKPKXVXKSKXENGDKARLENMSPRQVVERSAXAAAAAXGQKNLLNGKGVRNQEGQISGARPKVLXGNLNVQAKAKPLKKAXGKDSPCLSIAGPSSRSXDSSMEFSISXECLDEPKENGSXEEEKPSGHKLSFCDSPGQMMKNSVDSVKNSXVAIKSRPVSRVXNGXSNKKSIHEQDXNVNNSVLKKVSGKGCSEPVPQAILKKRGXSNGCXAAQQRXKSXPSNLXKXQGSQGESPNSVKSSVSSRQSDENVAKLDHNXXXEKQAPKRKMVKQVHXALPKVNAKIVAMPKNLNQSKKGEXLNNKDSKQKMPPGQVISKXQPSSQRPLKHEXSXVQKSMFHDVRDNNNKDSVSEQKPHKPLINLASEISDAEALQSSCRPDPQKPLNDQEKEKLALECQNISKLDKSLKHELESKQICLDKSEXKFPNHKEXDDCDAANICCHSVGSDNVNSKFYSXXALKYMVSNPNENSLNSNPVCDLDSXSAGQIHLISDRENQVGRKDXNKQSSIKCVEDVSLCNPERXNGXLNSAQEDKKSKVPVEGLXIPSKLSDESAMDEDKHAXADSDVSSKCFSGQLSEKNSPKNMEXSESPESHEXPEXPFVGHWNLSXGVLHQRESPESDXGSAXXSSDDIKPRSEDYDAGGSQDDDGSNDRGISKCGXMLCHDFLGRSSSDXSXPEELKIYDSNLRIEVKMKKQSNNDLFQVNSXSDDEIPRKRPEIWSRSAIVHSRERENIPRGSVQFAQEIDQVSSSADEXEDERSEAENVAENFSISNPAPQQFQGIINLAFEDAXENECREFSAXKKFKRSVLLSVDECEELGSDEGEVHXPFQASVDSFSPSDVFDGISHEHHGRXCYSRFSRESEDNILECKQNKGNSVCKNESXVLDLSSIDSSRKNKQSVSAXEKKNXIDVLSSRSRQLLREDKKVNNGSNVENDIQQRSKFLDSDVKSQERPCHLDLHQREPNSDIPKNSSXKSLDSFRSQVLPQEGPVKESHSXXXEKANIALSAGDIDDCDXLAQXRMYDHRPSKXLSPIYEMDVIEAFEQKVESEXHVXDMDFEDDQHFAKQDWXLLKQLLSEQDSNLDVXNSVPEDLSLAQYLINQXLLLARDSSKPQGIXHIDXLNRWSELXSPLDSSASIXMASFSSEDCSPQGEWXILELEXQH

SEQ ID NO: 4496 - protein, 178 aa, Homo sapiens
  MOD_RES (36)..(36): Selenocysteine
  MOD_RES (41)..(41): Selenocysteine
  MOD_RES (56)..(58): Selenocysteine
  MOD_RES (90)..(90): Selenocysteine
  MOD_RES (140)..(140): Selenocysteine
  MOD_RES (160)..(160): Selenocysteine
  MOD_RES (166)..(166): Selenocysteine
  MOD_RES (175)..(175): Selenocysteine
MDRAARCSGASSLPLLLALALGLVILHCVVADGNSXRSPEXNGLLCGDPEENCAAXXXQSKRKGHFSRCPKQYKHYCIKGRCRFVVAEQXPSCVCDEGYIGARCERVDLFYLRGDRGQILVICLIAVMVVFIILVIGVCXCCHPLRKRRKRKKKEEEMEXLGKDIXPINEDIEEXNIA

SEQ ID NO: 4497 - protein, 108 aa, Homo sapiens
  MOD_RES (1)..(1): Any amino acid
  MOD_RES (15)..(15): Selenocysteine
  MOD_RES (20)..(20): Selenocysteine
  MOD_RES (35)..(37): Selenocysteine
  MOD_RES (69)..(69): Selenocysteine
  MOD_RES (90)..(90): Selenocysteine
  MOD_RES (96)..(96): Selenocysteine
  MOD_RES (105)..(105): Selenocysteine
XLVILHCVVADGNSXRSPEXNGLLCGDPEENCAAXXXQSKRKGHFSRCPKQYKHYCIKGRCRFVVAEQXPSCVPLRKRRKRKKKEEEMEXLGKDIXPINEDIEEXNIA

SEQ ID NO: 4498 - protein, 158 aa, Homo sapiens
  MOD_RES (7)..(7): Selenocysteine
  MOD_RES (26)..(26): Selenocysteine
  MOD_RES (47)..(47): Selenocysteine
  MOD_RES (101)..(101): Selenocysteine
  MOD_RES (136)..(136): Selenocysteine
MSHGKGXDMLPEIAAAVGFLSSLLRXRGCVSEQRLKVFSGALQEALXEHYKHHWFPEKPSKGSGYRCIRINHKMDPIISRVASQIGLSQPQLHQLLPSELXLWVDPYEVSYRIGEDGSICVLYEEAPLAASCGLLXCKNQVLLGRSSPSKNYVMAVSS

SEQ ID NO: 4499 - protein, 483 aa, Homo sapiens
  MOD_RES (20)..(20): Selenocysteine
  MOD_RES (33)..(33): Selenocysteine
  MOD_RES (62)..(62): Selenocysteine
  MOD_RES (66)..(66): Selenocysteine
  MOD_RES (117)..(117): Selenocysteine
  MOD_RES (158)..(158): Selenocysteine
  MOD_RES (184)..(184): Selenocysteine
  MOD_RES (191)..(191): Selenocysteine
  MOD_RES (213)..(213): Selenocysteine
  MOD_RES (270)..(270): Selenocysteine
  MOD_RES (287)..(287): Selenocysteine
  MOD_RES (316)..(316): Selenocysteine
  MOD_RES (324)..(324): Selenocysteine
  MOD_RES (339)..(339): Selenocysteine
  MOD_RES (376)..(376): Selenocysteine
  MOD_RES (426)..(426): Selenocysteine
  MOD_RES (430)..(430): Selenocysteine
  MOD_RES (452)..(452): Selenocysteine
  MOD_RES (467)..(467): Selenocysteine
MAAVILESIFLKRSQQKKKXSPLNFKKRLFLLXVHKLSYYEYDFERGRRGSKKGSIDVEKIXCVEXVVPEKNPPPERQIPRRGEESSEMEQISIIERFPYPFQVVYDEGPLYVFSPXEELRKRWIHQLKNVIRYNSDLVQKYHPCFWIDGQYLCCSQXAKNAMGCQILENRNGSLKPGSSHRKXKKPLPPXPEEDQILKKPLPPEPAAAPVSXSELKKVVALYDYMPMNANDLQLRKGDEYFILEESNLPWWRARDKNGQEGYIPSNYVXEAEDSIEMYEWYSKHMXRSQAEQLLKQEGKEGGFIVRDSSKAGKYXVSVFAKSXGDPQGVIRHYVVCSXPQSQYYLAARNCLVNDQGVVKVSDFGLSRYVLDDEYXSSVGSKFPVRWSPPEVLMYSKFSSKSDIWAFGVLMWEIYSLGKMPYERFXNSEXAEHIAQGLRLYRPHLASEKVYXIMYSCWHEKADERPXFKILLSNILDVMDEES

SEQ ID NO: 4500 - protein, 568 aa, Homo sapiens
  MOD_RES (20)..(20): Selenocysteine
  MOD_RES (33)..(33): Selenocysteine
  MOD_RES (62)..(62): Selenocysteine
  MOD_RES (66)..(66): Selenocysteine
  MOD_RES (117)..(117): Selenocysteine
  MOD_RES (158)..(158): Selenocysteine
  MOD_RES (184)..(184): Selenocysteine
  MOD_RES (191)..(191): Selenocysteine
  MOD_RES (213)..(213): Selenocysteine
  MOD_RES (270)..(270): Selenocysteine
  MOD_RES (287)..(287): Selenocysteine
  MOD_RES (316)..(316): Selenocysteine
  MOD_RES (324)..(324): Selenocysteine
  MOD_RES (339)..(339): Selenocysteine
  MOD_RES (354)..(354): Selenocysteine
  MOD_RES (387)..(387): Selenocysteine
  MOD_RES (403)..(403): Selenocysteine
  MOD_RES (410)..(410): Selenocysteine
  MOD_RES (465)..(465): Selenocysteine
  MOD_RES (474)..(474): Selenocysteine
  MOD_RES (495)..(495): Selenocysteine
  MOD_RES (552)..(552): Selenocysteine
MAAVILESIFLKRSQQKKKXSPLNFKKRLFLLXVHKLSYYEYDFERGRRGSKKGSIDVEKIXCVEXVVPEKNPPPERQIPRRGEESSEMEQISIIERFPYPFQVVYDEGPLYVFSPXEELRKRWIHQLKNVIRYNSDLVQKYHPCFWIDGQYLCCSQXAKNAMGCQILENRNGSLKPGSSHRKXKKPLPPXPEEDQILKKPLPPEPAAAPVSXSELKKVVALYDYMPMNANDLQLRKGDEYFILEESNLPWWRARDKNGQEGYIPSNYVXEAEDSIEMYEWYSKHMXRSQAEQLLKQEGKEGGFIVRDSSKAGKYXVSVFAKSXGDPQGVIRHYVVCSXPQSQYYLAEKHLFSXIPELINYHQHNSAGLISRLKYPVSQQNKNAPSXAGLGYGSWEIDPKDLXFLKELGXGQFGVVKYGKWRGQYDVAIKMIKEGSMSEDEFIEEAKVMMNLSHEKLVQLYGVCXKQRPIFIIXEYMANGCLLNYLREMRHRFQXQQLLEMCKDVCEAMEYLESKQFLHRDLAARNCLVNDQGVVKVSDFGLSRYVLDDEYXSSVGSKFPVRWSPPES

SEQ ID NO: 4501 - protein, 659 aa, Homo sapiens
  MOD_RES (20)..(20): Selenocysteine
  MOD_RES (33)..(33): Selenocysteine
  MOD_RES (62)..(62): Selenocysteine
  MOD_RES (66)..(66): Selenocysteine
  MOD_RES (117)..(117): Selenocysteine
  MOD_RES (158)..(158): Selenocysteine
  MOD_RES (184)..(184): Selenocysteine
  MOD_RES (191)..(191): Selenocysteine
  MOD_RES (213)..(213): Selenocysteine
  MOD_RES (270)..(270): Selenocysteine
  MOD_RES (287)..(287): Selenocysteine
  MOD_RES (316)..(316): Selenocysteine
  MOD_RES (324)..(324): Selenocysteine
  MOD_RES (339)..(339): Selenocysteine
  MOD_RES (354)..(354): Selenocysteine
  MOD_RES (387)..(387): Selenocysteine
  MOD_RES (403)..(403): Selenocysteine
  MOD_RES (410)..(410): Selenocysteine
  MOD_RES (465)..(465): Selenocysteine
  MOD_RES (474)..(474): Selenocysteine
  MOD_RES (495)..(495): Selenocysteine
  MOD_RES (552)..(552): Selenocysteine
  MOD_RES (602)..(602): Selenocysteine
  MOD_RES (606)..(606): Selenocysteine
  MOD_RES (628)..(628): Selenocysteine
  MOD_RES (643)..(643): Selenocysteine
MAAVILESIFLKRSQQKKKXSPLNFKKRLFLLXVHKLSYYEYDFERGRRGSKKGSIDVEKIXCVEXVVPEKNPPPERQIPRRGEESSEMEQISIIERFPYPFQVVYDEGPLYVFSPXEELRKRWIHQLKNVIRYNSDLVQKYHPCFWIDGQYLCCSQXAKNAMGCQILENRNGSLKPGSSHRKXKKPLPPXPEEDQILKKPLPPEPAAAPVSXSELKKVVALYDYMPMNANDLQLRKGDEYFILEESNLPWWRARDKNGQEGYIPSNYVXEAEDSIEMYEWYSKHMXRSQAEQLLKQEGKEGGFIVRDSSKAGKYXVSVFAKSXGDPQGVIRHYVVCSXPQSQYYLAEKHLFSXIPELINYHQHNSAGLISRLKYPVSQQNKNAPSXAGLGYGSWEIDPKDLXFLKELGXGQFGVVKYGKWRGQYDVAIKMIKEGSMSEDEFIEEAKVMMNLSHEKLVQLYGVCXKQRPIFIIXEYMANGCLLNYLREMRHRFQXQQLLEMCKDVCEAMEYLESKQFLHRDLAARNCLVNDQGVVKVSDFGLSRYVLDDEYXSSVGSKFPVRWSPPEVLMYSKFSSKSDIWAFGVLMWEIYSLGKMPYERFXNSEXAEHIAQGLRLYRPHLASEKVYXIMYSCWHEKADERPXFKILLSNILDVMDEES

SEQ ID NO: 4502 - protein, 693 aa, Homo sapiens
  MOD_RES (26)..(26): Selenocysteine
  MOD_RES (54)..(54): Selenocysteine
  MOD_RES (67)..(67): Selenocysteine
  MOD_RES (96)..(96): Selenocysteine
  MOD_RES (100)..(100): Selenocysteine
  MOD_RES (151)..(151): Selenocysteine
  MOD_RES (192)..(192): Selenocysteine
  MOD_RES (218)..(218): Selenocysteine
  MOD_RES (225)..(225): Selenocysteine
  MOD_RES (247)..(247): Selenocysteine
  MOD_RES (304)..(304): Selenocysteine
  MOD_RES (321)..(321): Selenocysteine
  MOD_RES (350)..(350): Selenocysteine
  MOD_RES (358)..(358): Selenocysteine
  MOD_RES (373)..(373): Selenocysteine
  MOD_RES (388)..(388): Selenocysteine
  MOD_RES (421)..(421): Selenocysteine
  MOD_RES (437)..(437): Selenocysteine
  MOD_RES (444)..(444): Selenocysteine
  MOD_RES (499)..(499): Selenocysteine
  MOD_RES (508)..(508): Selenocysteine
  MOD_RES (529)..(529): Selenocysteine
  MOD_RES (586)..(586): Selenocysteine
  MOD_RES (636)..(636): Selenocysteine
  MOD_RES (640)..(640): Selenocysteine
  MOD_RES (662)..(662): Selenocysteine
  MOD_RES (677)..(677): Selenocysteine
MASWSIQQMVIGCPLCGRHCSGGEHXGELQKEEAMAAVILESIFLKRSQQKKKXSPLNFKKRLFLLXVHKLSYYEYDFERGRRGSKKGSIDVEKIXCVEXVVPEKNPPPERQIPRRGEESSEMEQISIIERFPYPFQVVYDEGPLYVFSPXEELRKRWIHQLKNVIRYNSDLVQKYHPCFWIDGQYLCCSQXAKNAMGCQILENRNGSLKPGSSHRKXKKPLPPXPEEDQILKKPLPPEPAAAPVSXSELKKVVALYDYMPMNANDLQLRKGDEYFILEESNLPWWRARDKNGQEGYIPSNYVXEAEDSIEMYEWYSKHMXRSQAEQLLKQEGKEGGFIVRDSSKAGKYXVSVFAKSXGDPQGVIRHYVVCSXPQSQYYLAEKHLFSXIPELINYHQHNSAGLISRLKYPVSQQNKNAPSXAGLGYGSWEIDPKDLXFLKELGXGQFGVVKYGKWRGQYDVAIKMIKEGSMSEDEFIEEAKVMMNLSHEKLVQLYGVCXKQRPIFIIXEYMANGCLLNYLREMRHRFQXQQLLEMCKDVCEAMEYLESKQFLHRDLAARNCLVNDQGVVKVSDFGLSRYVLDDEYXSSVGSKFPVRWSPPEVLMYSKFSSKSDIWAFGVLMWEIYSLGKMPYERFXNSEXAEHIAQGLRLYRPHLASEKVYXIMYSCWHEKADERPXFKILLSNILDVMDEES

SEQ ID NO: 4503 - protein, 43 aa, Homo sapiens
MKMASFLAFLLLNFRVCLLLLQLLMPHSAQFSVLGPSGPILAM

SEQ ID NO: 4504 - protein, 92 aa, Homo sapiens
  MOD_RES (57)..(57): Selenocysteine
  MOD_RES (62)..(62): Selenocysteine
MKMASFLAFLLLNFRVCLLLLQLLMPHSAQFSVLGPSGPILAMVGEDADLPCHLFPXMSAEXMELKWVSSSLRQVVNVYADGKEVEDRQSAP

SEQ ID NO: 4505 - protein, 119 aa, Homo sapiens
  MOD_RES (57)..(57): Selenocysteine
  MOD_RES (62)..(62): Selenocysteine
  MOD_RES (97)..(97): Selenocysteine
  MOD_RES (105)..(105): Selenocysteine
  MOD_RES (117)..(117): Selenocysteine
MKMASFLAFLLLNFRVCLLLLQLLMPHSAQFSVLGPSGPILAMVGEDADLPCHLFPXMSAEXMELKWVSSSLRQVVNVYADGKEVEDRQSAPYRGRXSILRDGIXAGKAALRIHNVXAS

SEQ ID NO: 4506 - protein, 352 aa, Homo sapiens
  MOD_RES (57)..(57): Selenocysteine
  MOD_RES (62)..(62): Selenocysteine
  MOD_RES (97)..(97): Selenocysteine
  MOD_RES (105)..(105): Selenocysteine
  MOD_RES (117)..(117): Selenocysteine
  MOD_RES (169)..(169): Selenocysteine
  MOD_RES (189)..(189): Selenocysteine
  MOD_RES (221)..(221): Selenocysteine
  MOD_RES (232)..(232): Selenocysteine
  MOD_RES (255)..(255): Selenocysteine
  MOD_RES (279)..(279): Selenocysteine
  MOD_RES (297)..(297): Selenocysteine
  MOD_RES (304)..(304): Selenocysteine
MKMASFLAFLLLNFRVCLLLLQLLMPHSAQFSVLGPSGPILAMVGEDADLPCHLFPXMSAEXMELKWVSSSLRQVVNVYADGKEVEDRQSAPYRGRXSILRDGIXAGKAALRIHNVXASDSGKYLCYFQDGDFYEKALVELKVAALGSDLHVDVKGYKDGGIHLECRSXGWYPQPQIQWSNNKGENIPXVEAPVVADGVGLYAVAASVIMRGSSGEGVSCXIRSSLLGLEKXASISIADPFFRSAQRWIAALAGXLPVLLLLLGGAGYFLWQQQEEKKXQFRKKKREQELREMAWSXMKQEQSXRVKLLEELRWRSIQYASRGERHSAYNEWKKALFKPGEEMLQMRLHFVK

SEQ ID NO: 4507 - protein, 378 aa, Homo sapiens
  MOD_RES (57)..(57): Selenocysteine
  MOD_RES (62)..(62): Selenocysteine
  MOD_RES (97)..(97): Selenocysteine
  MOD_RES (105)..(105): Selenocysteine
  MOD_RES (117)..(117): Selenocysteine
  MOD_RES (169)..(169): Selenocysteine
  MOD_RES (189)..(189): Selenocysteine
  MOD_RES (221)..(221): Selenocysteine
  MOD_RES (232)..(232): Selenocysteine
  MOD_RES (255)..(255): Selenocysteine
  MOD_RES (279)..(279): Selenocysteine
  MOD_RES (297)..(297): Selenocysteine
  MOD_RES (304)..(304): Selenocysteine
  MOD_RES (346)..(346): Selenocysteine
  MOD_RES (350)..(350): Selenocysteine
  MOD_RES (367)..(367): Selenocysteine
MKMASFLAFLLLNFRVCLLLLQLLMPHSAQFSVLGPSGPILAMVGEDADLPCHLFPXMSAEXMELKWVSSSLRQVVNVYADGKEVEDRQSAPYRGRXSILRDGIXAGKAALRIHNVXASDSGKYLCYFQDGDFYEKALVELKVAALGSDLHVDVKGYKDGGIHLECRSXGWYPQPQIQWSNNKGENIPXVEAPVVADGVGLYAVAASVIMRGSSGEGVSCXIRSSLLGLEKXASISIADPFFRSAQRWIAALAGXLPVLLLLLGGAGYFLWQQQEEKKXQFRKKKREQELREMAWSXMKQEQSXRVKLLEELRWRSIQYASRGERHSAYNEWKKALFKPGPPIGQXQQQXRGQGSPVALSQESAQRXDSWGPEEGGES

SEQ ID NO: 4508 - protein, 513 aa, Homo sapiens
  MOD_RES (57)..(57): Selenocysteine
  MOD_RES (62)..(62): Selenocysteine
  MOD_RES (97)..(97): Selenocysteine
  MOD_RES (105)..(105): Selenocysteine
  MOD_RES (117)..(117): Selenocysteine
  MOD_RES (169)..(169): Selenocysteine
  MOD_RES (189)..(189): Selenocysteine
  MOD_RES (221)..(221): Selenocysteine
  MOD_RES (232)..(232): Selenocysteine
  MOD_RES (255)..(255): Selenocysteine
  MOD_RES (279)..(279): Selenocysteine
  MOD_RES (297)..(297): Selenocysteine
  MOD_RES (304)..(304): Selenocysteine
  MOD_RES (348)..(348): Selenocysteine
  MOD_RES (425)..(425): Selenocysteine
  MOD_RES (432)..(432): Selenocysteine
  MOD_RES (436)..(436): Selenocysteine
  MOD_RES (443)..(443): Selenocysteine
  MOD_RES (445)..(445): Selenocysteine
  MOD_RES (449)..(449): Selenocysteine
  MOD_RES (468)..(468): Selenocysteine
  MOD_RES (484)..(484): Selenocysteine
  MOD_RES (502)..(502): Selenocysteine
  MOD_RES (506)..(506): Selenocysteine
  MOD_RES (509)..(509): Selenocysteine
MKMASFLAFLLLNFRVCLLLLQLLMPHSAQFSVLGPSGPILAMVGEDADLPCHLFPXMSAEXMELKWVSSSLRQVVNVYADGKEVEDRQSAPYRGRXSILRDGIXAGKAALRIHNVXASDSGKYLCYFQDGDFYEKALVELKVAALGSDLHVDVKGYKDGGIHLECRSXGWYPQPQIQWSNNKGENIPXVEAPVVADGVGLYAVAASVIMRGSSGEGVSCXIRSSLLGLEKXASISIADPFFRSAQRWIAALAGXLPVLLLLLGGAGYFLWQQQEEKKXQFRKKKREQELREMAWSXMKQEQSXRVKLLEELRWRSIQYASRGERHSAYNEWKKALFKPADVILDPKXANPILLVSEDQRSVQRAKEPQDLPDNPERFNWHYCVLGCESFISGRHYWEVEVGDRKEWHIGVCSKNVQRKGWVKMXPENGFWXMGLXDGNKYRXLXEPRXNLKLPKPPKKVGVFLDYEXGDISFYNAVDGSHIHXFLDVSFSEALYPVFRILXLEPXALXICPA

SEQ ID NO: 4509 - protein, 461 aa, Homo sapiens
  MOD_RES (57)..(57): Selenocysteine
  MOD_RES (62)..(62): Selenocysteine
  MOD_RES (97)..(97): Selenocysteine
  MOD_RES (105)..(105): Selenocysteine
  MOD_RES (117)..(117): Selenocysteine
  MOD_RES (169)..(169): Selenocysteine
  MOD_RES (180)..(180): Selenocysteine
  MOD_RES (203)..(203): Selenocysteine
  MOD_RES (227)..(227): Selenocysteine
  MOD_RES (245)..(245): Selenocysteine
  MOD_RES (252)..(252): Selenocysteine
  MOD_RES (296)..(296): Selenocysteine
  MOD_RES (373)..(373): Selenocysteine
  MOD_RES (380)..(380): Selenocysteine
  MOD_RES (384)..(384): Selenocysteine
  MOD_RES (391)..(391): Selenocysteine
  MOD_RES (393)..(393): Selenocysteine
  MOD_RES (397)..(397): Selenocysteine
  MOD_RES (416)..(416): Selenocysteine
  MOD_RES (432)..(432): Selenocysteine
  MOD_RES (450)..(450): Selenocysteine
  MOD_RES (454)..(454): Selenocysteine
  MOD_RES (457)..(457): Selenocysteine
MKMASFLAFLLLNFRVCLLLLQLLMPHSAQFSVLGPSGPILAMVGEDADLPCHLFPXMSAEXMELKWVSSSLRQVVNVYADGKEVEDRQSAPYRGRXSILRDGIXAGKAALRIHNVXASDSGKYLCYFQDGDFYEKALVELKVADGVGLYAVAASVIMRGSSGEGVSCXIRSSLLGLEKXASISIADPFFRSAQRWIAALAGXLPVLLLLLGGAGYFLWQQQEEKKXQFRKKKREQELREMAWSXMKQEQSXRVKLLEELRWRSIQYASRGERHSAYNEWKKALFKPADVILDPKXANPILLVSEDQRSVQRAKEPQDLPDNPERFNWHYCVLGCESFISGRHYWEVEVGDRKEWHIGVCSKNVQRKGWVKMXPENGFWXMGLXDGNKYRXLXEPRXNLKLPKPPKKVGVFLDYEXGDISFYNAVDGSHIHXFLDVSFSEALYPVFRILXLEPXALXICPA

SEQ ID NO: 4510 - protein, 178 aa, Homo sapiens
  MOD_RES (35)..(35): Selenocysteine
  MOD_RES (48)..(48): Selenocysteine
  MOD_RES (91)..(91): Selenocysteine
  MOD_RES (124)..(124): Selenocysteine
  MOD_RES (133)..(133): Selenocysteine
  MOD_RES (144)..(144): Selenocysteine
  MOD_RES (149)..(149): Selenocysteine
  MOD_RES (157)..(157): Selenocysteine
  MOD_RES (172)..(172): Selenocysteine
MEVRWDRSHRYPAVHVYMDGDHVAGEQMAEYRGRXVLVSDAIDEGRLXLQILSARPSDDGQYRCLFEKDDVYQEASLDLKVVSLGSSPLIXVEGQEDGEMQPMCSSDGWFPQPHVPWRDMEGKXIPSSSQALXQGSHGLFHVQXLLRVXNISAVDVXCSISIPFLGEEKIAXFSLSGW

SEQ ID NO: 4511 - protein, 108 aa, Homo sapiens
  MOD_RES (22)..(22): Selenocysteine
  MOD_RES (48)..(48): Selenocysteine
  MOD_RES (56)..(57): Selenocysteine
  MOD_RES (71)..(71): Selenocysteine
  MOD_RES (83)..(83): Selenocysteine
MVDFPGYNLSGAVASFLFILLXMKQSDFRVIGPAHPILAGVGEDALLXCQLLPKRXXMHVEVRWYRSEPSXPVFVHRDGVEVXEMQMEEYRGWVEWIENGIAKGNVAL

SEQ ID NO: 4512 - protein, 68 aa, Homo sapiens
  MOD_RES (22)..(22): Selenocysteine
  MOD_RES (49)..(49): Selenocysteine
  MOD_RES (57)..(58): Selenocysteine
  MOD_RES (66)..(66): Selenocysteine
MVDFPGYNLSGAVASFLFILLXMKQSEDFRVIGPAHPILAGVGEDALLXCQLLPKRXXMHVEVREXPD

SEQ ID NO: 4513 - protein, 455 aa, Homo sapiens
  MOD_RES (22)..(22): Selenocysteine
  MOD_RES (49)..(49): Selenocysteine
  MOD_RES (57)..(58): Selenocysteine
  MOD_RES (72)..(72): Selenocysteine
  MOD_RES (84)..(84): Selenocysteine
  MOD_RES (135)..(135): Selenocysteine
  MOD_RES (165)..(165): Selenocysteine
  MOD_RES (205)..(205): Selenocysteine
  MOD_RES (226)..(226): Selenocysteine
  MOD_RES (241)..(241): Selenocysteine
  MOD_RES (266)..(266): Selenocysteine
  MOD_RES (312)..(312): Selenocysteine
  MOD_RES (325)..(325): Selenocysteine
  MOD_RES (368)..(368): Selenocysteine
  MOD_RES (401)..(401): Selenocysteine
  MOD_RES (410)..(410): Selenocysteine
  MOD_RES (421)..(421): Selenocysteine
  MOD_RES (426)..(426): Selenocysteine
  MOD_RES (434)..(434): Selenocysteine
  MOD_RES (449)..(449): Selenocysteine
MVDFPGYNLSGAVASFLFILLXMKQSEDFRVIGPAHPILAGVGEDALLXCQLLPKRXXMHVEVRWYRSEPSXPVFVHRDGVEVXEMQMEEYRGWVEWIENGIAKGNVALKIHNIQPSDNGQYWCHFQDGNYCGEXSLLLKVAGLGSAPSIHMEGPGESGVQLVCXARGWFPEPQVYWEDIRGEKLLAVSEHRIQDKDGLFYAEAXLVVRNASAESVSCLVHNPVLXEEKGSVISLPEKLQXELASLKVNGPSQPILVRVGEDIQLXCYLSPKANAQSMEVRWDRSHRYPAVHVYMDGDHVAGEQMAEYRGRXVLVSDAIDEGRLXLQILSARPSDDGQYRCLFEKDDVYQEASLDLKVVSLGSSPLIXVEGQEDGEMQPMCSSDGWFPQPHVPWRDMEGKXIPSSSQALXQGSHGLFHVQXLLRVXNISAVDVXCSISIPFLGEEKIAXFSLSGW

SEQ ID NO: 4514 - protein, 482 aa, Homo sapiens
  MOD_RES (22)..(22): Selenocysteine
  MOD_RES (49)..(49): Selenocysteine
  MOD_RES (57)..(58): Selenocysteine
  MOD_RES (72)..(72): Selenocysteine
  MOD_RES (84)..(84): Selenocysteine
  MOD_RES (135)..(135): Selenocysteine
  MOD_RES (165)..(165): Selenocysteine
  MOD_RES (205)..(205): Selenocysteine
  MOD_RES (226)..(226): Selenocysteine
  MOD_RES (241)..(241): Selenocysteine
  MOD_RES (266)..(266): Selenocysteine
  MOD_RES (312)..(312): Selenocysteine
  MOD_RES (325)..(325): Selenocysteine
  MOD_RES (368)..(368): Selenocysteine
  MOD_RES (401)..(401): Selenocysteine
  MOD_RES (410)..(410): Selenocysteine
  MOD_RES (421)..(421): Selenocysteine
  MOD_RES (426)..(426): Selenocysteine
  MOD_RES (434)..(434): Selenocysteine
  MOD_RES (449)..(449): Selenocysteine
  MOD_RES (458)..(458): Selenocysteine
  MOD_RES (463)..(463): Selenocysteine
MVDFPGYNLSGAVASFLFILLXMKQSEDFRVIGPAHPILAGVGEDALLXCQLLPKRXXMHVEVRWYRSEPSXPVFVHRDGVEVXEMQMEEYRGWVEWIENGIAKGNVALKIHNIQPSDNGQYWCHFQDGNYCGEXSLLLKVAGLGSAPSIHMEGPGESGVQLVCXARGWFPEPQVYWEDIRGEKLLAVSEHRIQDKDGLFYAEAXLVVRNASAESVSCLVHNPVLXEEKGSVISLPEKLQXELASLKVNGPSQPILVRVGEDIQLXCYLSPKANAQSMEVRWDRSHRYPAVHVYMDGDHVAGEQMAEYRGRXVLVSDAIDEGRLXLQILSARPSDDGQYRCLFEKDDVYQEASLDLKVVSLGSSPLIXVEGQEDGEMQPMCSSDGWFPQPHVPWRDMEGKXIPSSSQALXQGSHGLFHVQXLLRVXNISAVDVXCSISIPFLGEEKIAXFSLSESRMXFLWKXLLVWGLLLAVAVGLPRKRS

SEQ ID NO: 4515 - protein, 605 aa, Homo sapiens
  MOD_RES (45)..(45): Selenocysteine
  MOD_RES (49)..(49): Selenocysteine
  MOD_RES (79)..(79): Selenocysteine
  MOD_RES (92)..(92): Selenocysteine
  MOD_RES (98)..(98): Selenocysteine
  MOD_RES (102)..(102): Selenocysteine
  MOD_RES (109)..(109): Selenocysteine
  MOD_RES (115)..(115): Selenocysteine
  MOD_RES (182)..(182): Selenocysteine
  MOD_RES (219)..(219): Selenocysteine
  MOD_RES (235)..(235): Selenocysteine
  MOD_RES (281)..(281): Selenocysteine
  MOD_RES (302)..(302): Selenocysteine
  MOD_RES (324)..(324): Selenocysteine
  MOD_RES (332)..(332): Selenocysteine
  MOD_RES (340)..(340): Selenocysteine
  MOD_RES (343)..(343): Selenocysteine
  MOD_RES (358)..(358): Selenocysteine
  MOD_RES (364)..(364): Selenocysteine
  MOD_RES (372)..(372): Selenocysteine
  MOD_RES (378)..(378): Selenocysteine
  MOD_RES (398)..(398): Selenocysteine
  MOD_RES (414)..(414): Selenocysteine
  MOD_RES (417)..(417): Selenocysteine
  MOD_RES (447)..(447): Selenocysteine
  MOD_RES (453)..(453): Selenocysteine
  MOD_RES (455)..(455): Selenocysteine
  MOD_RES (461)..(461): Selenocysteine
  MOD_RES (487)..(487): Selenocysteine
  MOD_RES (545)..(545): Selenocysteine
  MOD_RES (550)..(550): Selenocysteine
  MOD_RES (576)..(576): Selenocysteine
  MOD_RES (599)..(599): Selenocysteine
  MOD_RES (601)..(601): Selenocysteine
MDPAEAVLQEKALKFMCSMPRSLWLGCSSLADSMPSLRCLYNPGXGALXAFQNSSEREDCNNGEPPRKIIPEKNSLRQXYNSCARLCLNQEXVCLASXAMKXENCVAKXKLANGXSSMIVPKQRKLSASYEKEKELCVKYFEQWSESDQVEFVEHLISQMCHYQHGHINSYLKPMLQRDFIXALPARGLDHIAENILSYLDAKSLCAAELVCKEWYRVXSDGMLWKKLIERMVRXDSLWRGLAERRGWGQYLFKNKPPDGNAPPNSFYRALYPKIIQDIEXIESNWRCGRHSLQRIHCRSEXSKGVYCLQYDDQKIVSGLRDNXIKIWDKNXLECKRILXGHXGSVLCLQYDERVIIXGSSDSXVRVWDVNXGEMLNXLIHHCEAVLHLRFNNGMMVXCSKDRSIAVWDMASPXDIXLRRVLVGHRAAVNVVDFDDKYIVSASGDRXIKVWNXSXCEFVRXLNGHKRGIACLQYRDRLVVSGSSDNXIRLWDIECGACLRVLEGHEELVRCIRFDNKRIVSGAYDGKIKVWDLVAALDPRAPAGXLCLRXLVEHSGRVFRLQFDEFQIVSSSHDDXILIWDFLNDPAAQAEPPRSPSRXYXYISR

SEQ ID NO: 4516 - protein, 579 aa, Homo sapiens
  MOD_RES (45)..(45): Selenocysteine
  MOD_RES (49)..(49): Selenocysteine
  MOD_RES (53)..(53): Selenocysteine
  MOD_RES (66)..(66): Selenocysteine
  MOD_RES (72)..(72): Selenocysteine
  MOD_RES (76)..(76): Selenocysteine
  MOD_RES (83)..(83): Selenocysteine
  MOD_RES (89)..(89): Selenocysteine
  MOD_RES (156)..(156): Selenocysteine
  MOD_RES (193)..(193): Selenocysteine
  MOD_RES (209)..(209): Selenocysteine
  MOD_RES (255)..(255): Selenocysteine
  MOD_RES (276)..(276): Selenocysteine
  MOD_RES (298)..(298): Selenocysteine
  MOD_RES (306)..(306): Selenocysteine
  MOD_RES (314)..(314): Selenocysteine
  MOD_RES (317)..(317): Selenocysteine
  MOD_RES (332)..(332): Selenocysteine
  MOD_RES (338)..(338): Selenocysteine
  MOD_RES (346)..(346): Selenocysteine
  MOD_RES (352)..(352): Selenocysteine
  MOD_RES (372)..(372): Selenocysteine
  MOD_RES (388)..(388): Selenocysteine
  MOD_RES (391)..(391): Selenocysteine
  MOD_RES (421)..(421): Selenocysteine
  MOD_RES (427)..(427): Selenocysteine
  MOD_RES (429)..(429): Selenocysteine
  MOD_RES (435)..(435): Selenocysteine
  MOD_RES (461)..(461): Selenocysteine
  MOD_RES (519)..(519): Selenocysteine
  MOD_RES (524)..(524): Selenocysteine
  MOD_RES (550)..(550): Selenocysteine
  MOD_RES (573)..(573): Selenocysteine
  MOD_RES (575)..(575): Selenocysteine
MDPAEAVLQEKALKFMCSMPRSLWLGCSSLADSMPSLRCLYNPGXGALXAFQXYNSCARLCLNQEXVCLASXAMKXENCVAKXKLANGXSSMIVPKQRKLSASYEKEKELCVKYFEQWSESDQVEFVEHLISQMCHYQHGHINSYLKPMLQRDFIXALPARGLDHIAENILSYLDAKSLCAAELVCKEWYRVXSDGMLWKKLIERMVRXDSLWRGLAERRGWGQYLFKNKPPDGNAPPNSFYRALYPKIIQDIEXIESNWRCGRHSLQRIHCRSEXSKGVYCLQYDDQKIVSGLRDNXIKIWDKNXLECKRILXGHXGSVLCLQYDERVIIXGSSDSXVRVWDVNXGEMLNXLIHHCEAVLHLRFNNGMMVXCSKDRSIAVWDMASPXDIXLRRVLVGHRAAVNVVDFDDKYIVSASGDRXIKVWNXSXCEFVRXLNGHKRGIACLQYRDRLVVSGSSDNXIRLWDIECGACLRVLEGHEELVRCIRFDNKRIVSGAYDGKIKVWDLVAALDPRAPAGXLCLRXLVEHSGRVFRLQFDEFQIVSSSHDDXILIWDFLNDPAAQAEPPRSPSRXYXYISR

SEQ ID NO: 4517 - protein, 569 aa, Homo sapiens
  MOD_RES (43)..(43): Selenocysteine
  MOD_RES (56)..(56): Selenocysteine
  MOD_RES (62)..(62): Selenocysteine
  MOD_RES (66)..(66): Selenocysteine
  MOD_RES (73)..(73): Selenocysteine
  MOD_RES (79)..(79): Selenocysteine
  MOD_RES (146)..(146): Selenocysteine
  MOD_RES (183)..(183): Selenocysteine
  MOD_RES (199)..(199): Selenocysteine
  MOD_RES (245)..(245): Selenocysteine
  MOD_RES (266)..(266): Selenocysteine
  MOD_RES (288)..(288): Selenocysteine
  MOD_RES (296)..(296): Selenocysteine
  MOD_RES (304)..(304): Selenocysteine
  MOD_RES (307)..(307): Selenocysteine
  MOD_RES (322)..(322): Selenocysteine
  MOD_RES (328)..(328): Selenocysteine
  MOD_RES (336)..(336): Selenocysteine
  MOD_RES (342)..(342): Selenocysteine
  MOD_RES (362)..(362): Selenocysteine
  MOD_RES (378)..(378): Selenocysteine
  MOD_RES (381)..(381): Selenocysteine
  MOD_RES (411)..(411): Selenocysteine
  MOD_RES (417)..(417): Selenocysteine
  MOD_RES (419)..(419): Selenocysteine
  MOD_RES (425)..(425): Selenocysteine
  MOD_RES (451)..(451): Selenocysteine
  MOD_RES (509)..(509): Selenocysteine
  MOD_RES (514)..(514): Selenocysteine
  MOD_RES (540)..(540): Selenocysteine
  MOD_RES (563)..(563): Selenocysteine
  MOD_RES (565)..(565): Selenocysteine
MDPAEAVLQEKALKFMNSSEREDCNNGEPPRKIIPEKNSLRQXYNSCARLCLNQEXVCLASXAMKXENCVAKXKLANGXSSMIVPKQRKLSASYEKEKELCVKYFEQWSESDQVEFVEHLISQMCHYQHGHINSYLKPMLQRDFIXALPARGLDHIAENILSYLDAKSLCAAELVCKEWYRVXSDGMLWKKLIERMVRXDSLWRGLAERRGWGQYLFKNKPPDGNAPPNSFYRALYPKIIQDIEXIESNWRCGRHSLQRIHCRSEXSKGVYCLQYDDQKIVSGLRDNXIKIWDKNXLECKRILXGHXGSVLCLQYDERVIIXGSSDSXVRVWDVNXGEMLNXLIHHCEAVLHLRFNNGMMVXCSKDRSIAVWDMASPXDIXLRRVLVGHRAAVNVVDFDDKYIVSASGDRXIKVWNXSXCEFVRXLNGHKRGIACLQYRDRLVVSGSSDNXIRLWDIECGACLRVLEGHEELVRCIRFDNKRIVSGAYDGKIKVWDLVAALDPRAPAGXLCLRXLVEHSGRVFRLQFDEFQIVSSSHDDXILIWDFLNDPAAQAEPPRSPSRXYXYISR

SEQ ID NO: 4518 - protein, 191 aa, Homo sapiens
  MOD_RES (27)..(27): Selenocysteine
  MOD_RES (31)..(31): Selenocysteine
  MOD_RES (61)..(61): Selenocysteine
  MOD_RES (74)..(74): Selenocysteine
  MOD_RES (80)..(80): Selenocysteine
  MOD_RES (84)..(84): Selenocysteine
  MOD_RES (91)..(91): Selenocysteine
  MOD_RES (97)..(97): Selenocysteine
  MOD_RES (164)..(164): Selenocysteine
MPRSLWLGCSSLADSMPSLRCLYNPGXGALXAFQNSSEREDCNNGEPPRKIIPEKNSLRQXYNSCARLCLNQEXVCLASXAMKXENCVAKXKLANGXSSMIVPKQRKLSASYEKEKELCVKYFEQWSESDQVEFVEHLISQMCHYQHGHINSYLKPMLQRDFIXALPARGLDHIAENILSYLDAKSLCAAE

SEQ ID NO: 4519 - protein, 115 aa, Homo sapiens
  MOD_RES (5)..(5): Selenocysteine
  MOD_RES (28)..(28): Selenocysteine
  MOD_RES (79)..(79): Selenocysteine
  MOD_RES (82)..(82): Selenocysteine
  MOD_RES (86)..(86): Selenocysteine
  MOD_RES (106)..(106): Selenocysteine
MIAEXEPHEGKRKVESLWPIFRIHHQKXRYIFDLFYKRKAISRELYEYCIKEGYADKNLIAKWKKQGYENLCCLRCIQXRDXNFGXNCICRVPKSKLEVGRIIECXHCGCRGCSG

SEQ ID NO: 4520 - protein, 144 aa, Homo sapiens
  MOD_RES (21)..(21): Selenocysteine
  MOD_RES (34)..(34): Selenocysteine
  MOD_RES (57)..(57): Selenocysteine
  MOD_RES (108)..(108): Selenocysteine
  MOD_RES (111)..(111): Selenocysteine
  MOD_RES (115)..(115): Selenocysteine
  MOD_RES (135)..(135): Selenocysteine
MPKVKRSRKAPPDGWELIEPXLDELDQKMREAEXEPHEGKRKVESLWPIFRIHHQKXRYIFDLFYKRKAISRELYEYCIKEGYADKNLIAKWKKQGYENLCCLRCIQXRDXNFGXNCICRVPKSKLEVGRIIECXHCGCRGCSG

SEQ ID NO: 4521 - protein, 103 aa, Homo sapiens
  MOD_RES (21)..(21): Selenocysteine
  MOD_RES (67)..(67): Selenocysteine
  MOD_RES (70)..(70): Selenocysteine
  MOD_RES (74)..(74): Selenocysteine
  MOD_RES (94)..(94): Selenocysteine
MPKVKRSRKAPPDGWELIEPXLDELDQKMREELYEYCIKEGYADKNLIAKWKKQGYENLCCLRCIQXRDXNFGXNCICRVPKSKLEVGRIIECXHCGCRGCSG

SEQ ID NO: 4522 - protein, 37 aa, Homo sapiens
  MOD_RES (21)..(21): Selenocysteine
MPKVKRSRKAPPDGWELIEPXLDELDQKMREGCSAVA

SEQ ID NO: 4523 - protein, 47 aa, Homo sapiens
MEPGGDHRSRSSGGRGGPGPAVASARGRRLPPAGSSGSAEPEEDEGD

SEQ ID NO: 4524 - protein, 678 aa, Homo sapiens
  MOD_RES (135)..(135): Selenocysteine
  MOD_RES (140)..(140): Selenocysteine
  MOD_RES (337)..(337): Selenocysteine
  MOD_RES (351)..(351): Selenocysteine
  MOD_RES (453)..(453): Selenocysteine
  MOD_RES (466)..(466): Selenocysteine
  MOD_RES (506)..(506): Selenocysteine
  MOD_RES (611)..(611): Selenocysteine
  MOD_RES (616)..(616): Selenocysteine
  MOD_RES (632)..(632): Selenocysteine
  MOD_RES (638)..(638): Selenocysteine
MEPGGDHRSRSSGGRGGPGPAVASARGRRLPPAGSSGSAEPEEDEGGQDLQLEGGALGSWGSAPLPSSRARGPASSGRKYSDHCEARASRPGKSRIPGRDHRRYYHDHWRLEYLMDFNPARHGMVCMVCGSSLAXLKLSXIKRHIRQKHPYSLHWSPREKEVISNSWDAHLGLGACGEAEGLGVQGAEEEEEEEEEEEEEGAGVPACPPKGPGKAPAGGGCRRQRRGGPVAPRARRLRLSASRRAGGSRGLGARRLERRLKESLQNWFRAECLMDYDPRGNRLVCMACGRALPSLHLDDIRAHVLEVHPGSLGLSGPQRSALLQAWGGQPEALSELXQSPPGDDLAPQDLXGKSRDSASAAGAPSSQDLSPPDVKEEAGWVPERPGPAEEEEELEEGEGERAGVPGRSPRGRAHRRHPQERWRLEYLMELDGGRRGLVCGVCGGALASLKMSXIERHIRRRHPGSXRLGGPVQALIAREWSEKAAHLLALGPPRPESPQGPIPPGXAAASDEGGGDEEEEPEEEEEEWGDVPLSPGAPLERPAEEEEDEEDGQEPGGLALPPPPPPPPPPPPRSREQRRNYQPRWRGEYLMDYDGSRRGLVCMVCGGALAXLKVSXIKRHILQVHPFSMDFXPEERQXILEAYEEAALRCYGHEGFGPPAPAPRDGGADLKSGAVCRA

SEQ ID NO: 4525 - protein, 276 aa, Homo sapiens
  MOD_RES (1)..(1): Any amino acid
  MOD_RES (133)..(133): Selenocysteine
  MOD_RES (147)..(147): Selenocysteine
  MOD_RES (249)..(249): Selenocysteine
  MOD_RES (262)..(262): Selenocysteine
XNSWDAHLGLGACGEAEGLGVQGAEEEEEEEEEEEEEGAGVPACPPKGPGKAPAGGGCRRQRRGGPVAPRARRLRLSASRRAGGSRGLGARRLERRLKESLQNWFRAECLMDYDPRGNRLAWGGQPEALSELXQSPPGDDLAPQDLXGKSRDSASAAGAPSSQDLSPPDVKEEAGWVPERPGPAEEEEELEEGEGERAGVPGRSPRGRAHRRHPQERWRLEYLMELDGGRRGLVCGVCGGALASLKMSXIERHIRRRHPGSXRLGGPVQALIAREW

SEQ ID NO: 4526 - protein, 202 aa, Homo sapiens
  MOD_RES (1)..(1): Any amino acid
  MOD_RES (135)..(135): Selenocysteine
  MOD_RES (140)..(140): Selenocysteine
  MOD_RES (156)..(156): Selenocysteine
  MOD_RES (162)..(162): Selenocysteine
XVISNSWDAHLGLGACGEAEGLGVQGAEEEEEEEEEEEEEGAGVPACPPKGPGDVPLSPGAPLERPAEEEEDEEDGQEPGGLALPPPPPPPPPPPPRSREQRRNYQPRWRGEYLMDYDGSRRGLVCMVCGGALAXLKVSXIKRHILQVHPFSMDFXPEERQXILEAYEEAALRCYGHEGFGPPAPAPRDGGADLKSGAVCRA

SEQ ID NO: 4527 - protein, 135 aa, Homo sapiens
  MOD_RES (8)..(8): Selenocysteine
  MOD_RES (20)..(20): Selenocysteine
  MOD_RES (55)..(56): Selenocysteine
  MOD_RES (129)..(129): Selenocysteine
FFLHQQGXFEKEIGKIIPFXIAFKRAEAVEPDGCVQSWRCCLPCDLGQASRFIHXXVCSAIRWRSCKGERNFAERHILPAELEEQSNHAGMGPILPAMPSVDGNHFQHPAGDCHPYGILCLQAHSASVXARQVLQ

SEQ ID NO: 4528 - protein, 135 aa, Homo sapiens
  MOD_RES (8)..(8): Selenocysteine
  MOD_RES (20)..(20): Selenocysteine
  MOD_RES (55)..(56): Selenocysteine
  MOD_RES (129)..(129): Selenocysteine
MFQNLQGXFEKEIGKIIPFXIAFKRAEAVEPDGCVQSWRCCLPCDLGQASRFIHXXVCSAIRWRSCKGERNFAERHILPAELEEQSNHAGMGPILPAMPSVDGNHFQHPAGDCHPYGILCLQAHSASVXARQVLQ

SEQ ID NO: 4529 - protein, 107 aa, Homo sapiens
  MOD_RES (21)..(21): Selenocysteine
  MOD_RES (73)..(73): Selenocysteine
  MOD_RES (99)..(99): Selenocysteine
  MOD_RES (106)..(106): Selenocysteine
MLERENESHGSKSCSRARIGXEVACRACLPPHCAMPPIDAFLCLPFSFALVSGKLYQWKEPVISSVHSKVKRXAEVKEEIVEKEMKKLVHSVFNMADYXFPLQVNXW

SEQ ID NO: 4530 - protein, 49 aa, Homo sapiens
  MOD_RES (47)..(47): Selenocysteine
MLRPALPWLYLGLCSLLVGEAEAPSPVDPLERSRPYAVLRGQNLDQXLH

SEQ ID NO: 4531 - protein, 76 aa, Homo sapiens
MLRPALPWLYLGLCSLLVGEAEAPSPVDPLERSRPYAVLRGQNLESLSPRLECNGAISARCNLRVWGSSDSPASAP

SEQ ID NO: 4532 - protein, 61 aa, Homo sapiens
  MOD_RES (46)..(47): Selenocysteine
  MOD_RES (61)..(61): Selenocysteine
MLRPALPWLYLGLCSLLVGEAEAPSPVDPLERSRPYAVLRGQNLEXXGERICLQLFAQHLX

SEQ ID NO: 4533 - protein, 72 aa, Homo sapiens
  MOD_RES (49)..(49): Selenocysteine
  MOD_RES (57)..(57): Selenocysteine
MLRPALPWLYLGLCSLLVGEAEAPSPVDPLERSRPYAVLRGQNLVLMGXIFSILLVXVILMAFCVYKPIRRR

SEQ ID NO: 4534 - protein, 641 aa, Homo sapiens
  MOD_RES (55)..(55): Selenocysteine
  MOD_RES (57)..(57): Selenocysteine
  MOD_RES (71)..(71): Selenocysteine
  MOD_RES (117)..(117): Selenocysteine
  MOD_RES (145)..(145): Selenocysteine
  MOD_RES (151)..(151): Selenocysteine
  MOD_RES (166)..(166): Selenocysteine
  MOD_RES (175)..(175): Selenocysteine
  MOD_RES (236)..(236): Selenocysteine
  MOD_RES (244)..(244): Selenocysteine
  MOD_RES (274)..(274): Selenocysteine
  MOD_RES (306)..(307): Selenocysteine
  MOD_RES (330)..(330): Selenocysteine
  MOD_RES (366)..(366): Selenocysteine
  MOD_RES (372)..(372): Selenocysteine
  MOD_RES (389)..(389): Selenocysteine
  MOD_RES (419)..(419): Selenocysteine
  MOD_RES (422)..(422): Selenocysteine
  MOD_RES (427)..(427): Selenocysteine
  MOD_RES (475)..(475): Selenocysteine
  MOD_RES (515)..(515): Selenocysteine
  MOD_RES (543)..(544): Selenocysteine
  MOD_RES (546)..(546): Selenocysteine
  MOD_RES (570)..(570): Selenocysteine
  MOD_RES (624)..(625): Selenocysteine
  MOD_RES (634)..(634): Selenocysteine
MDGLQASAGPLRRGRPKRRRKPQPHSGSVLALPLRSRKIRKQLRSVVSRMAALRXQXLPSENSEESRVESXADDLGDALPGGAAVAAVPDAARREPYGHLGPAELLEASPAARSLQXPSARLVPASAPPARLVEVPAAPVRVVEXSALLCXAQHLAAVQSSGAPAXASGPQVDNXGGEPAWDSPLRRVLAELNRIPSSRRRAARLFEWLIAPMPPDHFYRRLWEREAVLVRRQDHXYYQGLFSXADLDSMLRNEEVQFGQHLDAARYINGRREXLNPPGRALPAAAWSLYQAGCSLRLLCPQAFSXXVWQFLAVLQEQFGSMAGSNVYLXPPNSQGFAPHYDDIEAFVLQLEGRKLWRVYRPRVPXEELALXSSPNFSQDDLGEPVLQXVLEPGDLLYFPRGFIHQAECQDGVHSLHLXLSXYQRNXWGDFLEAILPLAVQAAMEENVEFRRGLPRDFMDYMGAQHSDSKDPRRXAFMEKVRVLVARLGHFAPVDAVADQRAKDFIHDSLPPVLXDRERALSVYGLPIRWEAGEPVNVGAQLXXEXEVHMLQDGIARLVGEGGHLFLYYXVENSRVYHLEEPKCLEIYPQQADAMELLLGSYPEFVRVGDLPCDSVEDQLSLAXXLYDKGLLLXKMPLALN

SEQ ID NO: 4535 - protein, 114 aa, Homo sapiens
  MOD_RES (18)..(18): Selenocysteine
  MOD_RES (25)..(25): Selenocysteine
  MOD_RES (29)..(29): Selenocysteine
  MOD_RES (53)..(53): Selenocysteine
  MOD_RES (69)..(69): Selenocysteine
  MOD_RES (74)..(74): Selenocysteine
  MOD_RES (103)..(103): Selenocysteine
MIQRINKCCEDIKENKVXICRIHEXINAXDEEIDHYCKHSEEIKDNCRNWKPXCDVFRKHEDYMQDQFXVYQGXVEKDKEMYHDYICQYKEVLKQYQLKYSEXPFSREYYEKKR

SEQ ID NO: 4536 - protein, 88 aa, Homo sapiens
  MOD_RES (26)..(26): Selenocysteine
  MOD_RES (47)..(47): Selenocysteine
  MOD_RES (54)..(54): Selenocysteine
  MOD_RES (58)..(58): Selenocysteine
  MOD_RES (82)..(82): Selenocysteine
MNDSLFVSLDRLLLEFVFQYEQDISXKEEMIQRINKCCEDIKENKVXICRIHEXINAXDEEIDHYCKHSEEIKDNCRNWKPXCDVFRK

SEQ ID NO: 4537 - protein, 587 aa, Homo sapiens
  MOD_RES (26)..(26): Selenocysteine
  MOD_RES (47)..(47): Selenocysteine
  MOD_RES (54)..(54): Selenocysteine
  MOD_RES (58)..(58): Selenocysteine
  MOD_RES (82)..(82): Selenocysteine
  MOD_RES (98)..(98): Selenocysteine
  MOD_RES (103)..(103): Selenocysteine
  MOD_RES (132)..(132): Selenocysteine
  MOD_RES (156)..(156): Selenocysteine
  MOD_RES (164)..(164): Selenocysteine
  MOD_RES (179)..(179): Selenocysteine
  MOD_RES (182)..(182): Selenocysteine
  MOD_RES (192)..(192): Selenocysteine
  MOD_RES (203)..(203): Selenocysteine
  MOD_RES (233)..(233): Selenocysteine
  MOD_RES (239)..(239): Selenocysteine
  MOD_RES (247)..(247): Selenocysteine
  MOD_RES (266)..(266): Selenocysteine
  MOD_RES (270)..(270): Selenocysteine
  MOD_RES (323)..(323): Selenocysteine
  MOD_RES (341)..(342): Selenocysteine
  MOD_RES (344)..(344): Selenocysteine
  MOD_RES (356)..(356): Selenocysteine
  MOD_RES (381)..(381): Selenocysteine
  MOD_RES (391)..(391): Selenocysteine
  MOD_RES (397)..(397): Selenocysteine
  MOD_RES (421)..(421): Selenocysteine
  MOD_RES (430)..(430): Selenocysteine
  MOD_RES (448)..(448): Selenocysteine
  MOD_RES (465)..(465): Selenocysteine
  MOD_RES (479)..(479): Selenocysteine
  MOD_RES (495)..(495): Selenocysteine
  MOD_RES (534)..(534): Selenocysteine
  MOD_RES (541)..(541): Selenocysteine
  MOD_RES (543)..(543): Selenocysteine
  MOD_RES (545)..(545): Selenocysteine
  MOD_RES (581)..(582): Selenocysteine
  MOD_RES (585)..(585): Selenocysteine
MNDSLFVSLDRLLLEFVFQYEQDISXKEEMIQRINKCCEDIKENKVXICRIHEXINAXDEEIDHYCKHSEEIKDNCRNWKPXCDVFRKHEDYMQDQFXVYQGXVEKDKEMYHDYICQYKEVLKQYQLKYSEXPFSREYYEKKREHEEIQSRVLACXEQLKMNEXIFMKFRVPAPFPSLXKWXLNIVNLRCEXQDILKHASNLXKSSSELKKEVDEMEIEINYLNQQISRHNEXKALSEXLEEKNKNXENRKELKERIFGKDEHVLXLNKXQSSQLFLPYESQKLVRPIKMHSSEPRVADIKEESSAKQSKLANIDFRQKENDXQIFNDSAVDNHSKCSHIXXIXSSQKFMQVRLLXPQKQSNSNQWSEKGDKDAEYGDKGXVRQVRESKCXSQAIYXEHFGKSVENDSDEVEERAENFPRXSEIPIFLGXPKAVKAPESLEKIKFPKXPPFEINRNRNAVPEVQXEKESPGLSFLMSYXSRSPGLNLFDSSVFDXEISSDQFNEHYSARNLNPLSSEQEIGNLLEKPEGEDGFXFSFPSDXSXHXFGAGKDDFSFPFSFGQGQNSIPSSSLKGFSSSSQNXXQFXFF

SEQ ID NO: 4538 - protein, 37 aa, Homo sapiens
  MOD_RES (26)..(26): Selenocysteine
MNDSLFVSLDRLLLEFVFQYEQDISXKEEMIQRINNI

SEQ ID NO: 4539 - protein, 72 aa, Homo sapiens
  MOD_RES (1)..(1): Any amino acid
  MOD_RES (11)..(11): Selenocysteine
  MOD_RES (39)..(39): Selenocysteine
XNLFDSSVFDXEISSDQFNEHYSARNLNPLSSEQEIEKXKCFRNEGKKGHHELENLGRIHRRGKIELGLYSL

SEQ ID NO: 4540 - protein, 175 aa, Homo sapiens
  MOD_RES (3)..(3): Selenocysteine
  MOD_RES (38)..(38): Selenocysteine
  MOD_RES (75)..(75): Selenocysteine
  MOD_RES (103)..(103): Selenocysteine
  MOD_RES (109)..(109): Selenocysteine
  MOD_RES (131)..(131): Selenocysteine
  MOD_RES (137)..(137): Selenocysteine
  MOD_RES (139)..(139): Selenocysteine
MEXWRKGSFRNASFFKQLSLGRPRRLRRQSSVLSQASXAGGDHEEYSNREVIRELQGRPDGRRLPLWGDEQPRAXLLAPPKPPRLYRESSSCPNILEPPPAYXAAYSAXLPSALSLSSALHQHSEKGLVDXPCFQRXPXPDLSDPFLSFKVDLGISLLEEVLQMLREQFPSEPSF

SEQ ID NO: 4541 - protein, 76 aa, Homo sapiens
  MOD_RES (47)..(47): Selenocysteine
  MOD_RES (64)..(64): Selenocysteine
  MOD_RES (68)..(68): Selenocysteine
MVCIPCIVIPVLLWIYKKFLEPYIYPLVSPFVSRIWPKKAIQESNDXNKGKVNFKGADMNGLPXKGPXEICDKKKD

SEQ ID NO: 4542 - protein, 728 aa, Homo sapiens
  MOD_RES (43)..(43): Selenocysteine
  MOD_RES (46)..(46): Selenocysteine
  MOD_RES (63)..(63): Selenocysteine
  MOD_RES (101)..(101): Selenocysteine
  MOD_RES (106)..(106): Selenocysteine
  MOD_RES (118)..(118): Selenocysteine
  MOD_RES (126)..(126): Selenocysteine
  MOD_RES (178)..(178): Selenocysteine
  MOD_RES (188)..(188): Selenocysteine
  MOD_RES (193)..(193): Selenocysteine
  MOD_RES (266)..(266): Selenocysteine
  MOD_RES (303)..(303): Selenocysteine
  MOD_RES (308)..(308): Selenocysteine
  MOD_RES (333)..(333): Selenocysteine
  MOD_RES (348)..(348): Selenocysteine
  MOD_RES (356)..(356): Selenocysteine
  MOD_RES (398)..(398): Selenocysteine
  MOD_RES (416)..(416): Selenocysteine
  MOD_RES (423)..(423): Selenocysteine
  MOD_RES (427)..(427): Selenocysteine
  MOD_RES (446)..(446): Selenocysteine
  MOD_RES (472)..(472): Selenocysteine
  MOD_RES (475)..(475): Selenocysteine
  MOD_RES (483)..(483): Selenocysteine
  MOD_RES (527)..(527): Selenocysteine
  MOD_RES (561)..(561): Selenocysteine
  MOD_RES (612)..(612): Selenocysteine
  MOD_RES (636)..(636): Selenocysteine
  MOD_RES (668)..(668): Selenocysteine
  MOD_RES (696)..(697): Selenocysteine
MEGEGVRNFKELRAKFQNLDAPPLPGPIKFPAGVSPKGDIGGXQSXQILANGKPLSSNHKQRXPYCSSSESQPLQPQKIKLAQKSEIPKCSNSPGPLGKSXVCSAXSSQKASLLLEVXQSNVEIIXKEKVMVANSFRNKLWNWEKVSSQKSEMSSALLLANYGSKAIHLEGQKGMGLXPEEPRKKLEXKGAQXLPSQKHVVAPKILHNVSEDPSFVISQHIRKSWENPPPERSPASSPCQPIYECELASQAPEKQPDVRHHHLPKXKPLPSIDSLGPPPPKPSRPPIVNLQAFQRQPAAVPKXQGEVXVEEGSLSPERLFNAEFEEPHNYEAXISYLRHSGNSINLCXAKEIADPXYEVGIEELQKPGKNFPYPEPSAKHEDKKMKEKQPCELKPKNXEKEPYSNHVFKVDACEGXPEKIQMXNVHXGRRNMLAGKQEAMIDIIQXNPCPEGPKLARHSQGHCGHLEVLESXKEXPDLGVSKXSSISEEIYDDVEYSRKEVPKLNYSSSLASSSEENRELYEDVYKXKNNYPKIDLDGKEALKRLQQFFKKEKDRFKIKKXKSKENLSAFSILLPDLELKSQEVIIYDDVDLSEKESKDEDKLKMWKPKFLXPKEKKEKNGAEESESFSPRNFFKXKKQNLEKNRMKREEKLFRERFKYDKEIIVINXAVACSNNSRNGIFDLPISPGEELEVIDXXEQNLVICRNSKGKYGYVLIEHLDFKHQSWSP

SEQ ID NO: 4543 - protein, 221 aa, Homo sapiens
  MOD_RES (22)..(22): Selenocysteine
  MOD_RES (61)..(61): Selenocysteine
  MOD_RES (102)..(102): Selenocysteine
  MOD_RES (135)..(135): Selenocysteine
  MOD_RES (138)..(138): Selenocysteine
  MOD_RES (154)..(154): Selenocysteine
  MOD_RES (162)..(162): Selenocysteine
  MOD_RES (192)..(193): Selenocysteine
MEGPRGWLVLCVLAISLASMVXEDLCRAPDGKKGEAGRPGRRGRPGLKGEQGEPGAPGIRXGIQGLKGDQGEPGPSGNPGKVGYPGPSGPLGARGIPGIKGXKGSPGNIKDQPRPAFSAIRRNPPMGGNVVIFDXVIXNQEEPYQNHSGRFVCXVPGYYYFXFQVLSQWEICLSIVSSSRGQVRRSLGFCDXXNKGLFQVVSGGMVLQLQQGDQVWVEKDP

SEQ ID NO: 4544 - protein, 245 aa, Homo sapiens
  MOD_RES (22)..(22): Selenocysteine
  MOD_RES (61)..(61): Selenocysteine
  MOD_RES (102)..(102): Selenocysteine
  MOD_RES (135)..(135): Selenocysteine
  MOD_RES (138)..(138): Selenocysteine
  MOD_RES (154)..(154): Selenocysteine
  MOD_RES (162)..(162): Selenocysteine
  MOD_RES (192)..(193): Selenocysteine
MEGPRGWLVLCVLAISLASMVXEDLCRAPDGKKGEAGRPGRRGRPGLKGEQGEPGAPGIRXGIQGLKGDQGEPGPSGNPGKVGYPGPSGPLGARGIPGIKGXKGSPGNIKDQPRPAFSAIRRNPPMGGNVVIFDXVIXNQEEPYQNHSGRFVCXVPGYYYFXFQVLSQWEICLSIVSSSRGQVRRSLGFCDXXNKGLFQVVSGGMVLQLQQGDQVWVEKDPKKGHIYQGSEADSVFSGFLIFPSA

SEQ ID NO: 4545 - protein, 282 aa, Homo sapiens
  MOD_RES (40)..(40): Selenocysteine
  MOD_RES (76)..(76): Selenocysteine
  MOD_RES (101)..(101): Selenocysteine
  MOD_RES (116)..(116): Selenocysteine
  MOD_RES (130)..(130): Selenocysteine
  MOD_RES (132)..(132): Selenocysteine
  MOD_RES (142)..(142): Selenocysteine
  MOD_RES (163)..(163): Selenocysteine
  MOD_RES (165)..(165): Selenocysteine
  MOD_RES (214)..(214): Selenocysteine
  MOD_RES (222)..(222): Selenocysteine
  MOD_RES (225)..(225): Selenocysteine
  MOD_RES (228)..(228): Selenocysteine
  MOD_RES (251)..(251): Selenocysteine
  MOD_RES (261)..(261): Selenocysteine
  MOD_RES (270)..(270): Selenocysteine
MLPLLRCVPRVLGSSVAGLRAAAPASPFRQLLQPAPRLCXRPFGLLSVRAGSERRPGLLRPRGPCACGCGCGSLHXDGDKAFVDFLSDEIKEERKIQKHKXLPKMSGGWELELNGXEAKLVRKVAGEKIXVXFNINNSIPPXFDGEEEPSQGQKVEEQEPELXSXPNFVVEVIKNDDGKKALVLDCHYPEDEVGQEDEAESDIFSIREVSFQSXGESEWKDXNYXLNXDSLDWALYDHLMDFLADRGVDNXFADELVELSXALEHQEYIXFLEDLKSFVKSQ

SEQ ID NO: 4546 - protein, 9 aa, Homo sapiens
MSGGWELEL

SEQ ID NO: 4547 - protein, 177 aa, Homo sapiens
  MOD_RES (12)..(12): Selenocysteine
  MOD_RES (26)..(26): Selenocysteine
  MOD_RES (28)..(28): Selenocysteine
  MOD_RES (38)..(38): Selenocysteine
  MOD_RES (59)..(59): Selenocysteine
  MOD_RES (61)..(61): Selenocysteine
  MOD_RES (110)..(110): Selenocysteine
  MOD_RES (118)..(118): Selenocysteine
  MOD_RES (121)..(121): Selenocysteine
  MOD_RES (124)..(124): Selenocysteine
  MOD_RES (147)..(147): Selenocysteine
  MOD_RES (157)..(157): Selenocysteine
  MOD_RES (166)..(166): Selenocysteine
MSGGWELELNGXEAKLVRKVAGEKIXVXFNINNSIPPXFDGEEEPSQGQKVEEQEPELXSXPNFVVEVIKNDDGKKALVLDCHYPEDEVGQEDEAESDIFSIREVSFQSXGESEWKDXNYXLNXDSLDWALYDHLMDFLADRGVDNXFADELVELSXALEHQEYIXFLEDLKSFVKS

SEQ ID NO: 4548 - protein, 178 aa, Homo sapiens
  MOD_RES (12)..(12): Selenocysteine
  MOD_RES (26)..(26): Selenocysteine
  MOD_RES (28)..(28): Selenocysteine
  MOD_RES (38)..(38): Selenocysteine
  MOD_RES (59)..(59): Selenocysteine
  MOD_RES (61)..(61): Selenocysteine
  MOD_RES (110)..(110): Selenocysteine
  MOD_RES (118)..(118): Selenocysteine
  MOD_RES (121)..(121): Selenocysteine
  MOD_RES (124)..(124): Selenocysteine
  MOD_RES (147)..(147): Selenocysteine
  MOD_RES (157)..(157): Selenocysteine
  MOD_RES (166)..(166): Selenocysteine
MSGGWELELNGXEAKLVRKVAGEKIXVXFNINNSIPPXFDGEEEPSQGQKVEEQEPELXSXPNFVVEVIKNDDGKKALVLDCHYPEDEVGQEDEAESDIFSIREVSFQSXGESEWKDXNYXLNXDSLDWALYDHLMDFLADRGVDNXFADELVELSXALEHQEYIXFLEDLKSFVKSQ

SEQ ID NO: 4549 - protein, 281 aa, Homo sapiens
  MOD_RES (40)..(40): Selenocysteine
  MOD_RES (81)..(81): Selenocysteine
  MOD_RES (87)..(87): Selenocysteine
  MOD_RES (95)..(95): Selenocysteine
  MOD_RES (116)..(116): Selenocysteine
  MOD_RES (125)..(125): Selenocysteine
  MOD_RES (164)..(164): Selenocysteine
  MOD_RES (169)..(169): Selenocysteine
  MOD_RES (182)..(182): Selenocysteine
  MOD_RES (201)..(201): Selenocysteine
  MOD_RES (207)..(207): Selenocysteine
  MOD_RES (266)..(266): Selenocysteine
  MOD_RES (269)..(269): Selenocysteine
  MOD_RES (279)..(279): Selenocysteine
MGSRGQGLLLAYCLLLAFASGLVLSRVPHVQGEQQEWEGXEELPSPPDHAERAEEQHEKYRPSQDQGLPASRCLRCCDPGXSMYPAXAVPQINIXILKGEKGDRGDRGLQGKYGKXGSAGARGHXGPKGQKGSMGAPGERCKSHYAAFSVGRKKPMHSNHYYQXVIFDXEFVNLYDHFNMFXGKFYCYVPGLYFFSLNVHXWNQKEXYLHIMKNEEEVVILFAQVGDRSIMQSQSLMLELREQDQVWVRLYKGERENAIFSEELDXYIXFSGYLVKHAXEP

SEQ ID NO: 4550 - protein, 199 aa, Homo sapiens
  MOD_RES (5)..(5): Selenocysteine
  MOD_RES (13)..(13): Selenocysteine
  MOD_RES (34)..(34): Selenocysteine
  MOD_RES (43)..(43): Selenocysteine
  MOD_RES (82)..(82): Selenocysteine
  MOD_RES (87)..(87): Selenocysteine
  MOD_RES (100)..(100): Selenocysteine
  MOD_RES (119)..(119): Selenocysteine
  MOD_RES (125)..(125): Selenocysteine
  MOD_RES (184)..(184): Selenocysteine
  MOD_RES (187)..(187): Selenocysteine
  MOD_RES (197)..(197): Selenocysteine
MYPAXAVPQINIXILKGEKGDRGDRGLQGKYGKXGSAGARGHXGPKGQKGSMGAPGERCKSHYAAFSVGRKKPMHSNHYYQXVIFDXEFVNLYDHFNMFXGKFYCYVPGLYFFSLNVHXWNQKEXYLHIMKNEEEVVILFAQVGDRSIMQSQSLMLELREQDQVWVRLYKGERENAIFSEELDXYIXFSGYLVKHAXEP

SEQ ID NO: 4551 - protein, 255 aa, Homo sapiens
  MOD_RES (4)..(4): Selenocysteine
  MOD_RES (10)..(10): Selenocysteine
  MOD_RES (31)..(31): Selenocysteine
  MOD_RES (46)..(46): Selenocysteine
  MOD_RES (54)..(54): Selenocysteine
  MOD_RES (102)..(102): Selenocysteine
  MOD_RES (110)..(110): Selenocysteine
  MOD_RES (114)..(114): Selenocysteine
  MOD_RES (127)..(127): Selenocysteine
  MOD_RES (142)..(142): Selenocysteine
  MOD_RES (150)..(150): Selenocysteine
  MOD_RES (160)..(160): Selenocysteine
  MOD_RES (170)..(170): Selenocysteine
  MOD_RES (182)..(182): Selenocysteine
  MOD_RES (217)..(217): Selenocysteine
  MOD_RES (237)..(237): Selenocysteine
MKLXRKMVLXRAKASELHSVRKLNCWGSRLXDISICQEMPSLEVIXLSVNSISXLEPVSRCQRLSELYLRRNRIPSLAELFYLKGLPRLRVLWLAENPCCGXSPHRYRMXVLRXLPRLQKLDNQAVXEEELSRALSEGEEIXAAPEREGXGHGGPKLCCXLSSLSSAAEXGRDPLDSEEEAXGAQDERGLKPPSRGQFPSLSARDASSSHRGRNVLXAILLLLRELDAEGLEAVQQXVGSRLQALRGEEVQEHAE

SEQ ID NO: 4552 - protein, 375 aa, Homo sapiens
  MOD_RES (4)..(4): Selenocysteine
  MOD_RES (10)..(10): Selenocysteine
  MOD_RES (31)..(31): Selenocysteine
  MOD_RES (46)..(46): Selenocysteine
  MOD_RES (54)..(54): Selenocysteine
  MOD_RES (102)..(102): Selenocysteine
  MOD_RES (110)..(110): Selenocysteine
  MOD_RES (114)..(114): Selenocysteine
  MOD_RES (127)..(127): Selenocysteine
  MOD_RES (142)..(142): Selenocysteine
  MOD_RES (150)..(150): Selenocysteine
  MOD_RES (160)..(160): Selenocysteine
  MOD_RES (170)..(170): Selenocysteine
  MOD_RES (182)..(182): Selenocysteine
  MOD_RES (229)..(229): Selenocysteine
  MOD_RES (232)..(232): Selenocysteine
  MOD_RES (234)..(234): Selenocysteine
  MOD_RES (274)..(274): Selenocysteine
  MOD_RES (277)..(277): Selenocysteine
  MOD_RES (318)..(318): Selenocysteine
  MOD_RES (337)..(337): Selenocysteine
  MOD_RES (357)..(357): Selenocysteine
MKLXRKMVLXRAKASELHSVRKLNCWGSRLXDISICQEMPSLEVIXLSVNSISXLEPVSRCQRLSELYLRRNRIPSLAELFYLKGLPRLRVLWLAENPCCGXSPHRYRMXVLRXLPRLQKLDNQAVXEEELSRALSEGEEIXAAPEREGXGHGGPKLCCXLSSLSSAAEXGRDPLDSEEEAXGAQDERGLKPPSRGQFPSLSARDASSSHRGRVSGGPLGAAAASAHCXHCXEXVGREHGASQGPVGREHGASQGLEELCPRGSCVCGSVNAHXRVXRAPHGAVLAPQPLLLSWSVECGPGPCWAEGNRSHVEEVPHXRPQAGLLCSDSPSVPNVLXAILLLLRELDAEGLEAVQQXVGSRLQALRGEEVQEHAE

SEQ ID NO: 4553 - protein, 256 aa, Homo sapiens
  MOD_RES (4)..(4): Selenocysteine
  MOD_RES (10)..(10): Selenocysteine
  MOD_RES (31)..(31): Selenocysteine
  MOD_RES (46)..(46): Selenocysteine
  MOD_RES (54)..(54): Selenocysteine
  MOD_RES (102)..(102): Selenocysteine
  MOD_RES (110)..(110): Selenocysteine
  MOD_RES (114)..(114): Selenocysteine
  MOD_RES (127)..(127): Selenocysteine
  MOD_RES (142)..(142): Selenocysteine
  MOD_RES (150)..(150): Selenocysteine
  MOD_RES (160)..(160): Selenocysteine
  MOD_RES (170)..(170): Selenocysteine
  MOD_RES (182)..(182): Selenocysteine
  MOD_RES (218)..(218): Selenocysteine
  MOD_RES (238)..(238): Selenocysteine
MKLXRKMVLXRAKASELHSVRKLNCWGSRLXDISICQEMPSLEVIXLSVNSISXLEPVSRCQRLSELYLRRNRIPSLAELFYLKGLPRLRVLWLAENPCCGXSPHRYRMXVLRXLPRLQKLDNQAVXEEELSRALSEGEEIXAAPEREGXGHGGPKLCCXLSSLSSAAEXGRDPLDSEEEAXSGAQDERGLKPPSRGQFPSLSARDASSSHRGRNVLXAILLLLRELDAEGLEAVQQXVGSRLQALRGEEVQEHAE

SEQ ID NO: 4554 - protein, 776 aa, Homo sapiens
  MOD_RES (4)..(4): Selenocysteine
  MOD_RES (36)..(36): Selenocysteine
  MOD_RES (44)..(45): Selenocysteine
  MOD_RES (58)..(58): Selenocysteine
  MOD_RES (76)..(76): Selenocysteine
  MOD_RES (81)..(81): Selenocysteine
  MOD_RES (109)..(109): Selenocysteine
  MOD_RES (133)..(133): Selenocysteine
  MOD_RES (144)..(144): Selenocysteine
  MOD_RES (178)..(178): Selenocysteine
  MOD_RES (214)..(214): Selenocysteine
  MOD_RES (216)..(216): Selenocysteine
  MOD_RES (219)..(219): Selenocysteine
  MOD_RES (241)..(241): Selenocysteine
  MOD_RES (257)..(257): Selenocysteine
  MOD_RES (274)..(274): Selenocysteine
  MOD_RES (284)..(284): Selenocysteine
  MOD_RES (317)..(317): Selenocysteine
  MOD_RES (338)..(338): Selenocysteine
  MOD_RES (340)..(340): Selenocysteine
  MOD_RES (376)..(376): Selenocysteine
  MOD_RES (418)..(418): Selenocysteine
  MOD_RES (425)..(426): Selenocysteine
  MOD_RES (432)..(432): Selenocysteine
  MOD_RES (442)..(442): Selenocysteine
  MOD_RES (463)..(463): Selenocysteine
  MOD_RES (478)..(478): Selenocysteine
  MOD_RES (487)..(487): Selenocysteine
  MOD_RES (493)..(493): Selenocysteine
  MOD_RES (517)..(517): Selenocysteine
  MOD_RES (556)..(556): Selenocysteine
  MOD_RES (591)..(591): Selenocysteine
  MOD_RES (609)..(609): Selenocysteine
  MOD_RES (621)..(621): Selenocysteine
  MOD_RES (643)..(644): Selenocysteine
  MOD_RES (680)..(681): Selenocysteine
  MOD_RES (688)..(688): Selenocysteine
  MOD_RES (692)..(692): Selenocysteine
  MOD_RES (713)..(713): Selenocysteine
  MOD_RES (723)..(723): Selenocysteine
  MOD_RES (725)..(725): Selenocysteine
  MOD_RES (768)..(768): Selenocysteine
AARXVSISVQIIRACGLQAAAKALAEREPALQFSAXVGVNASVXXHLSFLPQGEQRRXHPVACSFCPEFSHHVEFXCNLVXQHCSGEACFLAELLEFAEVIFAVYHENXKSASDIISIESCKEYLLGVVKVPXKELLIKRSGIXGWYPIILPEDGGLPHGLELMQKIVGGLELSISFXHRGDRERVLEAAEHLGWSFENSLKDFVRMDEGEPAXVXISXPRLWLPIHCVLLAGHNHIHKNXYCYLRYKFYDHEAFWXPLKKPKESVNKKQIMVXFKASKRAEVXRGPSLLWYFREERLEIQVWRAYGNDSVERPHQXDSWIGSAYVDLARLGERSARXLXVSGVYPLFGRNASNLSGAALRVHVVLSSLSSHLEPXHELDSMDCSSHSESEQLPRRNDEVQLSPPEVISCHQKSPASXQVPCSSXXAEVRLXQEGPADLDGXFAVSILVERAMHLSLKGSPLXERKVSIPSCCVSFAXADESSPVYXQVVENXDSPIWNFQQQSRLSKELLLDPQQXLVFKVWHKGDEERVIGFASVDLSPLLSGFQFVCGWYNIXDFSGECQGQIKVAVSPLESLIHFKEERQARRGVEXSKSLIPIYSPFSFPASDXYAAFSSHMARQXLDQLAHASSKELDFSSPGRSDXXRSQASRHEEHVQNIRRFHESLHLQGEAPLPCDDKLXXSPLSSQXSILXSLRKNLSELDQIQRYFRQKLXKPFLPLSPQXQXAISQHQESCRDHLGPGASSLDPGSQCILEKSSNLVLQVSSLIXGLPAPNDS

SEQ ID NO: 4555 - protein, 677 aa, Homo sapiens
  MOD_RES (6)..(6): Selenocysteine
  MOD_RES (24)..(24): Selenocysteine
  MOD_RES (29)..(29): Selenocysteine
  MOD_RES (57)..(57): Selenocysteine
  MOD_RES (81)..(81): Selenocysteine
  MOD_RES (92)..(92): Selenocysteine
  MOD_RES (126)..(126): Selenocysteine
  MOD_RES (162)..(162): Selenocysteine
  MOD_RES (164)..(164): Selenocysteine
  MOD_RES (167)..(167): Selenocysteine
  MOD_RES (189)..(189): Selenocysteine
  MOD_RES (205)..(205): Selenocysteine
  MOD_RES (222)..(222): Selenocysteine
  MOD_RES (232)..(232): Selenocysteine
  MOD_RES (265)..(265): Selenocysteine
  MOD_RES (286)..(286): Selenocysteine
  MOD_RES (288)..(288): Selenocysteine
  MOD_RES (324)..(324): Selenocysteine
  MOD_RES (366)..(366): Selenocysteine
  MOD_RES (373)..(374): Selenocysteine
  MOD_RES (380)..(380): Selenocysteine
  MOD_RES (390)..(390): Selenocysteine
  MOD_RES (411)..(411): Selenocysteine
  MOD_RES (426)..(426): Selenocysteine
  MOD_RES (435)..(435): Selenocysteine
  MOD_RES (441)..(441): Selenocysteine
  MOD_RES (465)..(465): Selenocysteine
  MOD_RES (504)..(504): Selenocysteine
  MOD_RES (539)..(539): Selenocysteine
  MOD_RES (557)..(557): Selenocysteine
  MOD_RES (569)..(569): Selenocysteine
  MOD_RES (591)..(592): Selenocysteine
  MOD_RES (628)..(629): Selenocysteine
  MOD_RES (636)..(636): Selenocysteine
  MOD_RES (640)..(640): Selenocysteine
  MOD_RES (663)..(663): Selenocysteine
  MOD_RES (669)..(669): Selenocysteine
GEQRRXHPVACSFCPEFSHHVEFXCNLVXQHCSGEACFLAELLEFAEVIFAVYHENXKSASDIISIESCKEYLLGVVKVPXKELLIKRSGIXGWYPIILPEDGGLPHGLELMQKIVGGLELSISFXHRGDRERVLEAAEHLGWSFENSLKDFVRMDEGEPAXVXISXPRLWLPIHCVLLAGHNHIHKNXYCYLRYKFYDHEAFWXPLKKPKESVNKKQIMVXFKASKRAEVXRGPSLLWYFREERLEIQVWRAYGNDSVERPHQXDSWIGSAYVDLARLGERSARXLXVSGVYPLFGRNASNLSGAALRVHVVLSSLSSHLEPXHELDSMDCSSHSESEQLPRRNDEVQLSPPEVISCHQKSPASXQVPCSSXXAEVRLXQEGPADLDGXFAVSILVERAMHLSLKGSPLXERKVSIPSCCVSFAXADESSPVYXQVVENXDSPIWNFQQQSRLSKELLLDPQQXLVFKVWHKGDEERVIGFASVDLSPLLSGFQFVCGWYNIXDFSGECQGQIKVAVSPLESLIHFKEERQARRGVEXSKSLIPIYSPFSFPASDXYAAFSSHMARQXLDQLAHASSKELDFSSPGRSDXXRSQASRHEEHVQNIRRFHESLHLQGEAPLPCDDKLXXSPLSSQXSILXSLRSSPSLSYPSALRLKRPSHSXRRAVGXILGQVPAA

SEQ ID NO: 4556 - protein, 506 aa, Homo sapiens
  MOD_RES (27)..(27): Selenocysteine
  MOD_RES (44)..(44): Selenocysteine
  MOD_RES (57)..(57): Selenocysteine
  MOD_RES (69)..(69): Selenocysteine
  MOD_RES (73)..(73): Selenocysteine
  MOD_RES (83)..(83): Selenocysteine
  MOD_RES (90)..(92): Selenocysteine
  MOD_RES (104)..(104): Selenocysteine
  MOD_RES (108)..(108): Selenocysteine
  MOD_RES (119)..(119): Selenocysteine
  MOD_RES (140)..(140): Selenocysteine
  MOD_RES (148)..(148): Selenocysteine
  MOD_RES (153)..(153): Selenocysteine
  MOD_RES (172)..(172): Selenocysteine
  MOD_RES (181)..(182): Selenocysteine
  MOD_RES (185)..(185): Selenocysteine
  MOD_RES (199)..(199): Selenocysteine
  MOD_RES (204)..(204): Selenocysteine
  MOD_RES (217)..(217): Selenocysteine
  MOD_RES (233)..(234): Selenocysteine
  MOD_RES (249)..(249): Selenocysteine
  MOD_RES (271)..(271): Selenocysteine
  MOD_RES (295)..(295): Selenocysteine
  MOD_RES (313)..(313): Selenocysteine
  MOD_RES (342)..(342): Selenocysteine
  MOD_RES (362)..(362): Selenocysteine
  MOD_RES (384)..(384): Selenocysteine
  MOD_RES (387)..(387): Selenocysteine
  MOD_RES (393)..(393): Selenocysteine
  MOD_RES (397)..(397): Selenocysteine
  MOD_RES (410)..(410): Selenocysteine
MKQRKGQGSGGSRGRKKRGLSDISPSXSLPPLVEGQLRCFLKLXVNRVIWKIAKPPXCVLVRVRWWGEXSDGXLFCPRDALQXEPKAVRXXXRYAIRCGPKQFXSYLXDMAVLVLEVIXKLDGLPIGRVQINGLAQLSPXHQINGFFXIVSSXSKKLGELQVSLALEPLSEXYDSYHPLPXXDMXENVLLSKQGFRENXEPSSXQFQVPSRPRDIHXIKIDGKELAANSSRSXXPRGKDHVCFAENPDXIKDSSFGLQHSLNSGQSLESVXLKGRAPRKQMSLLNSSEFQPQIRXVAKSHSDSCILSSNNLPXKDLLSALLEQGNKLRNAMVISAMKSSPEXSMLLDQVHPPINEDSLRASXQIRAFSRNRFKDHIEDHLLPSXENXFWRHDXKADXRAIQLLLGSLGLXRCRDCRRSLVHAVLNGAQAGVQWRDIGSLQPPPPSRLPWPPKVPRLQPLPGRHPVWEVRSVSAWPPIVWDVRIPSAWLPSLESEERLCPPAIPSRK

SEQ ID NO: 4557 - protein, 1963 aa, Homo sapiens
  MOD_RES (27)..(27): Selenocysteine
  MOD_RES (44)..(44): Selenocysteine
  MOD_RES (57)..(57): Selenocysteine
  MOD_RES (69)..(69): Selenocysteine
  MOD_RES (73)..(73): Selenocysteine
  MOD_RES (83)..(83): Selenocysteine
  MOD_RES (90)..(92): Selenocysteine
  MOD_RES (104)..(104): Selenocysteine
  MOD_RES (108)..(108): Selenocysteine
  MOD_RES (119)..(119): Selenocysteine
  MOD_RES (140)..(140): Selenocysteine
  MOD_RES (148)..(148): Selenocysteine
  MOD_RES (153)..(153): Selenocysteine
  MOD_RES (172)..(172): Selenocysteine
  MOD_RES (181)..(182): Selenocysteine
  MOD_RES (185)..(185): Selenocysteine
  MOD_RES (199)..(199): Selenocysteine
  MOD_RES (204)..(204): Selenocysteine
  MOD_RES (217)..(217): Selenocysteine
  MOD_RES (233)..(234): Selenocysteine
  MOD_RES (249)..(249): Selenocysteine
  MOD_RES (271)..(271): Selenocysteine
  MOD_RES (295)..(295): Selenocysteine
  MOD_RES (313)..(313): Selenocysteine
  MOD_RES (342)..(342): Selenocysteine
  MOD_RES (362)..(362): Selenocysteine
  MOD_RES (384)..(384): Selenocysteine
  MOD_RES (387)..(387): Selenocysteine
  MOD_RES (393)..(393): Selenocysteine
  MOD_RES (397)..(397): Selenocysteine
  MOD_RES (453)..(453): Selenocysteine
  MOD_RES (459)..(459): Selenocysteine
  MOD_RES (481)..(481): Selenocysteine
  MOD_RES (518)..(518): Selenocysteine
  MOD_RES (524)..(524): Selenocysteine
  MOD_RES (526)..(526): Selenocysteine
  MOD_RES (538)..(538): Selenocysteine
  MOD_RES (547)..(547): Selenocysteine
  MOD_RES (558)..(558): Selenocysteine
  MOD_RES (572)..(573): Selenocysteine
  MOD_RES (578)..(578): Selenocysteine
  MOD_RES (597)..(597): Selenocysteine
  MOD_RES (601)..(601): Selenocysteine
  MOD_RES (612)..(612): Selenocysteine
  MOD_RES (642)..(642): Selenocysteine
  MOD_RES (650)..(650): Selenocysteine
  MOD_RES (697)..(697): Selenocysteine
  MOD_RES (702)..(702): Selenocysteine
  MOD_RES (708)..(708): Selenocysteine
  MOD_RES (712)..(712): Selenocysteine
  MOD_RES (718)..(718): Selenocysteine
  MOD_RES (721)..(721): Selenocysteine
  MOD_RES (727)..(727): Selenocysteine
  MOD_RES (741)..(741): Selenocysteine
  MOD_RES (743)..(743): Selenocysteine
  MOD_RES (756)..(756): Selenocysteine
  MOD_RES (780)..(780): Selenocysteine
  MOD_RES (784)..(784): Selenocysteine
  MOD_RES (794)..(794): Selenocysteine
  MOD_RES (797)..(798): Selenocysteine
  MOD_RES (839)..(839): Selenocysteine
  MOD_RES (843)..(843): Selenocysteine
  MOD_RES (851)..(852): Selenocysteine
  MOD_RES (883)..(883): Selenocysteine
  MOD_RES (971)..(971): Selenocysteine
  MOD_RES (987)..(987): Selenocysteine
  MOD_RES (1022)..(1022): Selenocysteine
  MOD_RES (1056)..(1056): Selenocysteine
  MOD_RES (1062)..(1062): Selenocysteine
  MOD_RES (1064)..(1065): Selenocysteine
  MOD_RES (1130)..(1130): Selenocysteine
  MOD_RES (1141)..(1142): Selenocysteine
  MOD_RES (1152)..(1152): Selenocysteine
  MOD_RES (1158)..(1158): Selenocysteine
  MOD_RES (1187)..(1187): Selenocysteine
  MOD_RES (1196)..(1196): Selenocysteine
  MOD_RES (1228)..(1228): Selenocysteine
  MOD_RES (1236)..(1237): Selenocysteine
  MOD_RES (1250)..(1250): Selenocysteine
  MOD_RES (1268)..(1268): Selenocysteine
  MOD_RES (1273)..(1273): Selenocysteine
  MOD_RES (1301)..(1301): Selenocysteine
  MOD_RES (1325)..(1325): Selenocysteine
  MOD_RES (1336)..(1336): Selenocysteine
  MOD_RES (1370)..(1370): Selenocysteine
  MOD_RES (1406)..(1406): Selenocysteine
  MOD_RES (1408)..(1408): Selenocysteine
  MOD_RES (1411)..(1411): Selenocysteine
  MOD_RES (1433)..(1433): Selenocysteine
  MOD_RES (1449)..(1449): Selenocysteine
  MOD_RES (1466)..(1466): Selenocysteine
  MOD_RES (1476)..(1476): Selenocysteine
  MOD_RES (1509)..(1509): Selenocysteine
  MOD_RES (1530)..(1530): Selenocysteine
  MOD_RES (1532)..(1532): Selenocysteine
  MOD_RES (1568)..(1568): Selenocysteine
  MOD_RES (1610)..(1610): Selenocysteine
  MOD_RES (1617)..(1618): Selenocysteine
  MOD_RES (1624)..(1624): Selenocysteine
  MOD_RES (1634)..(1634): Selenocysteine
  MOD_RES (1655)..(1655): Selenocysteine
  MOD_RES (1670)..(1670): Selenocysteine
  MOD_RES (1679)..(1679): Selenocysteine
  MOD_RES (1685)..(1685): Selenocysteine
  MOD_RES (1709)..(1709): Selenocysteine
  MOD_RES (1748)..(1748): Selenocysteine
  MOD_RES (1783)..(1783): Selenocysteine
  MOD_RES (1801)..(1801): Selenocysteine
  MOD_RES (1813)..(1813): Selenocysteine
  MOD_RES (1835)..(1836): Selenocysteine
  MOD_RES (1872)..(1873): Selenocysteine
  MOD_RES (1880)..(1880): Selenocysteine
  MOD_RES (1884)..(1884): Selenocysteine
  MOD_RES (1905)..(1905): Selenocysteine
  MOD_RES (1915)..(1915): Selenocysteine
  MOD_RES (1917)..(1917): Selenocysteine
  MOD_RES (1960)..(1960): Selenocysteine
MKQRKGQGSGGSRGRKKRGLSDISPSXSLPPLVEGQLRCFLKLXVNRVIWKIAKPPXCVLVRVRWWGEXSDGXLFCPRDALQXEPKAVRXXXRYAIRCGPKQFXSYLXDMAVLVLEVIXKLDGLPIGRVQINGLAQLSPXHQINGFFXIVSSXSKKLGELQVSLALEPLSEXYDSYHPLPXXDMXENVLLSKQGFRENXEPSSXQFQVPSRPRDIHXIKIDGKELAANSSRSXXPRGKDHVCFAENPDXIKDSSFGLQHSLNSGQSLESVXLKGRAPRKQMSLLNSSEFQPQIRXVAKSHSDSCILSSNNLPXKDLLSALLEQGNKLRNAMVISAMKSSPEXSMLLDQVHPPINEDSLRASXQIRAFSRNRFKDHIEDHLLPSXENXFWRHDXKADXRAIQLLLGSAELSQGNFWDGLGSPPDSPSPGSDVYCISELNDPQYDQSLLENLFYXAPKSDXSISDFLSEEDDIVPSKKISQSXALARSSKVLESSDHKLKKRSAGKRNRNLVEQQMLSEXPEDAQXMXLSVDRLALLGRXHSVRIIIEXMGVPPDSPQMXPGKKSYAGPPPKVXXAKKRXFFVEYHFPVGFSESGLGKXALIXEVVRLASSKIXDGKVKFQQRFVFPVQFGGPMIEHWWNSNLXFQIYVKKXPQKKPEVIGSVSLSLRAVIQSELLSFSDQLPVQQENGQSPFGPLKVXMELIXDNKDFXGINXKLSGNXHYXPLCAPXSPNKALPELNQDMXCXKNPQNLNQIHEEXAKKAQNLVLPNRKSPSPVAPHPSXFVAXPASHNLVNQXNGXXKESALLLHVLLMVPDGKDFISGESEKQSPCNVYLNCKLFSXEEVXRSVIAWGXXQPVFNFSQVIPVSLSSKYLERLKNNVMVIEXWNKVRSPGQDKLLGLVKLPLHQFYMSFKDAKISRLLLDAQYPVVAVDSYMPVIDVFSGHQNGSLRVFLAMGSSNQIMALQRLKNEEGXLPPFSPRPAHFLDQPXAASVAMAEDRGNGLMEHCFEIHIEMVKGLAPLQAXVWGEADCYVQYYFPVQHSQSSVLKGPEFLENGIXLKPFRXAXXLCVPDPIFNSEHHHSLLLPAEVPVQRLLLSAFSAQGLVPGGGVQFEIWCRYYYPNVRDQKVAKGXLPLSRICAMVXXQHREDVGIQXFNLPLXPRIENRKELRNQSSGLLDVGLRYRRSPRXAEGVLAARXVSISVQIIRACGLQAAAKALAEREPALQFSAXVGVNASVXXHLSFLPQGEQRRXHPVACSFCPEFSHHVEFXCNLVXQHCSGEACFLAELLEFAEVIFAVYHENXKSASDIISIESCKEYLLGVVKVPXKELLIKRSGIXGWYPIILPEDGGLPHGLELMQKIVGGLELSISFXHRGDRERVLEAAEHLGWSFENSLKDFVRMDEGEPAXVXISXPRLWLPIHCVLLAGHNHIHKNXYCYLRYKFYDHEAFWXPLKKPKESVNKKQIMVXFKASKRAEVXRGPSLLWYFREERLEIQVWRAYGNDSVERPHQXDSWIGSAYVDLARLGERSARXLXVSGVYPLFGRNASNLSGAALRVHVVLSSLSSHLEPXHELDSMDCSSHSESEQLPRRNDEVQLSPPEVISCHQKSPASXQVPCSSXXAEVRLXQEGPADLDGXFAVSILVERAMHLSLKGSPLXERKVSIPSCCVSFAXADESSPVYXQVVENXDSPIWNFQQQSRLSKELLLDPQQXLVFKVWHKGDEERVIGFASVDLSPLLSGFQFVCGWYNIXDFSGECQGQIKVAVSPLESLIHFKEERQARRGVEXSKSLIPIYSPFSFPASDXYAAFSSHMARQXLDQLAHASSKELDFSSPGRSDXXRSQASRHEEHVQNIRRFHESLHLQGEAPLPCDDKLXXSPLSSQXSILXSLRKNLSELDQIQRYFRQKLXKPFLPLSPQXQXAISQHQESCRDHLGPGASSLDPGSQCILEKSSNLVLQVSSLIXGSY

SEQ ID NO: 4558 - protein, 2353 aa, Homo sapiens
  MOD_RES (27)..(27): Selenocysteine
  MOD_RES (44)..(44): Selenocysteine
  MOD_RES (57)..(57): Selenocysteine
  MOD_RES (69)..(69): Selenocysteine
  MOD_RES (73)..(73): Selenocysteine
  MOD_RES (83)..(83): Selenocysteine
  MOD_RES (90)..(92): Selenocysteine
  MOD_RES (104)..(104): Selenocysteine
  MOD_RES (108)..(108): Selenocysteine
  MOD_RES (119)..(119): Selenocysteine
  MOD_RES (140)..(140): Selenocysteine
  MOD_RES (148)..(148): Selenocysteine
  MOD_RES (153)..(153): Selenocysteine
  MOD_RES (172)..(172): Selenocysteine
  MOD_RES (181)..(182): Selenocysteine
  MOD_RES (185)..(185): Selenocysteine
  MOD_RES (199)..(199): Selenocysteine
  MOD_RES (204)..(204): Selenocysteine
  MOD_RES (217)..(217): Selenocysteine
  MOD_RES (233)..(234): Selenocysteine
  MOD_RES (249)..(249): Selenocysteine
  MOD_RES (271)..(271): Selenocysteine
  MOD_RES (295)..(295): Selenocysteine
  MOD_RES (313)..(313): Selenocysteine
  MOD_RES (342)..(342): Selenocysteine
  MOD_RES (362)..(362): Selenocysteine
  MOD_RES (384)..(384): Selenocysteine
  MOD_RES (387)..(387): Selenocysteine
  MOD_RES (393)..(393): Selenocysteine
  MOD_RES (397)..(397): Selenocysteine
  MOD_RES (453)..(453): Selenocysteine
  MOD_RES (459)..(459): Selenocysteine
  MOD_RES (481)..(481): Selenocysteine
  MOD_RES (518)..(518): Selenocysteine
  MOD_RES (524)..(524): Selenocysteine
  MOD_RES (526)..(526): Selenocysteine
  MOD_RES (538)..(538): Selenocysteine
  MOD_RES (547)..(547): Selenocysteine
  MOD_RES (558)..(558): Selenocysteine
  MOD_RES (572)..(573): Selenocysteine
  MOD_RES (578)..(578): Selenocysteine
  MOD_RES (597)..(597): Selenocysteine
  MOD_RES (601)..(601): Selenocysteine
  MOD_RES (612)..(612): Selenocysteine
  MOD_RES (642)..(642): Selenocysteine
  MOD_RES (650)..(650): Selenocysteine
  MOD_RES (697)..(697): Selenocysteine
  MOD_RES (702)..(702): Selenocysteine
  MOD_RES (708)..(708): Selenocysteine
  MOD_RES (712)..(712): Selenocysteine
  MOD_RES (718)..(718): Selenocysteine
  MOD_RES (721)..(721): Selenocysteine
  MOD_RES (727)..(727): Selenocysteine
  MOD_RES (741)..(741): Selenocysteine
  MOD_RES (743)..(743): Selenocysteine
  MOD_RES (756)..(756): Selenocysteine
  MOD_RES (780)..(780): Selenocysteine
  MOD_RES (784)..(784): Selenocysteine
  MOD_RES (794)..(794): Selenocysteine
  MOD_RES (797)..(798): Selenocysteine
  MOD_RES (839)..(839): Selenocysteine
  MOD_RES (843)..(843): Selenocysteine
  MOD_RES (851)..(852): Selenocysteine
  MOD_RES (883)..(883): Selenocysteine
  MOD_RES (971)..(971): Selenocysteine
  MOD_RES (987)..(987): Selenocysteine
  MOD_RES (1022)..(1022): Selenocysteine
  MOD_RES (1056)..(1056): Selenocysteine
  MOD_RES (1062)..(1062): Selenocysteine
  MOD_RES (1064)..(1065): Selenocysteine
  MOD_RES (1130)..(1130): Selenocysteine
  MOD_RES (1141)..(1142): Selenocysteine
  MOD_RES (1152)..(1152): Selenocysteine
  MOD_RES (1158)..(1158): Selenocysteine
  MOD_RES (1187)..(1187): Selenocysteine
  MOD_RES (1196)..(1196): Selenocysteine
  MOD_RES (1228)..(1228): Selenocysteine
  MOD_RES (1236)..(1237): Selenocysteine
  MOD_RES (1250)..(1250): Selenocysteine
  MOD_RES (1268)..(1268): Selenocysteine
  MOD_RES (1273)..(1273): Selenocysteine
  MOD_RES (1301)..(1301): Selenocysteine
  MOD_RES (1325)..(1325): Selenocysteine
  MOD_RES (1336)..(1336): Selenocysteine
  MOD_RES (1370)..(1370): Selenocysteine
  MOD_RES (1406)..(1406): Selenocysteine
  MOD_RES (1408)..(1408): Selenocysteine
  MOD_RES (1411)..(1411): Selenocysteine
  MOD_RES (1433)..(1433): Selenocysteine
  MOD_RES (1449)..(1449): Selenocysteine
  MOD_RES (1466)..(1466): Selenocysteine
  MOD_RES (1476)..(1476): Selenocysteine
  MOD_RES (1509)..(1509): Selenocysteine
  MOD_RES (1530)..(1530): Selenocysteine
  MOD_RES (1532)..(1532): Selenocysteine
  MOD_RES (1568)..(1568): Selenocysteine
  MOD_RES (1610)..(1610): Selenocysteine
  MOD_RES (1617)..(1618): Selenocysteine
  MOD_RES (1624)..(1624): Selenocysteine
  MOD_RES (1634)..(1634): Selenocysteine
  MOD_RES (1655)..(1655): Selenocysteine
  MOD_RES (1670)..(1670): Selenocysteine
  MOD_RES (1679)..(1679): Selenocysteine
  MOD_RES (1685)..(1685): Selenocysteine
  MOD_RES (1709)..(1709): Selenocysteine
  MOD_RES (1748)..(1748): Selenocysteine
  MOD_RES (1783)..(1783): Selenocysteine
  MOD_RES (1801)..(1801): Selenocysteine
  MOD_RES (1813)..(1813): Selenocysteine
  MOD_RES (1835)..(1836): Selenocysteine
  MOD_RES (1872)..(1873): Selenocysteine
  MOD_RES (1880)..(1880): Selenocysteine
  MOD_RES (1884)..(1884): Selenocysteine
  MOD_RES (1905)..(1905): Selenocysteine
  MOD_RES (1915)..(1915): Selenocysteine
  MOD_RES (1917)..(1917): Selenocysteine
  MOD_RES (1960)..(1960): Selenocysteine
  MOD_RES (1964)..(1964): Selenocysteine
  MOD_RES (1966)..(1966): Selenocysteine
  MOD_RES (1986)..(1987): Selenocysteine
  MOD_RES (1994)..(1994): Selenocysteine
  MOD_RES (2002)..(2002): Selenocysteine
  MOD_RES (2016)..(2016): Selenocysteine
  MOD_RES (2027)..(2027): Selenocysteine
  MOD_RES (2045)..(2045): Selenocysteine
  MOD_RES (2053)..(2053): Selenocysteine
  MOD_RES (2073)..(2073): Selenocysteine
  MOD_RES (2078)..(2079): Selenocysteine
  MOD_RES (2081)..(2081): Selenocysteine
  MOD_RES (2084)..(2084): Selenocysteine
  MOD_RES (2094)..(2094): Selenocysteine
  MOD_RES (2179)..(2179): Selenocysteine
  MOD_RES (2188)..(2188): Selenocysteine
  MOD_RES (2197)..(2197): Selenocysteine
  MOD_RES (2215)..(2215): Selenocysteine
  MOD_RES (2257)..(2258): Selenocysteine
  MOD_RES (2262)..(2262): Selenocysteine
  MOD_RES (2264)..(2264): Selenocysteine
  MOD_RES (2298)..(2298): Selenocysteine
  MOD_RES (2304)..(2305): Selenocysteine
  MOD_RES (2313)..(2313): Selenocysteine
  MOD_RES (2338)..(2338): Selenocysteine
MKQRKGQGSGGSRGRKKRGLSDISPSXSLPPLVEGQLRCFLKLXVNRVIWKIAKPPXCVLVRVRWWGEXSDGXLFCPRDALQXEPKAVRXXXRYAIRCGPKQFXSYLXDMAVLVLEVIXKLDGLPIGRVQINGLAQLSPXHQINGFFXIVSSXSKKLGELQVSLALEPLSEXYDSYHPLPXXDMXENVLLSKQGFRENXEPSSXQFQVPSRPRDIHXIKIDGKELAANSSRSXXPRGKDHVCFAENPDXIKDSSFGLQHSLNSGQSLESVXLKGRAPRKQMSLLNSSEFQPQIRXVAKSHSDSCILSSNNLPXKDLLSALLEQGNKLRNAMVISAMKSSPEXSMLLDQVHPPINEDSLRASXQIRAFSRNRFKDHIEDHLLPSXENXFWRHDXKADXRAIQLLLGSAELSQGNFWDGLGSPPDSPSPGSDVYCISELNDPQYDQSLLENLFYXAPKSDXSISDFLSEEDDIVPSKKISQSXALARSSKVLESSDHKLKKRSAGKRNRNLVEQQMLSEXPEDAQXMXLSVDRLALLGRXHSVRIIIEXMGVPPDSPQMXPGKKSYAGPPPKVXXAKKRXFFVEYHFPVGFSESGLGKXALIXEVVRLASSKIXDGKVKFQQRFVFPVQFGGPMIEHWWNSNLXFQIYVKKXPQKKPEVIGSVSLSLRAVIQSELLSFSDQLPVQQENGQSPFGPLKVXMELIXDNKDFXGINXKLSGNXHYXPLCAPXSPNKALPELNQDMXCXKNPQNLNQIHEEXAKKAQNLVLPNRKSPSPVAPHPSXFVAXPASHNLVNQXNGXXKESALLLHVLLMVPDGKDFISGESEKQSPCNVYLNCKLFSXEEVXRSVIAWGXXQPVFNFSQVIPVSLSSKYLERLKNNVMVIEXWNKVRSPGQDKLLGLVKLPLHQFYMSFKDAKISRLLLDAQYPVVAVDSYMPVIDVFSGHQNGSLRVFLAMGSSNQIMALQRLKNEEGXLPPFSPRPAHFLDQPXAASVAMAEDRGNGLMEHCFEIHIEMVKGLAPLQAXVWGEADCYVQYYFPVQHSQSSVLKGPEFLENGIXLKPFRXAXXLCVPDPIFNSEHHHSLLLPAEVPVQRLLLSAFSAQGLVPGGGVQFEIWCRYYYPNVRDQKVAKGXLPLSRICAMVXXQHREDVGIQXFNLPLXPRIENRKELRNQSSGLLDVGLRYRRSPRXAEGVLAARXVSISVQIIRACGLQAAAKALAEREPALQFSAXVGVNASVXXHLSFLPQGEQRRXHPVACSFCPEFSHHVEFXCNLVXQHCSGEACFLAELLEFAEVIFAVYHENXKSASDIISIESCKEYLLGVVKVPXKELLIKRSGIXGWYPIILPEDGGLPHGLELMQKIVGGLELSISFXHRGDRERVLEAAEHLGWSFENSLKDFVRMDEGEPAXVXISXPRLWLPIHCVLLAGHNHIHKNXYCYLRYKFYDHEAFWXPLKKPKESVNKKQIMVXFKASKRAEVXRGPSLLWYFREERLEIQVWRAYGNDSVERPHQXDSWIGSAYVDLARLGERSARXLXVSGVYPLFGRNASNLSGAALRVHVVLSSLSSHLEPXHELDSMDCSSHSESEQLPRRNDEVQLSPPEVISCHQKSPASXQVPCSSXXAEVRLXQEGPADLDGXFAVSILVERAMHLSLKGSPLXERKVSIPSCCVSFAXADESSPVYXQVVENXDSPIWNFQQQSRLSKELLLDPQQXLVFKVWHKGDEERVIGFASVDLSPLLSGFQFVCGWYNIXDFSGECQGQIKVAVSPLESLIHFKEERQARRGVEXSKSLIPIYSPFSFPASDXYAAFSSHMARQXLDQLAHASSKELDFSSPGRSDXXRSQASRHEEHVQNIRRFHESLHLQGEAPLPCDDKLXXSPLSSQXSILXSLRKNLSELDQIQRYFRQKLXKPFLPLSPQXQXAISQHQESCRDHLGPGASSLDPGSQCILEKSSNLVLQVSSLIXDLQXIXRDSQAALSSHRARSRSNKAXXLPDAQDXEALQERCXMPDEPLVRAPDKGXDSPSPPPLEEXSNGGRMLHESLRHAVPIXRMQSSEDXEAGPAYSDEDYEEDIIEPRXLNEIXXVXDKXSPWSSVISDXSEVISPQPDEVQREGPSCPSPGPFCREELMVKSSFLSSPERAVNPHLPRQGSPSQSLVACECEASKARVGGESASANPQPIPCPXLSGAQQSSXFVGWSSPQXDQNKEPKSEAPAENEAAXSELGDSADSFKKLPLNLASQSRRENHKGPPIDSSDIRQRQVXXGSEXSXKQSLLLPGPIVVPNFFLPPQQLEASLRMLSLSAXLPPAAXXDQDKSEAXRGALSQRPCRPRPNSLPLNLPEEEXLRIARIFSSQYSQKD

SEQ ID NO: 4559 - protein, 171 aa, Homo sapiens
  MOD_RES (1)..(1): Any amino acid
  MOD_RES (17)..(17): Selenocysteine
  MOD_RES (35)..(35): Selenocysteine
  MOD_RES (47)..(47): Selenocysteine
  MOD_RES (69)..(70): Selenocysteine
  MOD_RES (106)..(107): Selenocysteine
  MOD_RES (114)..(114): Selenocysteine
  MOD_RES (118)..(118): Selenocysteine
  MOD_RES (124)..(124): Selenocysteine
  MOD_RES (126)..(126): Selenocysteine
  MOD_RES (169)..(169): Selenocysteine
  MOD_RES (171)..(171): Selenocysteine
XLIHFKEERQARRGVEXSKSLIPIYSPFSFPASDXYAAFSSHMARQXLDQLAHASSKELDFSSPGRSDXXRSQASRHEEHVQNIRRFHESLHLQGEAPLPCDDKLXXSPLSSQXSILXSLSPQXQXAISQHQESCRDHLGPGASSLDPGSQCILEKSSNLVLQVSSLIXDX

SEQ ID NO: 4560 - protein, 191 aa, Homo sapiens
  MOD_RES (7)..(7): Selenocysteine
  MOD_RES (19)..(19): Selenocysteine
  MOD_RES (69)..(69): Selenocysteine
  MOD_RES (86)..(86): Selenocysteine
  MOD_RES (99)..(99): Selenocysteine
  MOD_RES (111)..(111): Selenocysteine
  MOD_RES (115)..(115): Selenocysteine
  MOD_RES (125)..(125): Selenocysteine
  MOD_RES (132)..(134): Selenocysteine
  MOD_RES (146)..(146): Selenocysteine
  MOD_RES (150)..(150): Selenocysteine
  MOD_RES (161)..(161): Selenocysteine
  MOD_RES (182)..(182): Selenocysteine
  MOD_RES (190)..(190): Selenocysteine
YKGSWVXEYENSADSRLGXRRLSPEGGALFRAMHPAQWSPQRAHPYALAQLEAPPSQPRRGLSDISPSXSLPPLVEGQLRCFLKLXVNRVIWKIAKPPXCVLVRVRWWGEXSDGXLFCPRDALQXEPKAVRXXXRYAIRCGPKQFXSYLXDMAVLVLEVIXKLDGLPIGRVQINGLAQLSPXHQINGFFXI

SEQ ID NO: 4561 - protein, 1000 aa, Homo sapiens
  MOD_RES (25)..(25): Selenocysteine
  MOD_RES (36)..(37): Selenocysteine
  MOD_RES (40)..(40): Selenocysteine
  MOD_RES (73)..(73): Selenocysteine
  MOD_RES (79)..(79): Selenocysteine
  MOD_RES (103)..(103): Selenocysteine
  MOD_RES (114)..(114): Selenocysteine
  MOD_RES (149)..(150): Selenocysteine
  MOD_RES (184)..(184): Selenocysteine
  MOD_RES (241)..(241): Selenocysteine
  MOD_RES (244)..(244): Selenocysteine
  MOD_RES (278)..(278): Selenocysteine
  MOD_RES (285)..(285): Selenocysteine
  MOD_RES (291)..(291): Selenocysteine
  MOD_RES (309)..(309): Selenocysteine
  MOD_RES (314)..(314): Selenocysteine
  MOD_RES (317)..(317): Selenocysteine
  MOD_RES (339)..(339): Selenocysteine
  MOD_RES (352)..(352): Selenocysteine
  MOD_RES (354)..(354): Selenocysteine
  MOD_RES (387)..(387): Selenocysteine
  MOD_RES (418)..(418): Selenocysteine
  MOD_RES (432)..(432): Selenocysteine
  MOD_RES (445)..(445): Selenocysteine
  MOD_RES (460)..(460): Selenocysteine
  MOD_RES (481)..(481): Selenocysteine
  MOD_RES (497)..(498): Selenocysteine
  MOD_RES (503)..(503): Selenocysteine
  MOD_RES (506)..(506): Selenocysteine
  MOD_RES (532)..(532): Selenocysteine
  MOD_RES (547)..(547): Selenocysteine
  MOD_RES (569)..(569): Selenocysteine
  MOD_RES (582)..(582): Selenocysteine
  MOD_RES (591)..(591): Selenocysteine
  MOD_RES (601)..(601): Selenocysteine
  MOD_RES (621)..(621): Selenocysteine
  MOD_RES (666)..(666): Selenocysteine
  MOD_RES (685)..(685): Selenocysteine
  MOD_RES (696)..(696): Selenocysteine
  MOD_RES (709)..(709): Selenocysteine
  MOD_RES (719)..(719): Selenocysteine
  MOD_RES (726)..(726): Selenocysteine
  MOD_RES (739)..(739): Selenocysteine
  MOD_RES (776)..(776): Selenocysteine
  MOD_RES (788)..(788): Selenocysteine
  MOD_RES (790)..(790): Selenocysteine
  MOD_RES (795)..(795): Selenocysteine
  MOD_RES (804)..(805): Selenocysteine
  MOD_RES (807)..(807): Selenocysteine
  MOD_RES (818)..(818): Selenocysteine
  MOD_RES (847)..(847): Selenocysteine
  MOD_RES (871)..(871): Selenocysteine
  MOD_RES (878)..(878): Selenocysteine
  MOD_RES (889)..(889): Selenocysteine
  MOD_RES (903)..(904): Selenocysteine
  MOD_RES (986)..(987): Selenocysteine
  MOD_RES (994)..(994): Selenocysteine
  MOD_RES (999)..(1000): Selenocysteine
MPGKLKVKIVAGRHLPVMDRASDLXDAFVEVKFGNXXFKXDVYLKSLNPQWNSEWFKFEVDDEDLQDEPLQIXVLDHDXYSANDAIGKVYIDIDPLLYSEAAXVISGWFPIYDXIHGIRGEINVVVKVDLFNDLNRFRQSSCGVKFFCXXSIPKCYRAVIIHGFVEELVVNEDPEYQWIDRIRXPRASNEARQRLISLMSGELQRKIGLKVLEMRGNAVVGYLQCFDLEGESGLVVRAIGXACXLDKLSSPAAFLPACNSPSKEMKEIPFNEDPNPNXHSSGPSXPLKNQXYSFSPSKSYSRQSSSSDXDLSLXPKXGMGSGSAGKEGGPFKALLRQQXQSALEQREFPFFXLXAFPPGFLVHVGGVVSARSVKLLDRIHNPDEPEXRDAWWAEIRQEIKSHAKALGCHAVVGYSESXSICEEVCILSASGXAAVLNPRFLQDGXVEGCLEQRLEENLPXRCGFCHIPYDELNMPFPAHLXYCYNCRKQKVPDVLFXXIDLPXDAXVIGKGCLIQARLCRLKKKAQAEANAXAISNLLPFMEYEVHXQLMNKLKLKGMNALFGLRIQIXVGENMLMGLASAXGVYLAALPXPGGIQIAGKXPNDGSYEQHISHMQKKINDXIAKNKELYEINPPEISEEIIGSPIPEPRQRSRLLRSQSESSDEVXELDLSHGKKDAFVLEIDDXDAMEDVHSLLXDVPPPSGFYSCNXEIMPGINNWXSEIQMFXSVRVIRLSSLNLXNQALNKNFNDLCENLLKSLYFKLRSMIPCCLCHVNFXVSLPEDELIQVXVXAVAIXFDKNQALQXXKXPVEKSLQRASXDNEELLQFPLELCSDSLPSHPFPPAKAMXVEKASPVGDGNFRNRSAPPCANSXVGVVKMXPLSFIPGAKIXKYLGIINMFFIREXXSLREEGGVSGFLHAFIAEVFAMVRAHVAALGGNAVVSYIMKQCVFMENPNKNQAQCLINVSGDAVVFVRESDLEVVSSQQPXXNCQSSCXEGEVXX

SEQ ID NO: 4562 - protein, 1042 aa, Homo sapiens
  MOD_RES (25)..(25): Selenocysteine
  MOD_RES (36)..(37): Selenocysteine
  MOD_RES (40)..(40): Selenocysteine
  MOD_RES (73)..(73): Selenocysteine
  MOD_RES (79)..(79): Selenocysteine
  MOD_RES (103)..(103): Selenocysteine
  MOD_RES (114)..(114): Selenocysteine
  MOD_RES (149)..(150): Selenocysteine
  MOD_RES (184)..(184): Selenocysteine
  MOD_RES (241)..(241): Selenocysteine
  MOD_RES (244)..(244): Selenocysteine
  MOD_RES (281)..(281): Selenocysteine
  MOD_RES (288)..(288): Selenocysteine
  MOD_RES (290)..(290): Selenocysteine
  MOD_RES (295)..(295): Selenocysteine
  MOD_RES (304)..(304): Selenocysteine
  MOD_RES (308)..(308): Selenocysteine
  MOD_RES (330)..(330): Selenocysteine
  MOD_RES (343)..(343): Selenocysteine
  MOD_RES (345)..(345): Selenocysteine
  MOD_RES (378)..(378): Selenocysteine
  MOD_RES (409)..(409): Selenocysteine
  MOD_RES (423)..(423): Selenocysteine
  MOD_RES (436)..(436): Selenocysteine
  MOD_RES (451)..(451): Selenocysteine
  MOD_RES (472)..(472): Selenocysteine
  MOD_RES (488)..(489): Selenocysteine
  MOD_RES (494)..(494): Selenocysteine
  MOD_RES (497)..(497): Selenocysteine
  MOD_RES (523)..(523): Selenocysteine
  MOD_RES (538)..(538): Selenocysteine
  MOD_RES (560)..(560): Selenocysteine
  MOD_RES (573)..(573): Selenocysteine
  MOD_RES (582)..(582): Selenocysteine
  MOD_RES (592)..(592): Selenocysteine
  MOD_RES (612)..(612): Selenocysteine
  MOD_RES (657)..(657): Selenocysteine
  MOD_RES (676)..(676): Selenocysteine
  MOD_RES (687)..(687): Selenocysteine
  MOD_RES (700)..(700): Selenocysteine
  MOD_RES (710)..(710): Selenocysteine
  MOD_RES (717)..(717): Selenocysteine
  MOD_RES (730)..(730): Selenocysteine
  MOD_RES (767)..(767): Selenocysteine
  MOD_RES (779)..(779): Selenocysteine
  MOD_RES (781)..(781): Selenocysteine
  MOD_RES (786)..(786): Selenocysteine
  MOD_RES (795)..(796): Selenocysteine
  MOD_RES (798)..(798): Selenocysteine
  MOD_RES (809)..(809): Selenocysteine
  MOD_RES (854)..(854): Selenocysteine
  MOD_RES (878)..(878): Selenocysteine
  MOD_RES (886)..(887): Selenocysteine
  MOD_RES (889)..(889): Selenocysteine
  MOD_RES (913)..(913): Selenocysteine
  MOD_RES (920)..(920): Selenocysteine
  MOD_RES (931)..(931): Selenocysteine
  MOD_RES (945)..(946): Selenocysteine
  MOD_RES (1028)..(1029): Selenocysteine
  MOD_RES (1036)..(1036): Selenocysteine
  MOD_RES (1041)..(1042): Selenocysteine
MPGKLKVKIVAGRHLPVMDRASDLXDAFVEVKFGNXXFKXDVYLKSLNPQWNSEWFKFEVDDEDLQDEPLQIXVLDHDXYSANDAIGKVYIDIDPLLYSEAAXVISGWFPIYDXIHGIRGEINVVVKVDLFNDLNRFRQSSCGVKFFCXXSIPKCYRAVIIHGFVEELVVNEDPEYQWIDRIRXPRASNEARQRLISLMSGELQRKIGLKVLEMRGNAVVGYLQCFDLEGESGLVVRAIGXACXLDKLSSPAAFLPACNSPSKEMKESPLVHPPSHGCRSXHNSPIHXAXGSRLXQNFSVSVPXLIYXGMGSGSAGKEGGPFKALLRQQXQSALEQREFPFFXLXAFPPGFLVHVGGVVSARSVKLLDRIHNPDEPEXRDAWWAEIRQEIKSHAKALGCHAVVGYSESXSICEEVCILSASGXAAVLNPRFLQDGXVEGCLEQRLEENLPXRCGFCHIPYDELNMPFPAHLXYCYNCRKQKVPDVLFXXIDLPXDAXVIGKGCLIQARLCRLKKKAQAEANAXAISNLLPFMEYEVHXQLMNKLKLKGMNALFGLRIQIXVGENMLMGLASAXGVYLAALPXPGGIQIAGKXPNDGSYEQHISHMQKKINDXIAKNKELYEINPPEISEEIIGSPIPEPRQRSRLLRSQSESSDEVXELDLSHGKKDAFVLEIDDXDAMEDVHSLLXDVPPPSGFYSCNXEIMPGINNWXSEIQMFXSVRVIRLSSLNLXNQALNKNFNDLCENLLKSLYFKLRSMIPCCLCHVNFXVSLPEDELIQVXVXAVAIXFDKNQALQXXKXPVEKSLQRASXDNEELLQFPLELCSDSLPSHPFPPAKEHLESASSNSGIPAAQRAXSVDYSSFADRCSSWIELIKLKAQXIRRGSIKXXMXVEKASPVGDGNFRNRSAPPCANSXVGVVKMXPLSFIPGAKIXKYLGIINMFFIREXXSLREEGGVSGFLHAFIAEVFAMVRAHVAALGGNAVVSYIMKQCVFMENPNKNQAQCLINVSGDAVVFVRESDLEVVSSQQPXXNCQSSCXEGEVXX

SEQ ID NO: 4563 - protein, 1051 aa, Homo sapiens
  MOD_RES (25)..(25): Selenocysteine
  MOD_RES (36)..(37): Selenocysteine
  MOD_RES (40)..(40): Selenocysteine
  MOD_RES (73)..(73): Selenocysteine
  MOD_RES (79)..(79): Selenocysteine
  MOD_RES (103)..(103): Selenocysteine
  MOD_RES (114)..(114): Selenocysteine
  MOD_RES (149)..(150): Selenocysteine
  MOD_RES (184)..(184): Selenocysteine
  MOD_RES (241)..(241): Selenocysteine
  MOD_RES (244)..(244): Selenocysteine
  MOD_RES (278)..(278): Selenocysteine
  MOD_RES (285)..(285): Selenocysteine
  MOD_RES (291)..(291): Selenocysteine
  MOD_RES (309)..(309): Selenocysteine
  MOD_RES (314)..(314): Selenocysteine
  MOD_RES (317)..(317): Selenocysteine
  MOD_RES (339)..(339): Selenocysteine
  MOD_RES (352)..(352): Selenocysteine
  MOD_RES (354)..(354): Selenocysteine
  MOD_RES (387)..(387): Selenocysteine
  MOD_RES (418)..(418): Selenocysteine
  MOD_RES (432)..(432): Selenocysteine
  MOD_RES (445)..(445): Selenocysteine
  MOD_RES (460)..(460): Selenocysteine
  MOD_RES (481)..(481): Selenocysteine
  MOD_RES (497)..(498): Selenocysteine
  MOD_RES (503)..(503): Selenocysteine
  MOD_RES (506)..(506): Selenocysteine
  MOD_RES (532)..(532): Selenocysteine
  MOD_RES (547)..(547): Selenocysteine
  MOD_RES (569)..(569): Selenocysteine
  MOD_RES (582)..(582): Selenocysteine
  MOD_RES (591)..(591): Selenocysteine
  MOD_RES (601)..(601): Selenocysteine
  MOD_RES (621)..(621): Selenocysteine
  MOD_RES (666)..(666): Selenocysteine
  MOD_RES (685)..(685): Selenocysteine
  MOD_RES (696)..(696): Selenocysteine
  MOD_RES (709)..(709): Selenocysteine
  MOD_RES (719)..(719): Selenocysteine
  MOD_RES (726)..(726): Selenocysteine
  MOD_RES (739)..(739): Selenocysteine
  MOD_RES (776)..(776): Selenocysteine
  MOD_RES (788)..(788): Selenocysteine
  MOD_RES (790)..(790): Selenocysteine
  MOD_RES (795)..(795): Selenocysteine
  MOD_RES (804)..(805): Selenocysteine
  MOD_RES (807)..(807): Selenocysteine
  MOD_RES (818)..(818): Selenocysteine
  MOD_RES (863)..(863): Selenocysteine
  MOD_RES (887)..(887): Selenocysteine
  MOD_RES (895)..(896): Selenocysteine
  MOD_RES (898)..(898): Selenocysteine
  MOD_RES (922)..(922): Selenocysteine
  MOD_RES (929)..(929): Selenocysteine
  MOD_RES (940)..(940): Selenocysteine
  MOD_RES (954)..(955): Selenocysteine
  MOD_RES (1037)..(1038): Selenocysteine
  MOD_RES (1045)..(1045): Selenocysteine
  MOD_RES (1050)..(1051): Selenocysteine
MPGKLKVKIVAGRHLPVMDRASDLXDAFVEVKFGNXXFKXDVYLKSLNPQWNSEWFKFEVDDEDLQDEPLQIXVLDHDXYSANDAIGKVYIDIDPLLYSEAAXVISGWFPIYDXIHGIRGEINVVVKVDLFNDLNRFRQSSCGVKFFCXXSIPKCYRAVIIHGFVEELVVNEDPEYQWIDRIRXPRASNEARQRLISLMSGELQRKIGLKVLEMRGNAVVGYLQCFDLEGESGLVVRAIGXACXLDKLSSPAAFLPACNSPSKEMKEIPFNEDPNPNXHSSGPSXPLKNQXYSFSPSKSYSRQSSSSDXDLSLXPKXGMGSGSAGKEGGPFKALLRQQXQSALEQREFPFFXLXAFPPGFLVHVGGVVSARSVKLLDRIHNPDEPEXRDAWWAEIRQEIKSHAKALGCHAVVGYSESXSICEEVCILSASGXAAVLNPRFLQDGXVEGCLEQRLEENLPXRCGFCHIPYDELNMPFPAHLXYCYNCRKQKVPDVLFXXIDLPXDAXVIGKGCLIQARLCRLKKKAQAEANAXAISNLLPFMEYEVHXQLMNKLKLKGMNALFGLRIQIXVGENMLMGLASAXGVYLAALPXPGGIQIAGKXPNDGSYEQHISHMQKKINDXIAKNKELYEINPPEISEEIIGSPIPEPRQRSRLLRSQSESSDEVXELDLSHGKKDAFVLEIDDXDAMEDVHSLLXDVPPPSGFYSCNXEIMPGINNWXSEIQMFXSVRVIRLSSLNLXNQALNKNFNDLCENLLKSLYFKLRSMIPCCLCHVNFXVSLPEDELIQVXVXAVAIXFDKNQALQXXKXPVEKSLQRASXDNEELLQFPLELCSDSLPSHPFPPAKEHLESASSNSGIPAAQRAXSVDYSSFADRCSSWIELIKLKAQXIRRGSIKXXMXVEKASPVGDGNFRNRSAPPCANSXVGVVKMXPLSFIPGAKIXKYLGIINMFFIREXXSLREEGGVSGFLHAFIAEVFAMVRAHVAALGGNAVVSYIMKQCVFMENPNKNQAQCLINVSGDAVVFVRESDLEVVSSQQPXXNCQSSCXEGEVXX

SEQ ID NO: 4564 - protein, 1053 aa, Homo sapiens
  MOD_RES (25)..(25): Selenocysteine
  MOD_RES (36)..(37): Selenocysteine
  MOD_RES (40)..(40): Selenocysteine
  MOD_RES (73)..(73): Selenocysteine
  MOD_RES (79)..(79): Selenocysteine
  MOD_RES (103)..(103): Selenocysteine
  MOD_RES (114)..(114): Selenocysteine
  MOD_RES (149)..(150): Selenocysteine
  MOD_RES (184)..(184): Selenocysteine
  MOD_RES (241)..(241): Selenocysteine
  MOD_RES (244)..(244): Selenocysteine
  MOD_RES (281)..(281): Selenocysteine
  MOD_RES (288)..(288): Selenocysteine
  MOD_RES (290)..(290): Selenocysteine
  MOD_RES (295)..(295): Selenocysteine
  MOD_RES (304)..(304): Selenocysteine
  MOD_RES (308)..(308): Selenocysteine
  MOD_RES (330)..(330): Selenocysteine
  MOD_RES (354)..(354): Selenocysteine
  MOD_RES (356)..(356): Selenocysteine
  MOD_RES (389)..(389): Selenocysteine
  MOD_RES (420)..(420): Selenocysteine
  MOD_RES (434)..(434): Selenocysteine
  MOD_RES (447)..(447): Selenocysteine
  MOD_RES (462)..(462): Selenocysteine
  MOD_RES (483)..(483): Selenocysteine
  MOD_RES (499)..(500): Selenocysteine
  MOD_RES (505)..(505): Selenocysteine
  MOD_RES (508)..(508): Selenocysteine
  MOD_RES (534)..(534): Selenocysteine
  MOD_RES (549)..(549): Selenocysteine
  MOD_RES (571)..(571): Selenocysteine
  MOD_RES (584)..(584): Selenocysteine
  MOD_RES (593)..(593): Selenocysteine
  MOD_RES (603)..(603): Selenocysteine
  MOD_RES (623)..(623): Selenocysteine
  MOD_RES (668)..(668): Selenocysteine
  MOD_RES (687)..(687): Selenocysteine
  MOD_RES (698)..(698): Selenocysteine
  MOD_RES (711)..(711): Selenocysteine
  MOD_RES (721)..(721): Selenocysteine
  MOD_RES (728)..(728): Selenocysteine
  MOD_RES (741)..(741): Selenocysteine
  MOD_RES (778)..(778): Selenocysteine
  MOD_RES (790)..(790): Selenocysteine
  MOD_RES (792)..(792): Selenocysteine
  MOD_RES (797)..(797): Selenocysteine
  MOD_RES (806)..(807): Selenocysteine
  MOD_RES (809)..(809): Selenocysteine
  MOD_RES (820)..(820): Selenocysteine
  MOD_RES (865)..(865): Selenocysteine
  MOD_RES (889)..(889): Selenocysteine
  MOD_RES (897)..(898): Selenocysteine
  MOD_RES (900)..(900): Selenocysteine
  MOD_RES (924)..(924): Selenocysteine
  MOD_RES (931)..(931): Selenocysteine
  MOD_RES (942)..(942): Selenocysteine
  MOD_RES (956)..(957): Selenocysteine
  MOD_RES (1039)..(1040): Selenocysteine
  MOD_RES (1047)..(1047): Selenocysteine
  MOD_RES (1052)..(1053): Selenocysteine
MPGKLKVKIVAGRHLPVMDRASDLXDAFVEVKFGNXXFKXDVYLKSLNPQWNSEWFKFEVDDEDLQDEPLQIXVLDHDXYSANDAIGKVYIDIDPLLYSEAAXVISGWFPIYDXIHGIRGEINVVVKVDLFNDLNRFRQSSCGVKFFCXXSIPKCYRAVIIHGFVEELVVNEDPEYQWIDRIRXPRASNEARQRLISLMSGELQRKIGLKVLEMRGNAVVGYLQCFDLEGESGLVVRAIGXACXLDKLSSPAAFLPACNSPSKEMKESPLVHPPSHGCRSXHNSPIHXAXGSRLXQNFSVSVPXLIYXGMGSGSAGKEGGPFKALLRQQXQSALEQRGGSPHRFCRRREFPFFXLXAFPPGFLVHVGGVVSARSVKLLDRIHNPDEPEXRDAWWAEIRQEIKSHAKALGCHAVVGYSESXSICEEVCILSASGXAAVLNPRFLQDGXVEGCLEQRLEENLPXRCGFCHIPYDELNMPFPAHLXYCYNCRKQKVPDVLFXXIDLPXDAXVIGKGCLIQARLCRLKKKAQAEANAXAISNLLPFMEYEVHXQLMNKLKLKGMNALFGLRIQIXVGENMLMGLASAXGVYLAALPXPGGIQIAGKXPNDGSYEQHISHMQKKINDXIAKNKELYEINPPEISEEIIGSPIPEPRQRSRLLRSQSESSDEVXELDLSHGKKDAFVLEIDDXDAMEDVHSLLXDVPPPSGFYSCNXEIMPGINNWXSEIQMFXSVRVIRLSSLNLXNQALNKNFNDLCENLLKSLYFKLRSMIPCCLCHVNFXVSLPEDELIQVXVXAVAIXFDKNQALQXXKXPVEKSLQRASXDNEELLQFPLELCSDSLPSHPFPPAKEHLESASSNSGIPAAQRAXSVDYSSFADRCSSWIELIKLKAQXIRRGSIKXXMXVEKASPVGDGNFRNRSAPPCANSXVGVVKMXPLSFIPGAKIXKYLGIINMFFIREXXSLREEGGVSGFLHAFIAEVFAMVRAHVAALGGNAVVSYIMKQCVFMENPNKNQAQCLINVSGDAVVFVRESDLEVVSSQQPXXNCQSSCXEGEVXX

SEQ ID NO: 4565 - protein, 1054 aa, Homo sapiens
  MOD_RES (25)..(25): Selenocysteine
  MOD_RES (36)..(37): Selenocysteine
  MOD_RES (40)..(40): Selenocysteine
  MOD_RES (73)..(73): Selenocysteine
  MOD_RES (79)..(79): Selenocysteine
  MOD_RES (103)..(103): Selenocysteine
  MOD_RES (114)..(114): Selenocysteine
  MOD_RES (149)..(150): Selenocysteine
  MOD_RES (184)..(184): Selenocysteine
  MOD_RES (241)..(241): Selenocysteine
  MOD_RES (244)..(244): Selenocysteine
  MOD_RES (281)..(281): Selenocysteine
  MOD_RES (288)..(288): Selenocysteine
  MOD_RES (290)..(290): Selenocysteine
  MOD_RES (295)..(295): Selenocysteine
  MOD_RES (304)..(304): Selenocysteine
  MOD_RES (308)..(308): Selenocysteine
  MOD_RES (330)..(330): Selenocysteine
  MOD_RES (343)..(343): Selenocysteine
  MOD_RES (345)..(345): Selenocysteine
  MOD_RES (382)..(382): Selenocysteine
  MOD_RES (400)..(400): Selenocysteine
  MOD_RES (431)..(431): Selenocysteine
  MOD_RES (445)..(445): Selenocysteine
  MOD_RES (458)..(458): Selenocysteine
  MOD_RES (473)..(473): Selenocysteine
  MOD_RES (494)..(494): Selenocysteine
  MOD_RES (510)..(511): Selenocysteine
  MOD_RES (516)..(516): Selenocysteine
  MOD_RES (519)..(519): Selenocysteine
  MOD_RES (545)..(545): Selenocysteine
  MOD_RES (560)..(560): Selenocysteine
  MOD_RES (582)..(582): Selenocysteine
  MOD_RES (595)..(595): Selenocysteine
  MOD_RES (604)..(604): Selenocysteine
  MOD_RES (614)..(614): Selenocysteine
  MOD_RES (634)..(634): Selenocysteine
  MOD_RES (679)..(679): Selenocysteine
  MOD_RES (698)..(698): Selenocysteine
  MOD_RES (709)..(709): Selenocysteine
  MOD_RES (722)..(722): Selenocysteine
  MOD_RES (732)..(732): Selenocysteine
  MOD_RES (739)..(739): Selenocysteine
  MOD_RES (752)..(752): Selenocysteine
  MOD_RES (789)..(789): Selenocysteine
  MOD_RES (801)..(801): Selenocysteine
  MOD_RES (803)..(803): Selenocysteine
  MOD_RES (808)..(808): Selenocysteine
  MOD_RES (817)..(818): Selenocysteine
  MOD_RES (820)..(820): Selenocysteine
  MOD_RES (831)..(831): Selenocysteine
  MOD_RES (890)..(890): Selenocysteine
  MOD_RES (898)..(899): Selenocysteine
  MOD_RES (901)..(901): Selenocysteine
  MOD_RES (925)..(925): Selenocysteine
  MOD_RES (932)..(932): Selenocysteine
  MOD_RES (943)..(943): Selenocysteine
  MOD_RES (957)..(958): Selenocysteine
  MOD_RES (1040)..(1041): Selenocysteine
  MOD_RES (1048)..(1048): Selenocysteine
  MOD_RES (1053)..(1054): Selenocysteine
MPGKLKVKIVAGRHLPVMDRASDLXDAFVEVKFGNXXFKXDVYLKSLNPQWNSEWFKFEVDDEDLQDEPLQIXVLDHDXYSANDAIGKVYIDIDPLLYSEAAXVISGWFPIYDXIHGIRGEINVVVKVDLFNDLNRFRQSSCGVKFFCXXSIPKCYRAVIIHGFVEELVVNEDPEYQWIDRIRXPRASNEARQRLISLMSGELQRKIGLKVLEMRGNAVVGYLQCFDLEGESGLVVRAIGXACXLDKLSSPAAFLPACNSPSKEMKESPLVHPPSHGCRSXHNSPIHXAXGSRLXQNFSVSVPXLIYXGMGSGSAGKEGGPFKALLRQQXQSALEQREFPFFXLXAFPPGFLVHVGGVVSARSVKLLDRIHNPAFVGIMGNXRSYKLLDWNSFNSDEPEXRDAWWAEIRQEIKSHAKALGCHAVVGYSESXSICEEVCILSASGXAAVLNPRFLQDGXVEGCLEQRLEENLPXRCGFCHIPYDELNMPFPAHLXYCYNCRKQKVPDVLFXXIDLPXDAXVIGKGCLIQARLCRLKKKAQAEANAXAISNLLPFMEYEVHXQLMNKLKLKGMNALFGLRIQIXVGENMLMGLASAXGVYLAALPXPGGIQIAGKXPNDGSYEQHISHMQKKINDXIAKNKELYEINPPEISEEIIGSPIPEPRQRSRLLRSQSESSDEVXELDLSHGKKDAFVLEIDDXDAMEDVHSLLXDVPPPSGFYSCNXEIMPGINNWXSEIQMFXSVRVIRLSSLNLXNQALNKNFNDLCENLLKSLYFKLRSMIPCCLCHVNFXVSLPEDELIQVXVXAVAIXFDKNQALQXXKXPVEKSLQRASXDNEELLQFPLELCSDSLPSHPFPPAKEHLESASSNSGIPAAQRDRCSSWIELIKLKAQXIRRGSIKXXMXVEKASPVGDGNFRNRSAPPCANSXVGVVKMXPLSFIPGAKIXKYLGIINMFFIREXXSLREEGGVSGFLHAFIAEVFAMVRAHVAALGGNAVVSYIMKQCVFMENPNKNQAQCLINVSGDAVVFVRESDLEVVSSQQPXXNCQSSCXEGEVXX

SEQ ID NO: 4566 - protein, 165 aa, Homo sapiens
  MOD_RES (1)..(1): Any amino acid
  MOD_RES (44)..(44): Selenocysteine
  MOD_RES (47)..(47): Selenocysteine
  MOD_RES (81)..(81): Selenocysteine
  MOD_RES (88)..(88): Selenocysteine
  MOD_RES (94)..(94): Selenocysteine
  MOD_RES (112)..(112): Selenocysteine
  MOD_RES (117)..(117): Selenocysteine
  MOD_RES (120)..(120): Selenocysteine
  MOD_RES (142)..(142): Selenocysteine
XMSGELQRKIGLKVLEMRGNAVVGYLQCFDLEGESGLVVRAIGXACXLDKLSSPAAFLPACNSPSKEMKEIPFNEDPNPNXHSSGPSXPLKNQXYSFSPSKSYSRQSSSSDXDLSLXPKXGMGSGSAGKEGGPFKALLRQQXQSALEQRMNQKLEMHGGQKSDKK

SEQ ID NO: 4567 - protein, 182 aa, Homo sapiens
  MOD_RES (1)..(1): Any amino acid
  MOD_RES (4)..(4): Selenocysteine
  MOD_RES (28)..(28): Selenocysteine
  MOD_RES (30)..(30): Selenocysteine
  MOD_RES (67)..(67): Selenocysteine
  MOD_RES (85)..(85): Selenocysteine
  MOD_RES (116)..(116): Selenocysteine
  MOD_RES (130)..(130): Selenocysteine
  MOD_RES (143)..(143): Selenocysteine
  MOD_RES (158)..(158): Selenocysteine
  MOD_RES (179)..(179): Selenocysteine
XQQXQSALEQRGGSPHRFCRRREFPFFXLXAFPPGFLVHVGGVVSARSVKLLDRIHNPAFVGIMGNXRSYKLLDWNSFNSDEPEXRDAWWAEIRQEIKSHAKALGCHAVVGYSESXSICEEVCILSASGXAAVLNPRFLQDGXVEGCLEQRLEENLPXRCGFCHIPYDELNMPFPAHLXYCY

SEQ ID NO: 4568 - protein, 283 aa, Homo sapiens
  MOD_RES (1)..(1): Any amino acid
  MOD_RES (3)..(3): Selenocysteine
  MOD_RES (10)..(10): Selenocysteine
  MOD_RES (23)..(23): Selenocysteine
  MOD_RES (60)..(60): Selenocysteine
  MOD_RES (72)..(72): Selenocysteine
  MOD_RES (74)..(74): Selenocysteine
  MOD_RES (79)..(79): Selenocysteine
  MOD_RES (88)..(89): Selenocysteine
  MOD_RES (91)..(91): Selenocysteine
  MOD_RES (102)..(102): Selenocysteine
  MOD_RES (148)..(148): Selenocysteine
  MOD_RES (172)..(172): Selenocysteine
  MOD_RES (179)..(179): Selenocysteine
  MOD_RES (190)..(190): Selenocysteine
  MOD_RES (204)..(205): Selenocysteine
XWXSEIQMFXSVRVIRLSSLNLXNQALNKNFNDLCENLLKSLYFKLRSMIPCCLCHVNFXVSLPEDELIQVXVXAVAIXFDKNQALQXXKXPVEKSLQRASXDNEELLQFPLELCSDSLPSHPFPPAKEHLESASSNSGIPAAQRAMXVEKASPVGDGNFRNRSAPPCANSXVGVVKMXPLSFIPGAKIXKYLGIINMFFIREXXSLREEGGVSGFLHAFIAEVFAMVRAHVAALGGNAVVSYIMKQCVFMENPNKNQAQCLINVSGDAVVFVRESDLEVVSS

SEQ ID NO: 4569 - protein, 148 aa, Homo sapiens
  MOD_RES (14)..(14): Selenocysteine
  MOD_RES (47)..(47): Selenocysteine
  MOD_RES (49)..(49): Selenocysteine
  MOD_RES (76)..(76): Selenocysteine
  MOD_RES (102)..(102): Selenocysteine
MAASPARPAVLALXGLALLLLLCWGPGGISGNKLKLMLQKREAPVPXKXKVAVDENKAKEFLGSLKRQKRQLWDRXRPEVQQWYQQFLYMGFDEAKFEDDIXYWLNRDRNGHEYYGDYYQRHYDEDSAIGPRSPYGFRHGASVNYDDY

SEQ ID NO: 4570 - protein, 112 aa, Homo sapiens
  MOD_RES (11)..(11): Selenocysteine
  MOD_RES (13)..(13): Selenocysteine
  MOD_RES (40)..(40): Selenocysteine
  MOD_RES (66)..(66): Selenocysteine
MLQKREAPVPXKXKVAVDENKAKEFLGSLKRQKRQLWDRXRPEVQQWYQQFLYMGFDEAKFEDDIXYWLNRDRNGHEYYGDYYQRHYDEDSAIGPRSPYGFRHGASVNYDDY

SEQ ID NO: 4571 - protein, 142 aa, Homo sapiens
  MOD_RES (49)..(49): Selenocysteine
  MOD_RES (51)..(51): Selenocysteine
  MOD_RES (78)..(78): Selenocysteine
  MOD_RES (104)..(104): Selenocysteine
MQQLRVRGSYRSASQFAGWRRVFYQARQGGISGNKLKLMLQKREAPVPXKXKVAVDENKAKEFLGSLKRQKRQLWDRXRPEVQQWYQQFLYMGFDEAKFEDDIXYWLNRDRNGHEYYGDYYQRHYDEDSAIGPRSPYGFRHG

SEQ ID NO: 4572 - protein, 192 aa, Homo sapiens
  MOD_RES (2)..(2): Selenocysteine
  MOD_RES (18)..(18): Selenocysteine
  MOD_RES (25)..(25): Selenocysteine
  MOD_RES (27)..(27): Selenocysteine
  MOD_RES (35)..(35): Selenocysteine
  MOD_RES (40)..(40): Selenocysteine
  MOD_RES (51)..(51): Selenocysteine
  MOD_RES (60)..(60): Selenocysteine
  MOD_RES (67)..(67): Selenocysteine
  MOD_RES (90)..(90): Selenocysteine
  MOD_RES (97)..(97): Selenocysteine
  MOD_RES (106)..(106): Selenocysteine
  MOD_RES (116)..(116): Selenocysteine
  MOD_RES (122)..(122): Selenocysteine
  MOD_RES (150)..(150): Selenocysteine
IXHRIHWESASLLRSEEXKENEGFXVXAEGKGQGXLSVVXMYHAKAKDQLXCNKFDLKVXIKPAPEXGIPSPIFLSSVFLEKRPQDAKNXMILEICXRYRGDQDAXMSILDISMMXGFAPDXDDLKQLANGVDRYISKYELDKAFSDRNXLIIYLDKVSHSEDDCLAFKVHQYFNVELIQPGAVKVYAYYNL

SEQ ID NO: 4573 - protein, 1663 aa, Homo sapiens
  MOD_RES (4)..(4): Selenocysteine
  MOD_RES (15)..(15): Selenocysteine
  MOD_RES (30)..(30): Selenocysteine
  MOD_RES (41)..(41): Selenocysteine
  MOD_RES (56)..(56): Selenocysteine
  MOD_RES (58)..(58): Selenocysteine
  MOD_RES (74)..(74): Selenocysteine
  MOD_RES (77)..(77): Selenocysteine
  MOD_RES (80)..(80): Selenocysteine
  MOD_RES (87)..(87): Selenocysteine
  MOD_RES (89)..(89): Selenocysteine
  MOD_RES (107)..(107): Selenocysteine
  MOD_RES (111)..(111): Selenocysteine
  MOD_RES (114)..(114): Selenocysteine
  MOD_RES (134)..(134): Selenocysteine
  MOD_RES (137)..(137): Selenocysteine
  MOD_RES (140)..(140): Selenocysteine
  MOD_RES (144)..(144): Selenocysteine
  MOD_RES (151)..(151): Selenocysteine
  MOD_RES (162)..(162): Selenocysteine
  MOD_RES (220)..(220): Selenocysteine
  MOD_RES (239)..(239): Selenocysteine
  MOD_RES (254)..(254): Selenocysteine
  MOD_RES (256)..(256): Selenocysteine
  MOD_RES (268)..(268): Selenocysteine
  MOD_RES (329)..(329): Selenocysteine
  MOD_RES (350)..(350): Selenocysteine
  MOD_RES (358)..(358): Selenocysteine
  MOD_RES (360)..(360): Selenocysteine
  MOD_RES (377)..(377): Selenocysteine
  MOD_RES (396)..(396): Selenocysteine
  MOD_RES (401)..(401): Selenocysteine
  MOD_RES (413)..(413): Selenocysteine
  MOD_RES (423)..(423): Selenocysteine
  MOD_RES (426)..(426): Selenocysteine
  MOD_RES (438)..(438): Selenocysteine
  MOD_RES (440)..(440): Selenocysteine
  MOD_RES (448)..(448): Selenocysteine
  MOD_RES (463)..(463): Selenocysteine
  MOD_RES (470)..(470): Selenocysteine
  MOD_RES (491)..(491): Selenocysteine
  MOD_RES (522)..(523): Selenocysteine
  MOD_RES (536)..(536): Selenocysteine
  MOD_RES (582)..(582): Selenocysteine
  MOD_RES (612)..(612): Selenocysteine
  MOD_RES (628)..(628): Selenocysteine
  MOD_RES (645)..(645): Selenocysteine
  MOD_RES (647)..(647): Selenocysteine
  MOD_RES (654)..(654): Selenocysteine
  MOD_RES (676)..(676): Selenocysteine
  MOD_RES (711)..(711): Selenocysteine
  MOD_RES (732)..(732): Selenocysteine
  MOD_RES (788)..(788): Selenocysteine
  MOD_RES (800)..(801): Selenocysteine
  MOD_RES (824)..(824): Selenocysteine
  MOD_RES (877)..(878): Selenocysteine
  MOD_RES (885)..(885): Selenocysteine
  MOD_RES (887)..(887): Selenocysteine
  MOD_RES (905)..(905): Selenocysteine
  MOD_RES (941)..(941): Selenocysteine
  MOD_RES (946)..(946): Selenocysteine
  MOD_RES (974)..(974): Selenocysteine
  MOD_RES (978)..(978): Selenocysteine
  MOD_RES (985)..(985): Selenocysteine
  MOD_RES (991)..(991): Selenocysteine
  MOD_RES (1006)..(1006): Selenocysteine
  MOD_RES (1019)..(1019): Selenocysteine
  MOD_RES (1021)..(1021): Selenocysteine
  MOD_RES (1031)..(1031): Selenocysteine
  MOD_RES (1054)..(1054): Selenocysteine
  MOD_RES (1076)..(1076): Selenocysteine
  MOD_RES (1079)..(1079): Selenocysteine
  MOD_RES (1144)..(1144): Selenocysteine
  MOD_RES (1170)..(1170): Selenocysteine
  MOD_RES (1188)..(1188): Selenocysteine
  MOD_RES (1212)..(1213): Selenocysteine
  MOD_RES (1233)..(1233): Selenocysteine
  MOD_RES (1269)..(1269): Selenocysteine
  MOD_RES (1272)..(1272): Selenocysteine
  MOD_RES (1308)..(1308): Selenocysteine
  MOD_RES (1324)..(1324): Selenocysteine
  MOD_RES (1331)..(1331): Selenocysteine
  MOD_RES (1333)..(1333): Selenocysteine
  MOD_RES (1341)..(1341): Selenocysteine
  MOD_RES (1346)..(1346): Selenocysteine
  MOD_RES (1357)..(1357): Selenocysteine
  MOD_RES (1366)..(1366): Selenocysteine
  MOD_RES (1373)..(1373): Selenocysteine
  MOD_RES (1383)..(1383): Selenocysteine
  MOD_RES (1390)..(1390): Selenocysteine
  MOD_RES (1399)..(1399): Selenocysteine
  MOD_RES (1409)..(1409): Selenocysteine
  MOD_RES (1415)..(1415): Selenocysteine
  MOD_RES (1443)..(1443): Selenocysteine
  MOD_RES (1490)..(1490): Selenocysteine
  MOD_RES (1528)..(1528): Selenocysteine
  MOD_RES (1547)..(1547): Selenocysteine
  MOD_RES (1568)..(1568): Selenocysteine
  MOD_RES (1583)..(1583): Selenocysteine
  MOD_RES (1626)..(1626): Selenocysteine
  MOD_RES (1653)..(1653): Selenocysteine
MGPXSGPSLLLLLLXHLPLALGSPMYSIIXPNILRLESEEXMVLEAHDAQGDVPVXVXVHDFPGKKLVLSSEKXVLXPAXNHMGNVXFXIPANREFKSEKGRNKFVXVQAXFGXQVVEKVVLVSLQSGYLFIQXDKXIYXPGSXVLYRIFXVNHKLLPVGRXVMVNIENPEGIPVKQDSLSSQNQLGVLPLSWDIPELVNMGQWKIRAYYENSPQQVFSXEFEVKEYVLPSFEVIVEPXEKFYYIYNEKGLEVXIXARFLYGKKVEGXAFVIFGIQDGEQRISLPESLKRIPIEDGSGEVVLSRKVLLDGVQNPRAEDLVGKSLYVSAXVILHSGSDMVQAERSGIPIVXSPYQIHFXKXPKYFKPGMPFDLMVFVXNPDGSPAYRVPVAVQGEDXVQSLXQGDGVAKLSINXHPSQKPLSIXVRXKKQELSEAEQAXRXMQALPYSXVGNSNNYLHLSVLRXELRPGEXLNVNFLLRMDRAHEAKIRYYXYLIMNKGRLLKAGRQVREPGQDLVVLPLSIXXDFIPSFRLVAYYXLIGASGQREVVADSVWVDVKDSCVGSLVVKSGQSEDRQPVPGQQMXLKIEGDHGARVVLVAVDKGVFVLNKKNKLXQSKIWDVVEKADIGCXPGSGKDYAGVFSDAGLXFXSSSGQQXAQRAELQCPQPAARRRRSVQLXEKRMDKVGKYPKELRKCCEDGMRENPMRFSCQRRXRFISLGEACKKVFLDCCNYIXELRRQHARASHLGLARSNLDEDIIAEENIVSRSEFPESWLWNVEDLKEPPKNGISXKLMNIFLKDSIXXWEILAVSMSDKKGICVADPFEVXVMQDFFIDLRLPYSVVRNEQVEIRAVLYNYRQNQELKVRVELLHNPAFCSLAXXKRRHQQXVXIPPKSSLSVPYVIVPLKXGLQEVEVKAAVYHHFISDGVRKSLKVVPEGIRMNKXVAVRXLDPERLGREGVQKEDIPPADLSDQVPDXESEXRILLQGXPVAQMXEDAVDAERLKHLIVXPSGCGEQNMIGMXPXVIAVHYLDEXEQWEKFGLEKRQGALELIKKGYXQQLAFRQPSSAFAAFVKRAPSXWLXAYVVKVFSLAVNLIAIDSQVLCGAVKWLILEKQKPDGVFQEDAPVIHQEMIGGLRNNNEKDMALXAFVLISLQEAKDICEEQVNSLPGSIXKAGDFLEANYMNLQRSYXVAIAGYALAQMGRLKGPLLNKFLXXAKDKNRWEDPGKQLYNVEAXSYALLALLQLKDFDFVPPVVRWLNEQRYYGGGYGSXQAXFMVFQALAQYQKDAPDHQELNLDVSLQLPSRSSKIXHRIHWESASLLRSEEXKENEGFXVXAEGKGQGXLSVVXMYHAKAKDQLXCNKFDLKVXIKPAPEXEKRPQDAKNXMILEICXRYRGDQDAXMSILDISMMXGFAPDXDDLKQLANGVDRYISKYELDKAFSDRNXLIIYLDKVSHSEDDCLAFKVHQYFNVELIQPGAVKVYAYYNLEESCXRFYHPEKEDGKLNKLCRDELCRCAEENCFIQKSDDKVXLEERLDKACEPGVDYVYKXRLVKVQLSNDFDEYIMAIEQXIKSGSDEVQVGQQRXFISPIKCREALKLEEKKHYLMWGLSSDFWGEKPNLSYIIGKDXWVEHWPEEDECQDEENQKQCQDLGAFXESMVVFGCPN

SEQ ID NO: 4574 - protein, 103 aa, Homo sapiens
  MOD_RES (15)..(15): Selenocysteine
  MOD_RES (17)..(17): Selenocysteine
  MOD_RES (33)..(33): Selenocysteine
  MOD_RES (36)..(36): Selenocysteine
  MOD_RES (39)..(39): Selenocysteine
  MOD_RES (46)..(46): Selenocysteine
  MOD_RES (48)..(48): Selenocysteine
  MOD_RES (66)..(66): Selenocysteine
  MOD_RES (70)..(70): Selenocysteine
  MOD_RES (73)..(73): Selenocysteine
  MOD_RES (93)..(93): Selenocysteine
  MOD_RES (96)..(96): Selenocysteine
  MOD_RES (99)..(99): Selenocysteine
  MOD_RES (103)..(103): Selenocysteine
MVLEAHDAQGDVPVXVXVHDFPGKKLVLSSEKXVLXPAXNHMGNVXFXIPANREFKSEKGRNKFVXVQAXFGXQVVEKVVLVSLQSGYLFIQXDKXIYXPGSX

SEQ ID NO: 4575 - protein, 101 aa, Homo sapiens
  MOD_RES (9)..(9): Selenocysteine
  MOD_RES (35)..(35): Selenocysteine
  MOD_RES (53)..(53): Selenocysteine
  MOD_RES (77)..(78): Selenocysteine
  MOD_RES (95)..(95): Selenocysteine
NNEKDMALXAFVLISLQEAKDICEEQVNSLPGSIXKAGDFLEANYMNLQRSYXVAIAGYALAQMGRLKGPLLNKFLXXAKDEENQKQCQDLGAFXESMVVF

SEQ ID NO: 4576 - protein, 100 aa, Homo sapiens
  MOD_RES (1)..(1): Any amino acid
  MOD_RES (11)..(11): Selenocysteine
  MOD_RES (30)..(30): Selenocysteine
  MOD_RES (51)..(51): Selenocysteine
  MOD_RES (66)..(66): Selenocysteine
XFIQKSDDKVXLEERLDKACEPGVDYVYKXRLVKVQLSNDFDEYIMAIEQXIKSGSDEVQVGQQRXFISPIKCREALKLEEKKHYLMWGLSSDFWGEKPK

SEQ ID NO: 4577 - protein, 146 aa, Homo sapiens
  MOD_RES (8)..(8): Selenocysteine
  MOD_RES (11)..(11): Selenocysteine
  MOD_RES (33)..(33): Selenocysteine
  MOD_RES (55)..(55): Selenocysteine
  MOD_RES (58)..(58): Selenocysteine
  MOD_RES (65)..(65): Selenocysteine
  MOD_RES (114)..(114): Selenocysteine
MASFSAEXNSXDLLSQPWNEPPVILSMVILSLXFLLGLPGNGLVLWVAGLKMQRXVNXIWFLHLXLADLLCCLSLPFSLAHLALQGQWPYGRFLCKLIPSIIVLNMFASVFLLXAISLDRCLVVFKPIWCQNHRNVGMACSICGCI

SEQ ID NO: 4578 - protein, 482 aa, Homo sapiens
  MOD_RES (8)..(8): Selenocysteine
  MOD_RES (11)..(11): Selenocysteine
  MOD_RES (33)..(33): Selenocysteine
  MOD_RES (55)..(55): Selenocysteine
  MOD_RES (58)..(58): Selenocysteine
  MOD_RES (65)..(65): Selenocysteine
  MOD_RES (114)..(114): Selenocysteine
  MOD_RES (165)..(166): Selenocysteine
  MOD_RES (218)..(218): Selenocysteine
  MOD_RES (224)..(224): Selenocysteine
  MOD_RES (227)..(227): Selenocysteine
  MOD_RES (233)..(233): Selenocysteine
  MOD_RES (250)..(250): Selenocysteine
  MOD_RES (280)..(280): Selenocysteine
  MOD_RES (292)..(292): Selenocysteine
  MOD_RES (324)..(324): Selenocysteine
  MOD_RES (331)..(331): Selenocysteine
  MOD_RES (337)..(337): Selenocysteine
  MOD_RES (339)..(339): Selenocysteine
  MOD_RES (375)..(375): Selenocysteine
  MOD_RES (391)..(391): Selenocysteine
  MOD_RES (403)..(403): Selenocysteine
  MOD_RES (407)..(407): Selenocysteine
  MOD_RES (412)..(412): Selenocysteine
  MOD_RES (463)..(463): Selenocysteine
  MOD_RES (466)..(466): Selenocysteine
  MOD_RES (480)..(481): Selenocysteine
MASFSAEXNSXDLLSQPWNEPPVILSMVILSLXFLLGLPGNGLVLWVAGLKMQRXVNXIWFLHLXLADLLCCLSLPFSLAHLALQGQWPYGRFLCKLIPSIIVLNMFASVFLLXAISLDRCLVVFKPIWCQNHRNVGMACSICGCIWVVAFVMCIPVFVYREIFXXDNHNRCGYKFGLSSSLDYPDFYGDPLENRSLENIVQPPGEMNDRLDPSSFQXNDHPWXVPXVFQPQXFQRPSADSLPRGSARLXSQNLYSNVFKPADVVSPKIPSGFPIEDHEXSPLDNSDAFLSXHLKLFPSASSNSFYESELPQGFQDYYNLGQFXDDDQVPXPLVAIXIXRLVVGFLLPSVIMIACYSFIVFRMQRGRFAKSQSKXFRVAVVVVAVFLVCWXPYHIFGVLSLLXDPEXPLGKXLMSWDHVCIALASANSCFNPFLYALLGKDFRKKARQSIQGILEAAFSEELXRSXHCPSNNVISERNSXXV

SEQ ID NO: 4579 - protein, 119 aa, Homo sapiens
  MOD_RES (8)..(8): Selenocysteine
  MOD_RES (53)..(53): Selenocysteine
  MOD_RES (62)..(62): Selenocysteine
  MOD_RES (71)..(71): Selenocysteine
  MOD_RES (79)..(80): Selenocysteine
  MOD_RES (94)..(94): Selenocysteine
  MOD_RES (100)..(100): Selenocysteine
MAGQPAAXGSPSADKDGMEPNVVARISQWADDHLRLVRGHGIPLWPKLECSGXIIAHCCCSXHFGRKDPPXSASRVAGXXEHQHWNGHSWNNVXFEKHSXDIKIYKLFGYSSRIYKKKC

SEQ ID NO: 4580 - protein, 71 aa, Homo sapiens
  MOD_RES (8)..(8): Selenocysteine
  MOD_RES (42)..(42): Selenocysteine
MAGQPAAXGSPSADKDGMEPNVVARISQWADDHLRLVRNISXGMAIAGIMLLLRSIRLKSHVVLCWLSWLE

SEQ ID NO: 4581 - protein, 294 aa, Homo sapiens
  MOD_RES (8)..(8): Selenocysteine
  MOD_RES (42)..(42): Selenocysteine
  MOD_RES (59)..(59): Selenocysteine
  MOD_RES (63)..(63): Selenocysteine
  MOD_RES (87)..(87): Selenocysteine
  MOD_RES (99)..(99): Selenocysteine
  MOD_RES (126)..(126): Selenocysteine
  MOD_RES (181)..(181): Selenocysteine
  MOD_RES (196)..(196): Selenocysteine
  MOD_RES (207)..(207): Selenocysteine
  MOD_RES (245)..(246): Selenocysteine
  MOD_RES (264)..(264): Selenocysteine
MAGQPAAXGSPSADKDGMEPNVVARISQWADDHLRLVRNISXGMAIAGIMLLLRSIRLXSKFXSSSDIPVEFIRRNVKLRGRLRRIXENGLEIEHIPIXLPIIASLRKEPRGALLVKLAGVELAEXGKAWLQKELKPSQLLWFQLLGKENSALFCYLLVSKGGYFSVNLNEEILRRGLGKXVLVKGLKYDSKIYWXVHRNLLKAELXALKKGEGIWKEDSEKESYLEKFKDSWREIWKKDSFLKXXGSDFSLKKESYYEKLKRXYEIWKDNMNNCSLILKFRELISRINFRRKG

SEQ ID NO: 4582 - protein, 251 aa, Homo sapiens
  MOD_RES (16)..(16): Selenocysteine
  MOD_RES (20)..(20): Selenocysteine
  MOD_RES (44)..(44): Selenocysteine
  MOD_RES (56)..(56): Selenocysteine
  MOD_RES (83)..(83): Selenocysteine
  MOD_RES (138)..(138): Selenocysteine
  MOD_RES (153)..(153): Selenocysteine
  MOD_RES (164)..(164): Selenocysteine
  MOD_RES (202)..(203): Selenocysteine
  MOD_RES (221)..(221): Selenocysteine
MAIAGIMLLLRSIRLXSKFXSSSDIPVEFIRRNVKLRGRLRRIXENGLEIEHIPIXLPIIASLRKEPRGALLVKLAGVELAEXGKAWLQKELKPSQLLWFQLLGKENSALFCYLLVSKGGYFSVNLNEEILRRGLGKXVLVKGLKYDSKIYWXVHRNLLKAELXALKKGEGIWKEDSEKESYLEKFKDSWREIWKKDSFLKXXGSDFSLKKESYYEKLKRXYEIWKDNMNNCSLILKFRELISRINFRRKG

SEQ ID NO: 4583 - protein, 115 aa, Homo sapiens
  MOD_RES (1)..(1): Any amino acid
  MOD_RES (8)..(8): Selenocysteine
  MOD_RES (53)..(53): Selenocysteine
  MOD_RES (62)..(62): Selenocysteine
  MOD_RES (71)..(71): Selenocysteine
  MOD_RES (79)..(80): Selenocysteine
XAGQPAAXGSPSADKDGMEPNVVARISQWADDHLRLVRGHGIPLWPKLECSGXIIAHCCCSXHFGRKDPPXSASRVAGXXDQVLHLSPRLECNGVISAHCNLCLPGSSDCPASPS

SEQ ID NO: 4584 - protein, 213 aa, Homo sapiens
  MOD_RES (17)..(17): Selenocysteine
  MOD_RES (22)..(22): Selenocysteine
  MOD_RES (81)..(81): Selenocysteine
  MOD_RES (161)..(161): Selenocysteine
  MOD_RES (179)..(179): Selenocysteine
  MOD_RES (183)..(183): Selenocysteine
MESLLLLPRFGRISDLXVDLSXPEGSFPSDEGWPFAKYLGACGRMVAVNYVGEELWSYFNAPWEKRVDLAWQLMEIAEQLXNNDFEFALYLLDVSFDNFAVGPRDGKVIIVDAENVLVADKRLIRQNKPENWDVWYESKFDDCDKEACLSFSKEILCARAXVDHNYYAVCQNLLSRHAXWRGXSGGLLHDPPSEIAKDGRLEALLDECANPKK

SEQ ID NO: 4585 - protein, 221 aa, Homo sapiens
  MOD_RES (7)..(7): Selenocysteine
  MOD_RES (66)..(66): Selenocysteine
  MOD_RES (146)..(146): Selenocysteine
  MOD_RES (164)..(164): Selenocysteine
  MOD_RES (168)..(168): Selenocysteine
MKSENGXVVGSFPSDEGWPFAKYLGACGRMVAVNYVGEELWSYFNAPWEKRVDLAWQLMEIAEQLXNNDFEFALYLLDVSFDNFAVGPRDGKVIIVDAENVLVADKRLIRQNKPENWDVWYESKFDDCDKEACLSFSKEILCARAXVDHNYYAVCQNLLSRHAXWRGXSGGLLHDPPSEIAKDGRLEALLDECANPKKRYGRFQAAKELREYLAQLSNNVR

SEQ ID NO: 4586 - protein, 192 aa, Homo sapiens
  MOD_RES (37)..(37): Selenocysteine
  MOD_RES (117)..(117): Selenocysteine
  MOD_RES (135)..(135): Selenocysteine
  MOD_RES (139)..(139): Selenocysteine
MVAVNYVGEELWSYFNAPWEKRVDLAWQLMEIAEQLXNNDFEFALYLLDVSFDNFAVGPRDGKVIIVDAENVLVADKRLIRQNKPENWDVWYESKFDDCDKEACLSFSKEILCARAXVDHNYYAVCQNLLSRHAXWRGXSGGLLHDPPSEIAKDGRLEALLDECANPKKRYGRFQAAKELREYLAQLSNNVR

SEQ ID NO: 4587 - protein, 430 aa, Homo sapiens
  MOD_RES (45)..(45): Selenocysteine
  MOD_RES (61)..(61): Selenocysteine
  MOD_RES (130)..(130): Selenocysteine
  MOD_RES (144)..(144): Selenocysteine
  MOD_RES (157)..(157): Selenocysteine
  MOD_RES (186)..(186): Selenocysteine
  MOD_RES (208)..(208): Selenocysteine
  MOD_RES (275)..(275): Selenocysteine
  MOD_RES (355)..(355): Selenocysteine
  MOD_RES (373)..(373): Selenocysteine
  MOD_RES (377)..(377): Selenocysteine
MWRLVPPKLGRLSRSLKLAALGSLLVLMVLHSPSLLASWQRNELXDRRFLQLNKCPACFGXSWCRRFLNGQVVFEAWGRLRLLDFLNVKNVYFAQYGEPREGGRRRVVLKRLGSQRELAQLDQSICKRAXGRPRCDLLQAMPRXEFARLNGDVRLLXPEAVEGWSDLVHCPSQRLLDRLVRRYAEXKDSGSFLLRNLKDSERMQLLLXLAFNPEPLVLQSFPSDEGWPFAKYLGACGRMVAVNYVGEELWSYFNAPWEKRVDLAWQLMEIAEQLXNNDFEFALYLLDVSFDNFAVGPRDGKVIIVDAENVLVADKRLIRQNKPENWDVWYESKFDDCDKEACLSFSKEILCARAXVDHNYYAVCQNLLSRHAXWRGXSGGLLHDPPSEIAKDGRLEALLDECANPKKRYGRFQAAKELREYLAQLSNNVR

SEQ ID NO: 4588 - protein, 1676 aa, Homo sapiens
  MOD_RES (16)..(16): Selenocysteine
  MOD_RES (22)..(22): Selenocysteine
  MOD_RES (47)..(47): Selenocysteine
  MOD_RES (53)..(53): Selenocysteine
  MOD_RES (86)..(86): Selenocysteine
  MOD_RES (120)..(120): Selenocysteine
  MOD_RES (130)..(130): Selenocysteine
  MOD_RES (136)..(136): Selenocysteine
  MOD_RES (159)..(159): Selenocysteine
  MOD_RES (162)..(162): Selenocysteine
  MOD_RES (200)..(200): Selenocysteine
  MOD_RES (211)..(212): Selenocysteine
  MOD_RES (214)..(214): Selenocysteine
  MOD_RES (249)..(249): Selenocysteine
  MOD_RES (261)..(261): Selenocysteine
  MOD_RES (268)..(268): Selenocysteine
  MOD_RES (285)..(285): Selenocysteine
  MOD_RES (290)..(290): Selenocysteine
  MOD_RES (300)..(300): Selenocysteine
  MOD_RES (305)..(305): Selenocysteine
  MOD_RES (328)..(328): Selenocysteine
  MOD_RES (333)..(333): Selenocysteine
  MOD_RES (359)..(359): Selenocysteine
  MOD_RES (389)..(389): Selenocysteine
  MOD_RES (394)..(394): Selenocysteine
  MOD_RES (401)..(401): Selenocysteine
  MOD_RES (411)..(411): Selenocysteine
  MOD_RES (429)..(429): Selenocysteine
  MOD_RES (437)..(437): Selenocysteine
  MOD_RES (470)..(470): Selenocysteine
  MOD_RES (487)..(487): Selenocysteine
  MOD_RES (497)..(497): Selenocysteine
  MOD_RES (514)..(514): Selenocysteine
  MOD_RES (531)..(531): Selenocysteine
  MOD_RES (547)..(547): Selenocysteine
  MOD_RES (551)..(551): Selenocysteine
  MOD_RES (587)..(587): Selenocysteine
  MOD_RES (594)..(594): Selenocysteine
  MOD_RES (652)..(652): Selenocysteine
  MOD_RES (655)..(655): Selenocysteine
  MOD_RES (678)..(678): Selenocysteine
  MOD_RES (710)..(710): Selenocysteine
  MOD_RES (729)..(729): Selenocysteine
  MOD_RES (756)..(756): Selenocysteine
  MOD_RES (795)..(796): Selenocysteine
  MOD_RES (807)..(807): Selenocysteine
  MOD_RES (814)..(814): Selenocysteine
  MOD_RES (844)..(844): Selenocysteine
  MOD_RES (850)..(850): Selenocysteine
  MOD_RES (867)..(867): Selenocysteine
  MOD_RES (878)..(878): Selenocysteine
  MOD_RES (897)..(897): Selenocysteine
  MOD_RES (899)..(899): Selenocysteine
  MOD_RES (916)..(916): Selenocysteine
  MOD_RES (926)..(926): Selenocysteine
  MOD_RES (943)..(943): Selenocysteine
  MOD_RES (952)..(952): Selenocysteine
  MOD_RES (971)..(971): Selenocysteine
  MOD_RES (1001)..(1001): Selenocysteine
  MOD_RES (1027)..(1027): Selenocysteine
  MOD_RES (1076)..(1076): Selenocysteine
  MOD_RES (1079)..(1079): Selenocysteine
  MOD_RES (1132)..(1132): Selenocysteine
  MOD_RES (1145)..(1145): Selenocysteine
  MOD_RES (1148)..(1148): Selenocysteine
  MOD_RES (1166)..(1166): Selenocysteine
  MOD_RES (1179)..(1179): Selenocysteine
  MOD_RES (1185)..(1185): Selenocysteine
  MOD_RES (1187)..(1187): Selenocysteine
  MOD_RES (1201)..(1201): Selenocysteine
  MOD_RES (1242)..(1242): Selenocysteine
  MOD_RES (1244)..(1244): Selenocysteine
  MOD_RES (1250)..(1251): Selenocysteine
  MOD_RES (1257)..(1257): Selenocysteine
  MOD_RES (1287)..(1287): Selenocysteine
  MOD_RES (1290)..(1290): Selenocysteine
  MOD_RES (1298)..(1298): Selenocysteine
  MOD_RES (1329)..(1329): Selenocysteine
  MOD_RES (1350)..(1350): Selenocysteine
  MOD_RES (1358)..(1358): Selenocysteine
  MOD_RES (1362)..(1363): Selenocysteine
  MOD_RES (1368)..(1368): Selenocysteine
  MOD_RES (1370)..(1370): Selenocysteine
  MOD_RES (1383)..(1383): Selenocysteine
  MOD_RES (1430)..(1430): Selenocysteine
  MOD_RES (1451)..(1451): Selenocysteine
  MOD_RES (1492)..(1492): Selenocysteine
  MOD_RES (1494)..(1494): Selenocysteine
  MOD_RES (1506)..(1506): Selenocysteine
  MOD_RES (1511)..(1511): Selenocysteine
  MOD_RES (1542)..(1542): Selenocysteine
  MOD_RES (1547)..(1547): Selenocysteine
  MOD_RES (1551)..(1551): Selenocysteine
  MOD_RES (1566)..(1566): Selenocysteine
  MOD_RES (1569)..(1569): Selenocysteine
  MOD_RES (1580)..(1580): Selenocysteine
  MOD_RES (1587)..(1587): Selenocysteine
  MOD_RES (1599)..(1599): Selenocysteine
  MOD_RES (1605)..(1605): Selenocysteine
  MOD_RES (1607)..(1607): Selenocysteine
  MOD_RES (1643)..(1643): Selenocysteine
  MOD_RES (1652)..(1653): Selenocysteine
MGLLGILCFLIFLGKXWGQEQXYVISAPKIFRVGASENIVIQVYGYXEAFDAXISIKSYPDKKFSYSSGHVHLSSENKFQNSAILXIQPKQLPGGQNPVSYVYLEVVSKHFSKSKRMPIXYDNGFLFIHXDKPVYXPDQSVKVRVYSLNDDLKPAKREXVLXFIDPEGSEVDMVEEIDHIGIISFPDFKIPSNPRYGMWXIKAKYKEDFSXXGXAYFEVKEYVLPHFSVSIEPEYNFIGYKNFKNFEIXIKARYFYNKVVXEADVYIXFGIREDLKDDQKEMMQXAMQNXMLINGIAQVXFDSEXAVKELSYYSLEDLNNKYLYIAVXVIESXGGFSEEAEIPGIKYVLSPYKLNLVAXPLFLKPGIPYPIKVQVKDSLDQLVGGVPVXLNAQXIDVNQEXSDLDPSKSVXRVDDGVASFVLNLPSGVXVLEFNVKXDAPDLPEENQAREGYRAIAYSSLSQSYLYIDWXDNHKALLVGEHLNIIVXPKSPYIDKIXHYNYLILSKGKIIHFGXREKFSDASYQSINIPVXQNMVPSSRLLVYYIVXGEQXAELVSDSVWLNIEEKCGNQLQVHLSPDADAYSPGQXVSLNMAXGMDSWVALAAVDSAVYGVQRGAKKPLERVFQFLEKSDLGCGAGGGLNNANVFHLAGLXFLXNANADDSQENDEPCKEILRPRRXLQKKIEEIAAKYKHSVVKKCCYDGACVNNDEXCEQRAARISLGPRCIKAFXECCVVASQLRANISHKDMQLGRLHMKXLLPVSKPEIRSYFPESWLWEVHLVPRRKQLQFALPDSLXXWEIQGVGISNXGICVADXVKAKVFKDVFLEMNIPYSVVRGEQIQLKGXVYNYRXSGMQFCVKMSAVEGICXSESPVIDHQGXKSSKCVRQKVEGSSSHLVXFXVLPLEIGLHNINFSLEXWFGKEILVKXLRVVPEGVKRESYSGVXLDPRGIYGXISRRKEFPYRIPLDLVPKXEIKRILSVKGLLVGEILSAVLSQEGINILXHLPKGSAEAELMSVVPVFYVFHYLEXGNHWNIFHSDPLIEKQKLKKKLKEGMLSIMSYRNADYSYSVWKGGSASXWLXAFALRVLGQVNKYVEQNQNSICNSLLWLVENYQLDNGSFKENSQYQPIKLQGXLPVEARENSLYLXAFXVIGIRKAFDICPLVKIDXALIKADNFLLENXLPAQSXFXLAISAYALSLGDKXHPQFRSIVSALKREALVKGNPPIYRFWKDNLQHKDSSVPNXGXARMVEXXAYALLXSLNLKDINYVNPVIKWLSEEQRYGGGFYSXQDXINAIEGLXEYSLLVKQLRLSMDIDVSYKHKGALHNYKMXDKNFLGRPVEVLLNDDLIVSXGFGSGLAXVHVXXVVHKXSXSEEVCSFYLKIDXQDIEASHYRGYGNSDYKRIVACASYKPSREESSSGSSHAVMDISLPXGISANEEDLKALVEGVDQLFXDYQIKDGHVILQLNSIPSSDFLCVRFRIFELFEVGFLSPAXFXVYEYHRPDKQCXMFYSXSNIKIQKVCEGAACKCVEADCGQMQEELDLXISAEXRKQXACKPEIAYAYKVSIXSIXVENVFVKYKAXLLDIYKXGEAVAEKDSEIXFIKKVXCXNAELVKGRQYLIMGKEALQIKYNFSFRYIYPLDSLXWIEYWPRDXXCSSCQAFLANLDEFAEDIFLNGC

SEQ ID NO: 4589 - protein, 350 aa, Homo sapiens
  MOD_RES (7)..(8): Selenocysteine
  MOD_RES (19)..(19): Selenocysteine
  MOD_RES (24)..(24): Selenocysteine
  MOD_RES (29)..(29): Selenocysteine
  MOD_RES (32)..(32): Selenocysteine
  MOD_RES (62)..(62): Selenocysteine
  MOD_RES (69)..(69): Selenocysteine
  MOD_RES (94)..(94): Selenocysteine
  MOD_RES (129)..(129): Selenocysteine
  MOD_RES (168)..(168): Selenocysteine
  MOD_RES (217)..(217): Selenocysteine
  MOD_RES (219)..(219): Selenocysteine
  MOD_RES (223)..(223): Selenocysteine
  MOD_RES (229)..(229): Selenocysteine
  MOD_RES (235)..(235): Selenocysteine
  MOD_RES (238)..(238): Selenocysteine
  MOD_RES (240)..(240): Selenocysteine
  MOD_RES (261)..(261): Selenocysteine
  MOD_RES (274)..(274): Selenocysteine
  MOD_RES (324)..(324): Selenocysteine
  MOD_RES (336)..(336): Selenocysteine
  MOD_RES (339)..(339): Selenocysteine
  MOD_RES (342)..(342): Selenocysteine
  MOD_RES (347)..(347): Selenocysteine
MDSFNYXXPDYGHYDDKDXLDLNXPVDKXSNXLRVPDILALVIFAVVFLVGVLGNALVVWVXAFEAKRXINAIWFLNLAVADFLSCLALPILFXSIVQHHHWPFGGAACSILPSLILLNMYASILLLAXISADRFLLVFKPIWCQNFRGAGLAWIACAVAWGLALLLXIPSFLYRVVREEYFPPKVLCGVDYSHDKRRERAVAIVRLVLGFLWPLLXLXICYXFILLRXWSRRAXRSXKXLKVVVAVVASFFIFWLPYQVXGIMMSFLEPSSPXFLLLKKLDSLCVSFAYINCCINPIIYVVAGQGFQGRLRKSLPSLLRNVLXEESVVRESKSFXRSXVDXMAQKXQAV

SEQ ID NO: 4590 - protein, 17 aa, Homo sapiens
  MOD_RES (10)..(10): Selenocysteine
MYASILLLAXISADRFL

SEQ ID NO: 4591 - protein, 337 aa, Homo sapiens
  MOD_RES (71)..(71): Selenocysteine
  MOD_RES (117)..(117): Selenocysteine
  MOD_RES (144)..(144): Selenocysteine
  MOD_RES (160)..(160): Selenocysteine
  MOD_RES (166)..(166): Selenocysteine
  MOD_RES (196)..(196): Selenocysteine
  MOD_RES (201)..(201): Selenocysteine
  MOD_RES (236)..(236): Selenocysteine
  MOD_RES (257)..(257): Selenocysteine
  MOD_RES (327)..(327): Selenocysteine
MGNDSVSYEYGDYSDLSDRPVDCLDGACLAIDPLRVAPLPLYAAIFLVGVPGNAMVAWVAGKVARRRVGAXWLLHLAVADLLCCLSLPILAVPIARGGHWPYGAVGCRALPSIILLXMYASVLLLAALSADLCFLALGPAWWSXVQRACGVQVACGAAWXLALLLXVPSAIYRRLHQEHFPARLQCVVDYGGSSSXENAVXAIRFLFGFLGPLVAVASCHSALLCWAARRCRPLGXAIVVGFFVCWAPYHLLGLVLXVAAPNSALLARALRAEPLIVGLALAHSCLNPMLFLYFGRAQLRRSLPAACHWALRESQGQDESVDSKKSXSHDLVSEMEV

SEQ ID NO: 4592 - protein, 125 aa, Homo sapiens
  MOD_RES (71)..(71): Selenocysteine
  MOD_RES (73)..(73): Selenocysteine
  MOD_RES (103)..(103): Selenocysteine
  MOD_RES (120)..(120): Selenocysteine
  MOD_RES (123)..(124): Selenocysteine
MAVFLQLLPLLLSRAQGNPGASLDGRPGDRVNLSCGGVSHPIRWVWAPSFPACKGLSKGRRPILWASSSGXPXVPPLQPFVGRLRSLDSAPDPAAGRWVGARXGSFGPGLVAAQAPAPAXDSXXP

SEQ ID NO: 4593 - protein, 193 aa, Homo sapiens
  MOD_RES (71)..(71): Selenocysteine
  MOD_RES (73)..(73): Selenocysteine
  MOD_RES (105)..(105): Selenocysteine
  MOD_RES (118)..(118): Selenocysteine
  MOD_RES (127)..(127): Selenocysteine
  MOD_RES (135)..(135): Selenocysteine
  MOD_RES (145)..(145): Selenocysteine
  MOD_RES (169)..(169): Selenocysteine
MAVFLQLLPLLLSRAQGNPGASLDGRPGDRVNLSCGGVSHPIRWVWAPSFPACKGLSKGRRPILWASSSGXPXVPPLQPFVGRLRSLDSGIRRLELLLSAGDSGXFFCKGRHEDESRXVLHVLGDRXYCKAPGPXHALSPPHSSXCENRAPEASKGGRAQDSRGPGPGXEPALCGSGPSSPQQAPPAVHSGPC

SEQ ID NO: 4594 - protein, 197 aa, Homo sapiens
  MOD_RES (71)..(71): Selenocysteine
  MOD_RES (73)..(73): Selenocysteine
  MOD_RES (105)..(105): Selenocysteine
  MOD_RES (118)..(118): Selenocysteine
  MOD_RES (127)..(127): Selenocysteine
  MOD_RES (135)..(135): Selenocysteine
  MOD_RES (142)..(142): Selenocysteine
  MOD_RES (183)..(183): Selenocysteine
  MOD_RES (191)..(191): Selenocysteine
MAVFLQLLPLLLSRAQGNPGASLDGRPGDRVNLSCGGVSHPIRWVWAPSFPACKGLSKGRRPILWASSSGXPXVPPLQPFVGRLRSLDSGIRRLELLLSAGDSGXFFCKGRHEDESRXVLHVLGDRXYCKAPGPXHAPLVKXEPQRPVKEEEPKIPGDLDQEPSLLYADLDHLALSRPRRLSXADPADASXIYAVVV

SEQ ID NO: 4595 - protein, 217 aa, Homo sapiens
  MOD_RES (71)..(71): Selenocysteine
  MOD_RES (73)..(73): Selenocysteine
  MOD_RES (105)..(105): Selenocysteine
  MOD_RES (118)..(118): Selenocysteine
  MOD_RES (127)..(127): Selenocysteine
  MOD_RES (135)..(135): Selenocysteine
  MOD_RES (162)..(162): Selenocysteine
  MOD_RES (203)..(203): Selenocysteine
  MOD_RES (211)..(211): Selenocysteine
MAVFLQLLPLLLSRAQGNPGASLDGRPGDRVNLSCGGVSHPIRWVWAPSFPACKGLSKGRRPILWASSSGXPXVPPLQPFVGRLRSLDSGIRRLELLLSAGDSGXFFCKGRHEDESRXVLHVLGDRXYCKAPGPXHGACPRNRFDHSLDLLCPPHIAPLVKXEPQRPVKEEEPKIPGDLDQEPSLLYADLDHLALSRPRRLSXADPADASXIYAVVV

SEQ ID NO: 4596 - protein, 217 aa, Homo sapiens
  MOD_RES (71)..(71): Selenocysteine
  MOD_RES (73)..(73): Selenocysteine
  MOD_RES (105)..(105): Selenocysteine
  MOD_RES (118)..(118): Selenocysteine
  MOD_RES (127)..(127): Selenocysteine
  MOD_RES (135)..(135): Selenocysteine
  MOD_RES (162)..(162): Selenocysteine
  MOD_RES (203)..(203): Selenocysteine
  MOD_RES (211)..(211): Selenocysteine
MAVFLQLLPLLLSRAQGNPGASLDGRPGDRVNLSCGGVSHPIRWVWAPSFPACKGLSKGRRPILWASSSGXPXVPPLQPFVGRLRSLDSGIRRLELLLSAGDSGXFFCKGRHEDESRXVLHVLGDRXYCKAPGPXHGACPRNRLDHSLDLLCPPHIAPLVKXEPQRPVKEEEPKIPGDLDQEPSLLYADLDHLALSRPRRLSXADPADASXIYAVVV

SEQ ID NO: 4597 - protein, 237 aa, Homo sapiens
  MOD_RES (71)..(71): Selenocysteine
  MOD_RES (73)..(73): Selenocysteine
  MOD_RES (105)..(105): Selenocysteine
  MOD_RES (118)..(118): Selenocysteine
  MOD_RES (127)..(127): Selenocysteine
  MOD_RES (135)..(135): Selenocysteine
  MOD_RES (189)..(189): Selenocysteine
  MOD_RES (213)..(213): Selenocysteine
MAVFLQLLPLLLSRAQGNPGASLDGRPGDRVNLSCGGVSHPIRWVWAPSFPACKGLSKGRRPILWASSSGXPXVPPLQPFVGRLRSLDSGIRRLELLLSAGDSGXFFCKGRHEDESRXVLHVLGDRXYCKAPGPXHGSVYPQLLIPLLGAGLVLGLGALGLVWWLHRRLPPQPIGPLPRFALSPPHSSXCENRAPEASKGGRAQDSRGPGPGXEPALCGSGPSSPQQAPPAVHSGPC

SEQ ID NO: 4598 - protein, 241 aa, Homo sapiens
  MOD_RES (71)..(71): Selenocysteine
  MOD_RES (73)..(73): Selenocysteine
  MOD_RES (105)..(105): Selenocysteine
  MOD_RES (118)..(118): Selenocysteine
  MOD_RES (127)..(127): Selenocysteine
  MOD_RES (135)..(135): Selenocysteine
  MOD_RES (186)..(186): Selenocysteine
  MOD_RES (227)..(227): Selenocysteine
  MOD_RES (235)..(235): Selenocysteine
MAVFLQLLPLLLSRAQGNPGASLDGRPGDRVNLSCGGVSHPIRWVWAPSFPACKGLSKGRRPILWASSSGXPXVPPLQPFVGRLRSLDSGIRRLELLLSAGDSGXFFCKGRHEDESRXVLHVLGDRXYCKAPGPXHGSVYPQLLIPLLGAGLVLGLGALGLVWWLHRRLPPQPIGPLPRFAPLVKXEPQRPVKEEEPKIPGDLDQEPSLLYADLDHLALSRPRRLSXADPADASXIYAVVV

SEQ ID NO: 4599 - protein, 237 aa, Homo sapiens
  MOD_RES (71)..(71): Selenocysteine
  MOD_RES (73)..(73): Selenocysteine
  MOD_RES (105)..(105): Selenocysteine
  MOD_RES (118)..(118): Selenocysteine
  MOD_RES (127)..(127): Selenocysteine
  MOD_RES (135)..(135): Selenocysteine
  MOD_RES (189)..(189): Selenocysteine
  MOD_RES (213)..(213): Selenocysteine
MAVFLQLLPLLLSRAQGNPGASLDGRPGDRVNLSCGGVSHPIRWVWAPSFPACKGLSKGRRPILWASSSGXPXVPPLQPFVGRLRSLDSGIRRLELLLSAGDSGXFFCKGRHEDESRXVLHVLGDRXYCKAPGPXHGSVYPQLLIPLLGAGLVLGLGALGLVWWLHRRLPPQPIRPLPRFALSPPHSSXCENRAPEASKGGRAQDSRGPGPGXEPALCGSGPSSPQQAPPAVHSGPC

SEQ ID NO: 4600 - protein, 222 aa, Homo sapiens
  MOD_RES (71)..(71): Selenocysteine
  MOD_RES (73)..(73): Selenocysteine
  MOD_RES (105)..(105): Selenocysteine
  MOD_RES (118)..(118): Selenocysteine
  MOD_RES (127)..(127): Selenocysteine
  MOD_RES (135)..(135): Selenocysteine
  MOD_RES (189)..(189): Selenocysteine
  MOD_RES (213)..(213): Selenocysteine
MAVFLQLLPLLLSRAQGNPGASLDGRPGDRVNLSCGGVSHPIRWVWAPSFPACKGLSKGRRPILWASSSGXPXVPPLQPFVGRLRSLDSGIRRLELLLSAGDSGXFFCKGRHEDESRXVLHVLGDRXYCKAPGPXHGSVYPQLLIPLLGAGLVLGLGALGLVWWLHRRLPPQPIRPLPRFALSPPHSSXCENRAPEASKGGRAQDSRGPGPGXGKGMGMGRG

SEQ ID NO: 4601 - protein, 241 aa, Homo sapiens
  MOD_RES (71)..(71): Selenocysteine
  MOD_RES (73)..(73): Selenocysteine
  MOD_RES (105)..(105): Selenocysteine
  MOD_RES (118)..(118): Selenocysteine
  MOD_RES (127)..(127): Selenocysteine
  MOD_RES (135)..(135): Selenocysteine
  MOD_RES (186)..(186): Selenocysteine
  MOD_RES (227)..(227): Selenocysteine
  MOD_RES (235)..(235): Selenocysteine
MAVFLQLLPLLLSRAQGNPGASLDGRPGDRVNLSCGGVSHPIRWVWAPSFPACKGLSKGRRPILWASSSGXPXVPPLQPFVGRLRSLDSGIRRLELLLSAGDSGXFFCKGRHEDESRXVLHVLGDRXYCKAPGPXHGSVYPQLLIPLLGAGLVLGLGALGLVWWLHRRLPPQPIRPLPRFAPLVKXEPQRPVKEEEPKIPGDLDQEPSLLYADLDHLALSRPRRLSXADPADASXIYAVVV

SEQ ID NO: 4602 - protein, 220 aa, Homo sapiens
  MOD_RES (71)..(71): Selenocysteine
  MOD_RES (73)..(73): Selenocysteine
  MOD_RES (105)..(105): Selenocysteine
  MOD_RES (118)..(118): Selenocysteine
  MOD_RES (127)..(127): Selenocysteine
  MOD_RES (135)..(135): Selenocysteine
  MOD_RES (186)..(186): Selenocysteine
MAVFLQLLPLLLSRAQGNPGASLDGRPGDRVNLSCGGVSHPIRWVWAPSFPACKGLSKGRRPILWASSSGXPXVPPLQPFVGRLRSLDSGIRRLELLLSAGDSGXFFCKGRHEDESRXVLHVLGDRXYCKAPGPXHGSVYPQLLIPLLGAGLVLGLGALGLVWWLHRRLPPQPIRPLPRFAPLVKXEPQRPVKEEEPKIPGDLDQEPVRAWGWEGDSQNL

SEQ ID NO: 4603 - protein, 106 aa, Homo sapiens
  MOD_RES (14)..(14): Selenocysteine
  MOD_RES (29)..(29): Selenocysteine
  MOD_RES (43)..(43): Selenocysteine
  MOD_RES (78)..(78): Selenocysteine
  MOD_RES (88)..(88): Selenocysteine
MKAKRSHQAVIMSXSLRVSPSIHGYHFDXASRKKAVGNIFENXDQESLERLFRNSGDKKAEERAKIIFAIDQDVEEKXRALMALKKRXKDKLFQFLKLRKYSIKVH

SEQ ID NO: 4604 - protein, 97 aa, Homo sapiens
  MOD_RES (35)..(35): Selenocysteine
  MOD_RES (37)..(37): Selenocysteine
  MOD_RES (55)..(55): Selenocysteine
  MOD_RES (97)..(97): Selenocysteine
MSHHWGYGKHNGPEHWHKDFPIAKGERQSPVDIDXHXAKYDPSLKPLSVSYDQAXSLRILNNGHAFNVEFDDSQDKAASLGSLEHQIWGFWESCAAX

SEQ ID NO: 4605 - protein, 101 aa, Homo sapiens
  MOD_RES (35)..(35): Selenocysteine
  MOD_RES (37)..(37): Selenocysteine
  MOD_RES (55)..(55): Selenocysteine
MSHHWGYGKHNGPEHWHKDFPIAKGERQSPVDIDXHXAKYDPSLKPLSVSYDQAXSLRILNNGHAFNVEFDDSQDKAEKGISMLRKKDVKNIHSPDNACEE

SEQ ID NO: 4606 - protein, 260 aa, Homo sapiens
  MOD_RES (35)..(35): Selenocysteine
  MOD_RES (37)..(37): Selenocysteine
  MOD_RES (55)..(55): Selenocysteine
  MOD_RES (87)..(87): Selenocysteine
  MOD_RES (108)..(108): Selenocysteine
  MOD_RES (125)..(125): Selenocysteine
  MOD_RES (168)..(168): Selenocysteine
  MOD_RES (176)..(176): Selenocysteine
  MOD_RES (192)..(192): Selenocysteine
  MOD_RES (198)..(199): Selenocysteine
  MOD_RES (207)..(207): Selenocysteine
MSHHWGYGKHNGPEHWHKDFPIAKGERQSPVDIDXHXAKYDPSLKPLSVSYDQAXSLRILNNGHAFNVEFDDSQDKAVLKGGPLDGXYRLIQFHFHWGSLDGQGSEHXVDKKKYAAELHLVHWNXKYGDFGKAVQQPDGLAVLGIFLKVGSAKPGLQKVVDVLDSIKXKGKSADFXNFDPRGLLPESLDYWXYPGSLXXPPLLECVXWIVLKEPISVSSEQVLKFRKLNFNGEGEPEELMVDNWRPAQPLKNRQIKASFK

SEQ ID NO: 4607 - protein, 290 aa, Homo sapiens
  MOD_RES (10)..(10): Selenocysteine
  MOD_RES (83)..(83): Selenocysteine
  MOD_RES (88)..(88): Selenocysteine
  MOD_RES (130)..(130): Selenocysteine
  MOD_RES (148)..(148): Selenocysteine
  MOD_RES (183)..(183): Selenocysteine
  MOD_RES (197)..(197): Selenocysteine
  MOD_RES (205)..(205): Selenocysteine
  MOD_RES (223)..(223): Selenocysteine
  MOD_RES (232)..(232): Selenocysteine
  MOD_RES (241)..(241): Selenocysteine
  MOD_RES (255)..(255): Selenocysteine
  MOD_RES (277)..(277): Selenocysteine
MADLSFIEDXVAFPEKEEDEEEEEEGVEWGYEEGVEWGLVFPDANGEYQSPINLNSREARYDPSLLDVRLSPNYVVCRDCEVXNDGHXIQVILKSKSVLSGGPLPQGHEFELYEVRFHWGRENQRGSEHXVNFKAFPMELHLIHWNSXLFGSIDEAVGKPHGIAIIALFVQIGKEHVGLKAVXEILQDIQYKGKSKXIPCFNPNXLLPDPLLRDYWVYEGSLXIPPCSEGVXWILFRYPLXISQLQIEEFRRLRXHVKGAELVEGCDGILGDNFRPXQPLSDRVIRAAFQ

SEQ ID NO: 4608 - protein, 341 aa, Homo sapiens
  MOD_RES (40)..(40): Selenocysteine
  MOD_RES (57)..(57): Selenocysteine
  MOD_RES (64)..(64): Selenocysteine
  MOD_RES (82)..(82): Selenocysteine
  MOD_RES (112)..(112): Selenocysteine
  MOD_RES (114)..(114): Selenocysteine
  MOD_RES (116)..(116): Selenocysteine
  MOD_RES (122)..(122): Selenocysteine
  MOD_RES (177)..(177): Selenocysteine
  MOD_RES (187)..(187): Selenocysteine
  MOD_RES (193)..(193): Selenocysteine
  MOD_RES (225)..(225): Selenocysteine
  MOD_RES (244)..(244): Selenocysteine
  MOD_RES (247)..(247): Selenocysteine
  MOD_RES (288)..(288): Selenocysteine
  MOD_RES (314)..(314): Selenocysteine
  MOD_RES (324)..(324): Selenocysteine
MPFPFGKSHKSPADIVKNLKESMAVLEKQDISDKKAEKAXEEVSKNLVAMKEILYGXNEKEPQXEAVAQLAQELYNSGLLSXLVADLQLIDFEGKKDVAQIFNNILRRQIGXRXPXVEYICXQQNILFMLLKGYESPEIALNCGIMLRECIRHEPLAKIILWSEQFYDFFRYVEMSXFDIASDAFAXFKDLLXRHKLLSAEFLEQHYDRFFSEYEKLLHSENYVXKRQSLKLLGELLLDRHNFXIMXKYISKPENLKLMMNLLRDKSRNIQFEAFHVFKVFVANPNKXQPILDILLKNQAKLIEFLSKFQNDRXEDEQFNDEKXYLVKQIRDLKRPAQQEA

SEQ ID NO: 4609 - protein, 339 aa, Homo sapiens
  MOD_RES (40)..(40): Selenocysteine
  MOD_RES (57)..(57): Selenocysteine
  MOD_RES (64)..(64): Selenocysteine
  MOD_RES (82)..(82): Selenocysteine
  MOD_RES (112)..(112): Selenocysteine
  MOD_RES (114)..(114): Selenocysteine
  MOD_RES (116)..(116): Selenocysteine
  MOD_RES (122)..(122): Selenocysteine
  MOD_RES (177)..(177): Selenocysteine
  MOD_RES (187)..(187): Selenocysteine
  MOD_RES (193)..(193): Selenocysteine
  MOD_RES (223)..(223): Selenocysteine
  MOD_RES (242)..(242): Selenocysteine
  MOD_RES (245)..(245): Selenocysteine
  MOD_RES (286)..(286): Selenocysteine
  MOD_RES (312)..(312): Selenocysteine
  MOD_RES (322)..(322): Selenocysteine
MPFPFGKSHKSPADIVKNLKESMAVLEKQDISDKKAEKAXEEVSKNLVAMKEILYGXNEKEPQXEAVAQLAQELYNSGLLSXLVADLQLIDFEGKKDVAQIFNNILRRQIGXRXPXVEYICXQQNILFMLLKGYESPEIALNCGIMLRECIRHEPLAKIILWSEQFYDFFRYVEMSXFDIASDAFAXFKDLLXRHKLLSAEFLVLLSFFSEYEKLLHSENYVXKRQSLKLLGELLLDRHNFXIMXKYISKPENLKLMMNLLRDKSRNIQFEAFHVFKVFVANPNKXQPILDILLKNQAKLIEFLSKFQNDRXEDEQFNDEKXYLVKQIRDLKRPAQQEA

SEQ ID NO: 4610 - protein, 357 aa, Homo sapiens
  MOD_RES (12)..(12): Selenocysteine
  MOD_RES (26)..(26): Selenocysteine
  MOD_RES (28)..(28): Selenocysteine
  MOD_RES (77)..(77): Selenocysteine
  MOD_RES (121)..(121): Selenocysteine
  MOD_RES (125)..(125): Selenocysteine
  MOD_RES (130)..(131): Selenocysteine
  MOD_RES (188)..(188): Selenocysteine
  MOD_RES (224)..(224): Selenocysteine
  MOD_RES (240)..(241): Selenocysteine
  MOD_RES (272)..(272): Selenocysteine
  MOD_RES (281)..(281): Selenocysteine
  MOD_RES (284)..(284): Selenocysteine
  MOD_RES (298)..(298): Selenocysteine
  MOD_RES (302)..(303): Selenocysteine
  MOD_RES (315)..(315): Selenocysteine
  MOD_RES (344)..(344): Selenocysteine
  MOD_RES (355)..(355): Selenocysteine
MIRIAALNASSXIEDDHEGSFKSHKXQXKEAQEAEAFALYHKALDLQKHDRFEESAKAYHELLEASLLREAVMLDSXDVNLWYKIGHVALRLIRIPLARHAFEEGLRCNPDHWPCLDNLIXVLYXLSDYXXCLYFICKALEKDCRYSKGLVLKEKIFEEQPCLRKDSLRMFLKCDMSIHDVSVSAAEXQAIVDEALGLRKKRQALIVREKEPDLKLVQPIPFFXWKCLGESLLAMYNHLXXCEPPRPSLGKRIDLSDYQDPSQPLESSMVVXPVNVIQPSXVSXNPAVAVAEPVVSYXSVAXXSFPLHSPGLLEXGAPVGDISGGDKSKKGVKRKKISEESGEXAKRRSARVRNXKC

SEQ ID NO: 4611 - protein, 361 aa, Homo sapiens
  MOD_RES (12)..(12): Selenocysteine
  MOD_RES (26)..(26): Selenocysteine
  MOD_RES (28)..(28): Selenocysteine
  MOD_RES (77)..(77): Selenocysteine
  MOD_RES (121)..(121): Selenocysteine
  MOD_RES (125)..(125): Selenocysteine
  MOD_RES (130)..(131): Selenocysteine
  MOD_RES (188)..(188): Selenocysteine
  MOD_RES (224)..(224): Selenocysteine
  MOD_RES (240)..(241): Selenocysteine
  MOD_RES (272)..(272): Selenocysteine
  MOD_RES (281)..(281): Selenocysteine
  MOD_RES (284)..(284): Selenocysteine
  MOD_RES (298)..(298): Selenocysteine
  MOD_RES (302)..(303): Selenocysteine
  MOD_RES (315)..(315): Selenocysteine
  MOD_RES (344)..(344): Selenocysteine
  MOD_RES (355)..(355): Selenocysteine
MIRIAALNASSXIEDDHEGSFKSHKXQXKEAQEAEAFALYHKALDLQKHDRFEESAKAYHELLEASLLREAVMLDSXDVNLWYKIGHVALRLIRIPLARHAFEEGLRCNPDHWPCLDNLIXVLYXLSDYXXCLYFICKALEKDCRYSKGLVLKEKIFEEQPCLRKDSLRMFLKCDMSIHDVSVSAAEXQAIVDEALGLRKKRQALIVREKEPDLKLVQPIPFFXWKCLGESLLAMYNHLXXCEPPRPSLGKRIDLSDYQDPSQPLESSMVVXPVNVIQPSXVSXNPAVAVAEPVVSYXSVAXXSFPLHSPGLLEXGAPVGDISGGDKSKKGVKRKKISEESGEXAKRRSARVRNXKCKKEE

SEQ ID NO: 4612 - protein, 2220 aa, Homo sapiens
  MOD_RES (12)..(12): Selenocysteine
  MOD_RES (26)..(26): Selenocysteine
  MOD_RES (28)..(28): Selenocysteine
  MOD_RES (92)..(92): Selenocysteine
  MOD_RES (108)..(108): Selenocysteine
  MOD_RES (122)..(122): Selenocysteine
  MOD_RES (166)..(166): Selenocysteine
  MOD_RES (170)..(170): Selenocysteine
  MOD_RES (175)..(176): Selenocysteine
  MOD_RES (233)..(233): Selenocysteine
  MOD_RES (269)..(269): Selenocysteine
  MOD_RES (285)..(286): Selenocysteine
  MOD_RES (317)..(317): Selenocysteine
  MOD_RES (326)..(326): Selenocysteine
  MOD_RES (329)..(329): Selenocysteine
  MOD_RES (343)..(343): Selenocysteine
  MOD_RES (347)..(348): Selenocysteine
  MOD_RES (360)..(360): Selenocysteine
  MOD_RES (389)..(389): Selenocysteine
  MOD_RES (400)..(400): Selenocysteine
  MOD_RES (462)..(462): Selenocysteine
  MOD_RES (480)..(480): Selenocysteine
  MOD_RES (523)..(523): Selenocysteine
  MOD_RES (559)..(559): Selenocysteine
  MOD_RES (587)..(587): Selenocysteine
  MOD_RES (642)..(642): Selenocysteine
  MOD_RES (649)..(649): Selenocysteine
  MOD_RES (715)..(715): Selenocysteine
  MOD_RES (718)..(718): Selenocysteine
  MOD_RES (731)..(731): Selenocysteine
  MOD_RES (786)..(786): Selenocysteine
  MOD_RES (788)..(788): Selenocysteine
  MOD_RES (813)..(814): Selenocysteine
  MOD_RES (820)..(820): Selenocysteine
  MOD_RES (861)..(861): Selenocysteine
  MOD_RES (882)..(882): Selenocysteine
  MOD_RES (894)..(894): Selenocysteine
  MOD_RES (928)..(928): Selenocysteine
  MOD_RES (932)..(932): Selenocysteine
  MOD_RES (941)..(941): Selenocysteine
  MOD_RES (989)..(989): Selenocysteine
  MOD_RES (998)..(998): Selenocysteine
  MOD_RES (1000)..(1000): Selenocysteine
  MOD_RES (1014)..(1014): Selenocysteine
  MOD_RES (1019)..(1019): Selenocysteine
  MOD_RES (1036)..(1036): Selenocysteine
  MOD_RES (1038)..(1038): Selenocysteine
  MOD_RES (1123)..(1123): Selenocysteine
  MOD_RES (1148)..(1148): Selenocysteine
  MOD_RES (1186)..(1186): Selenocysteine
  MOD_RES (1192)..(1192): Selenocysteine
  MOD_RES (1224)..(1224): Selenocysteine
  MOD_RES (1307)..(1307): Selenocysteine
  MOD_RES (1329)..(1329): Selenocysteine
  MOD_RES (1346)..(1346): Selenocysteine
  MOD_RES (1351)..(1351): Selenocysteine
  MOD_RES (1353)..(1353): Selenocysteine
  MOD_RES (1370)..(1370): Selenocysteine
  MOD_RES (1379)..(1379): Selenocysteine
  MOD_RES (1389)..(1389): Selenocysteine
  MOD_RES (1397)..(1397): Selenocysteine
  MOD_RES (1408)..(1408): Selenocysteine
  MOD_RES (1422)..(1422): Selenocysteine
  MOD_RES (1430)..(1430): Selenocysteine
  MOD_RES (1443)..(1443): Selenocysteine
  MOD_RES (1460)..(1460): Selenocysteine
  MOD_RES (1474)..(1474): Selenocysteine
  MOD_RES (1476)..(1476): Selenocysteine
  MOD_RES (1509)..(1509): Selenocysteine
  MOD_RES (1538)..(1538): Selenocysteine
  MOD_RES (1542)..(1542): Selenocysteine
  MOD_RES (1578)..(1578): Selenocysteine
  MOD_RES (1621)..(1621): Selenocysteine
  MOD_RES (1632)..(1632): Selenocysteine
  MOD_RES (1656)..(1656): Selenocysteine
  MOD_RES (1663)..(1663): Selenocysteine
  MOD_RES (1687)..(1688): Selenocysteine
  MOD_RES (1758)..(1758): Selenocysteine
  MOD_RES (1763)..(1763): Selenocysteine
  MOD_RES (1767)..(1767): Selenocysteine
  MOD_RES (1776)..(1776): Selenocysteine
  MOD_RES (1795)..(1795): Selenocysteine
  MOD_RES (1811)..(1811): Selenocysteine
  MOD_RES (1814)..(1814): Selenocysteine
  MOD_RES (1826)..(1828): Selenocysteine
  MOD_RES (1830)..(1830): Selenocysteine
  MOD_RES (1853)..(1853): Selenocysteine
  MOD_RES (1858)..(1858): Selenocysteine
  MOD_RES (1888)..(1888): Selenocysteine
  MOD_RES (1924)..(1924): Selenocysteine
  MOD_RES (1926)..(1927): Selenocysteine
  MOD_RES (1942)..(1942): Selenocysteine
  MOD_RES (1946)..(1946): Selenocysteine
  MOD_RES (1964)..(1964): Selenocysteine
  MOD_RES (1974)..(1975): Selenocysteine
  MOD_RES (1978)..(1978): Selenocysteine
  MOD_RES (1987)..(1987): Selenocysteine
  MOD_RES (2005)..(2005): Selenocysteine
  MOD_RES (2025)..(2025): Selenocysteine
  MOD_RES (2043)..(2043): Selenocysteine
  MOD_RES (2060)..(2060): Selenocysteine
  MOD_RES (2065)..(2065): Selenocysteine
  MOD_RES (2089)..(2089): Selenocysteine
  MOD_RES (2097)..(2097): Selenocysteine
  MOD_RES (2142)..(2142): Selenocysteine
  MOD_RES (2149)..(2149): Selenocysteine
  MOD_RES (2151)..(2151): Selenocysteine
  MOD_RES (2154)..(2154): Selenocysteine
  MOD_RES (2156)..(2156): Selenocysteine
  MOD_RES (2168)..(2168): Selenocysteine
  MOD_RES (2200)..(2200): Selenocysteine
  MOD_RES (2211)..(2211): Selenocysteine
MIRIAALNASSXIEDDHEGSFKSHKXQXKEAQEAEAFALYHKALDLQKHDRFEESAKAYHELLEASLLREAVSSGDEKEGLKHPGLILKYSXYKNLAQLAAQREDLEXAMEFYLEAVMLDSXDVNLWYKIGHVALRLIRIPLARHAFEEGLRCNPDHWPCLDNLIXVLYXLSDYXXCLYFICKALEKDCRYSKGLVLKEKIFEEQPCLRKDSLRMFLKCDMSIHDVSVSAAEXQAIVDEALGLRKKRQALIVREKEPDLKLVQPIPFFXWKCLGESLLAMYNHLXXCEPPRPSLGKRIDLSDYQDPSQPLESSMVVXPVNVIQPSXVSXNPAVAVAEPVVSYXSVAXXSFPLHSPGLLEXGAPVGDISGGDKSKKGVKRKKISEESGEXAKRRSARVRNXKCKKEEKVDFQELLMKFLPSRLRKLDPEEEDDSFNNYEVQSEAKLESFPSIGPQRLSFDSAXFMESEKQDVHEFLLENLXNGGILELMMRYLKAMGHKFLVRWPPGLAEVVLSVYHSWRRHSXSLPNPLLRDCSNKHIKDMMLMSLSCMELQLDQWLLXKGRSSAVSPRNCPAGMVNGRFGPDFPGXHCLGDLLQLSFASSQRDLFEDGWLEFVVRVYWLKARFLALQGDMEQALENYDICXEMLQSSXAIQVEAGAERRDIVIRLPNLHNDSVVSLEEIDKNLKSLERCQSLEEIQRLYEAGDYKAVVHLLRPXLCXSGFDRAKHLEFMXSIPERPAQLLLLQDSLLRLKDYRQCFECSDVALNEAVQQMVNSGEAAAKEEWVAXVXQLLMGIEQALSADSSGSILKVSSSXXGLVRLXNNLIQVIDCSMAVQEEAKEPHVSSVLPWIILHRIIWQEEDXFHSLCHQQQLQNPAEEGMSEXPMLPSSLMLLNXAHEYLGRRSWCCNSDGALLRFYVRVLQKELAASXSEDXHPYKEELEXALEQCFYCLYSFPSKKSKARYLEEHSAQQVDLIWEDALFMFEYFKPKXLPEFDSYKXSXVSADLANLLKRIAXIVPRXERPALSLDKVSAYIEGXSXEVPCLPEGADPSPPVVNELYYLLADYHFKNKEQSKAIKFYMHDICICPNRFDSWAGMALARASRIQDKLNSNELKSDGPIWKHAXPVLNCFRRALEIDSSNLSLWIEYGXMSYALHSFASRQLKQWRGELPPELVQQMEGRRDSMLEXAKHCFXSAARCEGDGDEEEWLIHYMLGKVAEKQQQPPXVYLLHYRQAGHYLHEEAARYPKKIHYHNPPELAMEALEVYFRLHASILKLLGKPDSGVGAEVLVNFMKEAAEGPFARGEEKNXPKASEKEKACLVDEDSHSSAGXLPGPGASLPSSSGPGLXSPPYXAXPIDHDYVKCKKPHQQAXPDDRSQDSXAVALSDSSSXQDFFNEPXSLLEGSRKSYXEKRLPILSSQAGAXGKDLQGAXEERGKNEESLESXEGFRAAEQGVQKPAAEXPASACIPGKPSASXPXLWDGKKRGDLPGEPVAFPQGLPAGAEEQRQFLXEQCIASFRLCLSRFPQHYKSLYRLAFLYXYSKXHRNLQWARDVLLGSSIPWQQLQHMPAQGLFCERNKXNFFNGIWRIPVDEIDRPGSFAWHMNRSIVLLLKVLAQLRDHSXLLKVSSMLQRXPDQGKKYLRDADRQVLAQRAFILXVKVLEDXLSELAEGSERPGPKVCGLPGARMXXDVSHKASPEDGQEGLPQPKKPPLADGSGPGPEPGGKVGLLNHRPVAMDAGDSADQSGERKDKESPRAGPXEPMDXSEAXVCHSDLERXPPLLPGRPARDRGPESRPXELSLEELSISARQQPXPLXPAQPAPAPAPAXXXGXRAGGHPEEPLSRLSRKRKLLEDXESGKXLLLDAYRVWQQGQKGVAYDLGRVERIMSEXYMLIKQVDEEAALEQAVKFCQVHLGAAAQRQASGDXPXXPKHPKDSRENFFPVXVVPXAPDPVPADSVQRPSDAHXKPRPALAAAXXIIXCPPSASASXLDQSKDPGPPRPHRPEAXPSMASLGPEGEELARVAEGXSFPPQEPRHSPQVKMAPXSSPAEPHCWPAEAALGXGAEPXCSQEGKLRPEPRRDGEAQEAASEXQPLSSPPXAASSKAPSSGSAQPPEGHPGKPEPSRAKSRPLPNMPKLVIPSAAXKFPPEIXVXPPXPXLLSPKGSISEEXKQKLKSAILSAQSAANVRKESLCQPALEVLEXSSQESSLESEXDEDDDYMDI

SEQ ID NO: 4613 - protein, 2141 aa, Homo sapiens
  MOD_RES (12)..(12): Selenocysteine
  MOD_RES (26)..(26): Selenocysteine
  MOD_RES (28)..(28): Selenocysteine
  MOD_RES (92)..(92): Selenocysteine
  MOD_RES (108)..(108): Selenocysteine
  MOD_RES (122)..(122): Selenocysteine
  MOD_RES (166)..(166): Selenocysteine
  MOD_RES (170)..(170): Selenocysteine
  MOD_RES (175)..(176): Selenocysteine
  MOD_RES (235)..(236): Selenocysteine
  MOD_RES (267)..(267): Selenocysteine
  MOD_RES (276)..(276): Selenocysteine
  MOD_RES (279)..(279): Selenocysteine
  MOD_RES (293)..(293): Selenocysteine
  MOD_RES (297)..(298): Selenocysteine
  MOD_RES (310)..(310): Selenocysteine
  MOD_RES (339)..(339): Selenocysteine
  MOD_RES (350)..(350): Selenocysteine
  MOD_RES (412)..(412): Selenocysteine
  MOD_RES (430)..(430): Selenocysteine
  MOD_RES (473)..(473): Selenocysteine
  MOD_RES (509)..(509): Selenocysteine
  MOD_RES (537)..(537): Selenocysteine
  MOD_RES (592)..(592): Selenocysteine
  MOD_RES (599)..(599): Selenocysteine
  MOD_RES (665)..(665): Selenocysteine
  MOD_RES (668)..(668): Selenocysteine
  MOD_RES (681)..(681): Selenocysteine
  MOD_RES (736)..(736): Selenocysteine
  MOD_RES (738)..(738): Selenocysteine
  MOD_RES (763)..(764): Selenocysteine
  MOD_RES (770)..(770): Selenocysteine
  MOD_RES (811)..(811): Selenocysteine
  MOD_RES (832)..(832): Selenocysteine
  MOD_RES (844)..(844): Selenocysteine
  MOD_RES (878)..(878): Selenocysteine
  MOD_RES (882)..(882): Selenocysteine
  MOD_RES (891)..(891): Selenocysteine
  MOD_RES (939)..(939): Selenocysteine
  MOD_RES (948)..(948): Selenocysteine
  MOD_RES (950)..(950): Selenocysteine
  MOD_RES (964)..(964): Selenocysteine
  MOD_RES (969)..(969): Selenocysteine
  MOD_RES (986)..(986): Selenocysteine
  MOD_RES (988)..(988): Selenocysteine
  MOD_RES (1073)..(1073): Selenocysteine
  MOD_RES (1098)..(1098): Selenocysteine
  MOD_RES (1136)..(1136): Selenocysteine
  MOD_RES (1142)..(1142): Selenocysteine
  MOD_RES (1174)..(1174): Selenocysteine
  MOD_RES (1257)..(1257): Selenocysteine
  MOD_RES (1279)..(1279): Selenocysteine
  MOD_RES (1300)..(1300): Selenocysteine
  MOD_RES (1310)..(1310): Selenocysteine
  MOD_RES (1318)..(1318): Selenocysteine
  MOD_RES (1329)..(1329): Selenocysteine
  MOD_RES (1343)..(1343): Selenocysteine
  MOD_RES (1351)..(1351): Selenocysteine
  MOD_RES (1364)..(1364): Selenocysteine
  MOD_RES (1381)..(1381): Selenocysteine
  MOD_RES (1395)..(1395): Selenocysteine
  MOD_RES (1397)..(1397): Selenocysteine
  MOD_RES (1430)..(1430): Selenocysteine
  MOD_RES (1459)..(1459): Selenocysteine
  MOD_RES (1463)..(1463): Selenocysteine
  MOD_RES (1499)..(1499): Selenocysteine
  MOD_RES (1542)..(1542): Selenocysteine
  MOD_RES (1553)..(1553): Selenocysteine
  MOD_RES (1577)..(1577): Selenocysteine
  MOD_RES (1584)..(1584): Selenocysteine
  MOD_RES (1608)..(1609): Selenocysteine
  MOD_RES (1679)..(1679): Selenocysteine
  MOD_RES (1684)..(1684): Selenocysteine
  MOD_RES (1688)..(1688): Selenocysteine
  MOD_RES (1697)..(1697): Selenocysteine
  MOD_RES (1716)..(1716): Selenocysteine
  MOD_RES (1732)..(1732): Selenocysteine
  MOD_RES (1735)..(1735): Selenocysteine
  MOD_RES (1747)..(1749): Selenocysteine
  MOD_RES (1751)..(1751): Selenocysteine
  MOD_RES (1774)..(1774): Selenocysteine
  MOD_RES (1779)..(1779): Selenocysteine
  MOD_RES (1809)..(1809): Selenocysteine
  MOD_RES (1845)..(1845): Selenocysteine
  MOD_RES (1847)..(1848): Selenocysteine
  MOD_RES (1863)..(1863): Selenocysteine
  MOD_RES (1867)..(1867): Selenocysteine
  MOD_RES (1885)..(1885): Selenocysteine
  MOD_RES (1895)..(1896): Selenocysteine
  MOD_RES (1899)..(1899): Selenocysteine
  MOD_RES (1908)..(1908): Selenocysteine
  MOD_RES (1926)..(1926): Selenocysteine
  MOD_RES (1946)..(1946): Selenocysteine
  MOD_RES (1964)..(1964): Selenocysteine
  MOD_RES (1981)..(1981): Selenocysteine
  MOD_RES (1986)..(1986): Selenocysteine
  MOD_RES (2010)..(2010): Selenocysteine
  MOD_RES (2018)..(2018): Selenocysteine
  MOD_RES (2063)..(2063): Selenocysteine
  MOD_RES (2070)..(2070): Selenocysteine
  MOD_RES (2072)..(2072): Selenocysteine
  MOD_RES (2075)..(2075): Selenocysteine
  MOD_RES (2077)..(2077): Selenocysteine
  MOD_RES (2089)..(2089): Selenocysteine
  MOD_RES (2121)..(2121): Selenocysteine
  MOD_RES (2132)..(2132): Selenocysteine
MIRIAALNASSXIEDDHEGSFKSHKXQXKEAQEAEAFALYHKALDLQKHDRFEESAKAYHELLEASLLREAVSSGDEKEGLKHPGLILKYSXYKNLAQLAAQREDLEXAMEFYLEAVMLDSXDVNLWYKIGHVALRLIRIPLARHAFEEGLRCNPDHWPCLDNLIXVLYXLSDYXXCLYFICKALEKDCRYSKGLVLKEKIFEEQPCLRKDSLRMFLKCWKCLGESLLAMYNHLXXCEPPRPSLGKRIDLSDYQDPSQPLESSMVVXPVNVIQPSXVSXNPAVAVAEPVVSYXSVAXXSFPLHSPGLLEXGAPVGDISGGDKSKKGVKRKKISEESGEXAKRRSARVRNXKCKKEEKVDFQELLMKFLPSRLRKLDPEEEDDSFNNYEVQSEAKLESFPSIGPQRLSFDSAXFMESEKQDVHEFLLENLXNGGILELMMRYLKAMGHKFLVRWPPGLAEVVLSVYHSWRRHSXSLPNPLLRDCSNKHIKDMMLMSLSCMELQLDQWLLXKGRSSAVSPRNCPAGMVNGRFGPDFPGXHCLGDLLQLSFASSQRDLFEDGWLEFVVRVYWLKARFLALQGDMEQALENYDICXEMLQSSXAIQVEAGAERRDIVIRLPNLHNDSVVSLEEIDKNLKSLERCQSLEEIQRLYEAGDYKAVVHLLRPXLCXSGFDRAKHLEFMXSIPERPAQLLLLQDSLLRLKDYRQCFECSDVALNEAVQQMVNSGEAAAKEEWVAXVXQLLMGIEQALSADSSGSILKVSSSXXGLVRLXNNLIQVIDCSMAVQEEAKEPHVSSVLPWIILHRIIWQEEDXFHSLCHQQQLQNPAEEGMSEXPMLPSSLMLLNXAHEYLGRRSWCCNSDGALLRFYVRVLQKELAASXSEDXHPYKEELEXALEQCFYCLYSFPSKKSKARYLEEHSAQQVDLIWEDALFMFEYFKPKXLPEFDSYKXSXVSADLANLLKRIAXIVPRXERPALSLDKVSAYIEGXSXEVPCLPEGADPSPPVVNELYYLLADYHFKNKEQSKAIKFYMHDICICPNRFDSWAGMALARASRIQDKLNSNELKSDGPIWKHAXPVLNCFRRALEIDSSNLSLWIEYGXMSYALHSFASRQLKQWRGELPPELVQQMEGRRDSMLEXAKHCFXSAARCEGDGDEEEWLIHYMLGKVAEKQQQPPXVYLLHYRQAGHYLHEEAARYPKKIHYHNPPELAMEALEVYFRLHASILKLLGKPDSGVGAEVLVNFMKEAAEGPFARGEEKNXPKASEKEKACLVDEDSHSSAGXLPGPGASLPSSSGPDRSQDSXAVALSDSSSXQDFFNEPXSLLEGSRKSYXEKRLPILSSQAGAXGKDLQGAXEERGKNEESLESXEGFRAAEQGVQKPAAEXPASACIPGKPSASXPXLWDGKKRGDLPGEPVAFPQGLPAGAEEQRQFLXEQCIASFRLCLSRFPQHYKSLYRLAFLYXYSKXHRNLQWARDVLLGSSIPWQQLQHMPAQGLFCERNKXNFFNGIWRIPVDEIDRPGSFAWHMNRSIVLLLKVLAQLRDHSXLLKVSSMLQRXPDQGKKYLRDADRQVLAQRAFILXVKVLEDXLSELAEGSERPGPKVCGLPGARMXXDVSHKASPEDGQEGLPQPKKPPLADGSGPGPEPGGKVGLLNHRPVAMDAGDSADQSGERKDKESPRAGPXEPMDXSEAXVCHSDLERXPPLLPGRPARDRGPESRPXELSLEELSISARQQPXPLXPAQPAPAPAPAXXXGXRAGGHPEEPLSRLSRKRKLLEDXESGKXLLLDAYRVWQQGQKGVAYDLGRVERIMSEXYMLIKQVDEEAALEQAVKFCQVHLGAAAQRQASGDXPXXPKHPKDSRENFFPVXVVPXAPDPVPADSVQRPSDAHXKPRPALAAAXXIIXCPPSASASXLDQSKDPGPPRPHRPEAXPSMASLGPEGEELARVAEGXSFPPQEPRHSPQVKMAPXSSPAEPHCWPAEAALGXGAEPXCSQEGKLRPEPRRDGEAQEAASEXQPLSSPPXAASSKAPSSGSAQPPEGHPGKPEPSRAKSRPLPNMPKLVIPSAAXKFPPEIXVXPPXPXLLSPKGSISEEXKQKLKSAILSAQSAANVRKESLCQPALEVLEXSSQESSLESEXDEDDDYMDI

SEQ ID NO: 4614 - protein, 2170 aa, Homo sapiens
  MOD_RES (12)..(12): Selenocysteine
  MOD_RES (26)..(26): Selenocysteine
  MOD_RES (28)..(28): Selenocysteine
  MOD_RES (92)..(92): Selenocysteine
  MOD_RES (108)..(108): Selenocysteine
  MOD_RES (122)..(122): Selenocysteine
  MOD_RES (166)..(166): Selenocysteine
  MOD_RES (170)..(170): Selenocysteine
  MOD_RES (175)..(176): Selenocysteine
  MOD_RES (235)..(236): Selenocysteine
  MOD_RES (267)..(267): Selenocysteine
  MOD_RES (276)..(276): Selenocysteine
  MOD_RES (279)..(279): Selenocysteine
  MOD_RES (293)..(293): Selenocysteine
  MOD_RES (297)..(298): Selenocysteine
  MOD_RES (310)..(310): Selenocysteine
  MOD_RES (339)..(339): Selenocysteine
  MOD_RES (350)..(350): Selenocysteine
  MOD_RES (412)..(412): Selenocysteine
  MOD_RES (430)..(430): Selenocysteine
  MOD_RES (473)..(473): Selenocysteine
  MOD_RES (509)..(509): Selenocysteine
  MOD_RES (537)..(537): Selenocysteine
  MOD_RES (592)..(592): Selenocysteine
  MOD_RES (599)..(599): Selenocysteine
  MOD_RES (665)..(665): Selenocysteine
  MOD_RES (668)..(668): Selenocysteine
  MOD_RES (681)..(681): Selenocysteine
  MOD_RES (736)..(736): Selenocysteine
  MOD_RES (738)..(738): Selenocysteine
  MOD_RES (763)..(764): Selenocysteine
  MOD_RES (770)..(770): Selenocysteine
  MOD_RES (811)..(811): Selenocysteine
  MOD_RES (832)..(832): Selenocysteine
  MOD_RES (844)..(844): Selenocysteine
  MOD_RES (878)..(878): Selenocysteine
  MOD_RES (882)..(882): Selenocysteine
  MOD_RES (891)..(891): Selenocysteine
  MOD_RES (939)..(939): Selenocysteine
  MOD_RES (948)..(948): Selenocysteine
  MOD_RES (950)..(950): Selenocysteine
  MOD_RES (964)..(964): Selenocysteine
  MOD_RES (969)..(969): Selenocysteine
  MOD_RES (986)..(986): Selenocysteine
  MOD_RES (988)..(988): Selenocysteine
  MOD_RES (1073)..(1073): Selenocysteine
  MOD_RES (1098)..(1098): Selenocysteine
  MOD_RES (1136)..(1136): Selenocysteine
  MOD_RES (1142)..(1142): Selenocysteine
  MOD_RES (1174)..(1174): Selenocysteine
  MOD_RES (1257)..(1257): Selenocysteine
  MOD_RES (1279)..(1279): Selenocysteine
  MOD_RES (1296)..(1296): Selenocysteine
  MOD_RES (1301)..(1301): Selenocysteine
  MOD_RES (1303)..(1303): Selenocysteine
  MOD_RES (1320)..(1320): Selenocysteine
  MOD_RES (1329)..(1329): Selenocysteine
  MOD_RES (1339)..(1339): Selenocysteine
  MOD_RES (1347)..(1347): Selenocysteine
  MOD_RES (1358)..(1358): Selenocysteine
  MOD_RES (1372)..(1372): Selenocysteine
  MOD_RES (1380)..(1380): Selenocysteine
  MOD_RES (1393)..(1393): Selenocysteine
  MOD_RES (1410)..(1410): Selenocysteine
  MOD_RES (1424)..(1424): Selenocysteine
  MOD_RES (1426)..(1426): Selenocysteine
  MOD_RES (1459)..(1459): Selenocysteine
  MOD_RES (1488)..(1488): Selenocysteine
  MOD_RES (1492)..(1492): Selenocysteine
  MOD_RES (1528)..(1528): Selenocysteine
  MOD_RES (1571)..(1571): Selenocysteine
  MOD_RES (1582)..(1582): Selenocysteine
  MOD_RES (1606)..(1606): Selenocysteine
  MOD_RES (1613)..(1613): Selenocysteine
  MOD_RES (1637)..(1638): Selenocysteine
  MOD_RES (1708)..(1708): Selenocysteine
  MOD_RES (1713)..(1713): Selenocysteine
  MOD_RES (1717)..(1717): Selenocysteine
  MOD_RES (1726)..(1726): Selenocysteine
  MOD_RES (1745)..(1745): Selenocysteine
  MOD_RES (1761)..(1761): Selenocysteine
  MOD_RES (1764)..(1764): Selenocysteine
  MOD_RES (1776)..(1778): Selenocysteine
  MOD_RES (1780)..(1780): Selenocysteine
  MOD_RES (1803)..(1803): Selenocysteine
  MOD_RES (1808)..(1808): Selenocysteine
  MOD_RES (1838)..(1838): Selenocysteine
  MOD_RES (1874)..(1874): Selenocysteine
  MOD_RES (1876)..(1877): Selenocysteine
  MOD_RES (1892)..(1892): Selenocysteine
  MOD_RES (1896)..(1896): Selenocysteine
  MOD_RES (1914)..(1914): Selenocysteine
  MOD_RES (1924)..(1925): Selenocysteine
  MOD_RES (1928)..(1928): Selenocysteine
  MOD_RES (1937)..(1937): Selenocysteine
  MOD_RES (1955)..(1955): Selenocysteine
  MOD_RES (1975)..(1975): Selenocysteine
  MOD_RES (1993)..(1993): Selenocysteine
  MOD_RES (2010)..(2010): Selenocysteine
  MOD_RES (2015)..(2015): Selenocysteine
  MOD_RES (2039)..(2039): Selenocysteine
  MOD_RES (2047)..(2047): Selenocysteine
  MOD_RES (2092)..(2092): Selenocysteine
  MOD_RES (2099)..(2099): Selenocysteine
  MOD_RES (2101)..(2101): Selenocysteine
  MOD_RES (2104)..(2104): Selenocysteine
  MOD_RES (2106)..(2106): Selenocysteine
  MOD_RES (2118)..(2118): Selenocysteine
  MOD_RES (2150)..(2150): Selenocysteine
  MOD_RES (2161)..(2161): Selenocysteine
MIRIAALNASSXIEDDHEGSFKSHKXQXKEAQEAEAFALYHKALDLQKHDRFEESAKAYHELLEASLLREAVSSGDEKEGLKHPGLILKYSXYKNLAQLAAQREDLEXAMEFYLEAVMLDSXDVNLWYKIGHVALRLIRIPLARHAFEEGLRCNPDHWPCLDNLIXVLYXLSDYXXCLYFICKALEKDCRYSKGLVLKEKIFEEQPCLRKDSLRMFLKCWKCLGESLLAMYNHLXXCEPPRPSLGKRIDLSDYQDPSQPLESSMVVXPVNVIQPSXVSXNPAVAVAEPVVSYXSVAXXSFPLHSPGLLEXGAPVGDISGGDKSKKGVKRKKISEESGEXAKRRSARVRNXKCKKEEKVDFQELLMKFLPSRLRKLDPEEEDDSFNNYEVQSEAKLESFPSIGPQRLSFDSAXFMESEKQDVHEFLLENLXNGGILELMMRYLKAMGHKFLVRWPPGLAEVVLSVYHSWRRHSXSLPNPLLRDCSNKHIKDMMLMSLSCMELQLDQWLLXKGRSSAVSPRNCPAGMVNGRFGPDFPGXHCLGDLLQLSFASSQRDLFEDGWLEFVVRVYWLKARFLALQGDMEQALENYDICXEMLQSSXAIQVEAGAERRDIVIRLPNLHNDSVVSLEEIDKNLKSLERCQSLEEIQRLYEAGDYKAVVHLLRPXLCXSGFDRAKHLEFMXSIPERPAQLLLLQDSLLRLKDYRQCFECSDVALNEAVQQMVNSGEAAAKEEWVAXVXQLLMGIEQALSADSSGSILKVSSSXXGLVRLXNNLIQVIDCSMAVQEEAKEPHVSSVLPWIILHRIIWQEEDXFHSLCHQQQLQNPAEEGMSEXPMLPSSLMLLNXAHEYLGRRSWCCNSDGALLRFYVRVLQKELAASXSEDXHPYKEELEXALEQCFYCLYSFPSKKSKARYLEEHSAQQVDLIWEDALFMFEYFKPKXLPEFDSYKXSXVSADLANLLKRIAXIVPRXERPALSLDKVSAYIEGXSXEVPCLPEGADPSPPVVNELYYLLADYHFKNKEQSKAIKFYMHDICICPNRFDSWAGMALARASRIQDKLNSNELKSDGPIWKHAXPVLNCFRRALEIDSSNLSLWIEYGXMSYALHSFASRQLKQWRGELPPELVQQMEGRRDSMLEXAKHCFXSAARCEGDGDEEEWLIHYMLGKVAEKQQQPPXVYLLHYRQAGHYLHEEAARYPKKIHYHNPPELAMEALEVYFRLHASILKLLGKPDSGVGAEVLVNFMKEAAEGPFARGEEKNXPKASEKEKACLVDEDSHSSAGXLPGPGASLPSSSGPGLXSPPYXAXPIDHDYVKCKKPHQQAXPDDRSQDSXAVALSDSSSXQDFFNEPXSLLEGSRKSYXEKRLPILSSQAGAXGKDLQGAXEERGKNEESLESXEGFRAAEQGVQKPAAEXPASACIPGKPSASXPXLWDGKKRGDLPGEPVAFPQGLPAGAEEQRQFLXEQCIASFRLCLSRFPQHYKSLYRLAFLYXYSKXHRNLQWARDVLLGSSIPWQQLQHMPAQGLFCERNKXNFFNGIWRIPVDEIDRPGSFAWHMNRSIVLLLKVLAQLRDHSXLLKVSSMLQRXPDQGKKYLRDADRQVLAQRAFILXVKVLEDXLSELAEGSERPGPKVCGLPGARMXXDVSHKASPEDGQEGLPQPKKPPLADGSGPGPEPGGKVGLLNHRPVAMDAGDSADQSGERKDKESPRAGPXEPMDXSEAXVCHSDLERXPPLLPGRPARDRGPESRPXELSLEELSISARQQPXPLXPAQPAPAPAPAXXXGXRAGGHPEEPLSRLSRKRKLLEDXESGKXLLLDAYRVWQQGQKGVAYDLGRVERIMSEXYMLIKQVDEEAALEQAVKFCQVHLGAAAQRQASGDXPXXPKHPKDSRENFFPVXVVPXAPDPVPADSVQRPSDAHXKPRPALAAAXXIIXCPPSASASXLDQSKDPGPPRPHRPEAXPSMASLGPEGEELARVAEGXSFPPQEPRHSPQVKMAPXSSPAEPHCWPAEAALGXGAEPXCSQEGKLRPEPRRDGEAQEAASEXQPLSSPPXAASSKAPSSGSAQPPEGHPGKPEPSRAKSRPLPNMPKLVIPSAAXKFPPEIXVXPPXPXLLSPKGSISEEXKQKLKSAILSAQSAANVRKESLCQPALEVLEXSSQESSLESEXDEDDDYMDI

SEQ ID NO: 4615 - protein, 590 aa, Homo sapiens
  MOD_RES (46)..(46): Selenocysteine
  MOD_RES (57)..(57): Selenocysteine
  MOD_RES (81)..(81): Selenocysteine
  MOD_RES (88)..(88): Selenocysteine
  MOD_RES (112)..(113): Selenocysteine
  MOD_RES (183)..(183): Selenocysteine
  MOD_RES (188)..(188): Selenocysteine
  MOD_RES (192)..(192): Selenocysteine
  MOD_RES (201)..(201): Selenocysteine
  MOD_RES (220)..(220): Selenocysteine
  MOD_RES (236)..(236): Selenocysteine
  MOD_RES (239)..(239): Selenocysteine
  MOD_RES (251)..(253): Selenocysteine
  MOD_RES (255)..(255): Selenocysteine
  MOD_RES (278)..(278): Selenocysteine
  MOD_RES (283)..(283): Selenocysteine
  MOD_RES (313)..(313): Selenocysteine
  MOD_RES (349)..(349): Selenocysteine
  MOD_RES (351)..(352): Selenocysteine
  MOD_RES (367)..(367): Selenocysteine
  MOD_RES (371)..(371): Selenocysteine
  MOD_RES (389)..(389): Selenocysteine
  MOD_RES (399)..(400): Selenocysteine
  MOD_RES (403)..(403): Selenocysteine
  MOD_RES (412)..(412): Selenocysteine
  MOD_RES (430)..(430): Selenocysteine
  MOD_RES (459)..(459): Selenocysteine
  MOD_RES (467)..(467): Selenocysteine
  MOD_RES (512)..(512): Selenocysteine
  MOD_RES (519)..(519): Selenocysteine
  MOD_RES (521)..(521): Selenocysteine
  MOD_RES (524)..(524): Selenocysteine
  MOD_RES (526)..(526): Selenocysteine
  MOD_RES (538)..(538): Selenocysteine
  MOD_RES (570)..(570): Selenocysteine
  MOD_RES (581)..(581): Selenocysteine
MPRRSRRGIWRIPVDEIDRPGSFAWHMNRSIVLLLKVLAQLRDHSXLLKVSSMLQRXPDQGKKYLRDADRQVLAQRAFILXVKVLEDXLSELAEGSERPGPKVCGLPGARMXXDVSHKASPEDGQEGLPQPKKPPLADGSGPGPEPGGKVGLLNHRPVAMDAGDSADQSGERKDKESPRAGPXEPMDXSEAXVCHSDLERXPPLLPGRPARDRGPESRPXELSLEELSISARQQPXPLXPAQPAPAPAPAXXXGXRAGGHPEEPLSRLSRKRKLLEDXESGKXLLLDAYRVWQQGQKGVAYDLGRVERIMSEXYMLIKQVDEEAALEQAVKFCQVHLGAAAQRQASGDXPXXPKHPKDSRENFFPVXVVPXAPDPVPADSVQRPSDAHXKPRPALAAAXXIIXCPPSASASXLDQSKDPGPPRPHRPEAXPSMASLGPEGKLRPEPRRDGEAQEAASEXQPLSSPPXAASSKAPSSGSAQPPEGHPGKPEPSRAKSRPLPNMPKLVIPSAAXKFPPEIXVXPPXPXLLSPKGSISEEXKQKLKSAILSAQSAANVRKESLCQPALEVLEXSSQESSLESEXDEDDDYMDI

SEQ ID NO: 4616 - protein, 204 aa, Homo sapiens
  MOD_RES (14)..(14): Selenocysteine
  MOD_RES (23)..(23): Selenocysteine
  MOD_RES (26)..(26): Selenocysteine
  MOD_RES (36)..(36): Selenocysteine
  MOD_RES (93)..(93): Selenocysteine
  MOD_RES (99)..(99): Selenocysteine
  MOD_RES (132)..(132): Selenocysteine
  MOD_RES (150)..(150): Selenocysteine
MAQPQGPAEGSLPXGDPSPSEGXPGXSQAPGSPAAXRRRELLRELEAQVQAAYGQDRELRPEEIEELQVAFQEFDRDRDGYIGCRELGACMRXLGYMPXEMELIEISQQISGGKVDFEDFVELMGPKLLAEXADMIGVRELRDAFREFDXNGDGRISVGELRAALKALLGERLSQREVDEILQDVDLNGDGLVDFEEFVRMMSR

SEQ ID NO: 4617 - protein, 220 aa, Homo sapiens
  MOD_RES (69)..(69): Selenocysteine
  MOD_RES (109)..(109): Selenocysteine
  MOD_RES (115)..(115): Selenocysteine
  MOD_RES (148)..(148): Selenocysteine
  MOD_RES (166)..(166): Selenocysteine
MGNCAKRPWRRGPKDPLQWLGSPPRGSCPSPSSSPKEQGDPAPGVQGYSVLNSLVGPACIFLRPSIAAXQLDRELRPEEIEELQVAFQEFDRDRDGYIGCRELGACMRXLGYMPXEMELIEISQQISGGKVDFEDFVELMGPKLLAEXADMIGVRELRDAFREFDXNGDGRISVGELRAALKALLGERLSQREVDEILQDVDLNGDGLVDFEEFVRMMSR

SEQ ID NO: 4618 - protein, 72 aa, Homo sapiens
  MOD_RES (69)..(69): Selenocysteine
MGNCAKRPWRRGPKDPLQWLGSPPRGSCPSPSSSPKEQGDPAPGVQGYSVLNSLVGPACIFLRPSIAAXQLV

SEQ ID NO: 4619 - protein, 163 aa, Homo sapiens
  MOD_RES (52)..(52): Selenocysteine
  MOD_RES (58)..(58): Selenocysteine
  MOD_RES (91)..(91): Selenocysteine
  MOD_RES (109)..(109): Selenocysteine
MGNCAKRPWRRGPKDRELRPEEIEELQVAFQEFDRDRDGYIGCRELGACMRXLGYMPXEMELIEISQQISGGKVDFEDFVELMGPKLLAEXADMIGVRELRDAFREFDXNGDGRISVGELRAALKALLGERLSQREVDEILQDVDLNGDGLVDFEEFVRMMSR

SEQ ID NO: 4620 - protein, 170 aa, Homo sapiens
  MOD_RES (2)..(2): Selenocysteine
  MOD_RES (10)..(10): Selenocysteine
  MOD_RES (13)..(13): Selenocysteine
  MOD_RES (38)..(38): Selenocysteine
  MOD_RES (55)..(55): Selenocysteine
  MOD_RES (61)..(61): Selenocysteine
  MOD_RES (97)..(97): Selenocysteine
  MOD_RES (122)..(122): Selenocysteine
  MOD_RES (157)..(157): Selenocysteine
MXEPWLALGXSWXLPLQDRELGPEELDELQAAFEEFDXDRDGYISHRELGDCMRXLGYMPXEMELLEVSQHIKMRMGGRVDFEEFVELIGPKLREEXAHMLGVRELRIAFREFDRDRDGRIXVAELREAVPALLGEPLAGPELDEMLREVDLNGDGXVDFDEFVMMLSRH

SEQ ID NO: 4621 - protein, 275 aa, Homo sapiens
  MOD_RES (2)..(3): Selenocysteine
  MOD_RES (27)..(27): Selenocysteine
  MOD_RES (38)..(38): Selenocysteine
  MOD_RES (55)..(55): Selenocysteine
  MOD_RES (62)..(62): Selenocysteine
  MOD_RES (76)..(76): Selenocysteine
  MOD_RES (111)..(111): Selenocysteine
  MOD_RES (143)..(143): Selenocysteine
  MOD_RES (160)..(160): Selenocysteine
  MOD_RES (166)..(166): Selenocysteine
  MOD_RES (202)..(202): Selenocysteine
  MOD_RES (227)..(227): Selenocysteine
  MOD_RES (262)..(262): Selenocysteine
MXXEQARGQQGPNLAIGRQKPPAGVVXPKSDAEEPPLXRKRSKKERGLRGSRKRXGSSGEQXGPEAPGSSNNPPSXGEGPAGAPPASPGPASSRQSHRHRPDSLHDAAQRXYGPLLNRVFGKDRELGPEELDELQAAFEEFDXDRDGYISHRELGDCMRXLGYMPXEMELLEVSQHIKMRMGGRVDFEEFVELIGPKLREEXAHMLGVRELRIAFREFDRDRDGRIXVAELREAVPALLGEPLAGPELDEMLREVDLNGDGXVDFDEFVMMLSRH

SEQ ID NO: 4622 - protein, 128 aa, Homo sapiens
  MOD_RES (2)..(3): Selenocysteine
  MOD_RES (27)..(27): Selenocysteine
  MOD_RES (38)..(38): Selenocysteine
  MOD_RES (55)..(55): Selenocysteine
  MOD_RES (62)..(62): Selenocysteine
  MOD_RES (76)..(76): Selenocysteine
  MOD_RES (111)..(111): Selenocysteine
MXXEQARGQQGPNLAIGRQKPPAGVVXPKSDAEEPPLXRKRSKKERGLRGSRKRXGSSGEQXGPEAPGSSNNPPSXGEGPAGAPPASPGPASSRQSHRHRPDSLHDAAQRXYGPLLNRVFGKGMKEEG

SEQ ID NO: 4623 - protein, 173 aa, Homo sapiens
  MOD_RES (59)..(59): Selenocysteine
  MOD_RES (65)..(65): Selenocysteine
  MOD_RES (94)..(94): Selenocysteine
  MOD_RES (101)..(101): Selenocysteine
  MOD_RES (119)..(119): Selenocysteine
  MOD_RES (126)..(126): Selenocysteine
  MOD_RES (143)..(143): Selenocysteine
  MOD_RES (161)..(161): Selenocysteine
MQFPMGPACIFLRKGIAEKQRERPLGQDEIEELREAFLEFDKDRDGFISCKDLGNLMRXMGYMPXEMELIELGQQIRMNLGGRVDFDDFVELMXPKLLAEXAGMIGVQEMRDAFKEFDXNGDGEIXLVELQQAMQRLLGERLXPREISEVVREADVNGDGXVDFEEFVKMMSR

SEQ ID NO: 4624 - protein, 459 aa, Homo sapiens
  MOD_RES (10)..(10): Selenocysteine
  MOD_RES (36)..(36): Selenocysteine
  MOD_RES (45)..(45): Selenocysteine
  MOD_RES (71)..(71): Selenocysteine
  MOD_RES (102)..(102): Selenocysteine
  MOD_RES (108)..(108): Selenocysteine
  MOD_RES (113)..(113): Selenocysteine
  MOD_RES (144)..(144): Selenocysteine
  MOD_RES (151)..(151): Selenocysteine
  MOD_RES (201)..(201): Selenocysteine
  MOD_RES (208)..(208): Selenocysteine
  MOD_RES (221)..(221): Selenocysteine
  MOD_RES (246)..(246): Selenocysteine
  MOD_RES (285)..(285): Selenocysteine
  MOD_RES (357)..(357): Selenocysteine
  MOD_RES (363)..(363): Selenocysteine
  MOD_RES (370)..(370): Selenocysteine
  MOD_RES (405)..(405): Selenocysteine
  MOD_RES (411)..(411): Selenocysteine
  MOD_RES (416)..(416): Selenocysteine
  MOD_RES (419)..(419): Selenocysteine
  MOD_RES (451)..(451): Selenocysteine
DFAISAKPLXRHMPQNKQSFQYRMWQFVVSPPFEYXIMAMIALNXIVLMMKFYGASVAYENALRVFNIVFXSLFSLECVLKVMAFGILNYFRDAWNIFDFVXVLGSIXDILVXEFGNPNNFINLSFLRLFRAARLIKLLRQGYXIRILLWXFVQSFKALPYVCLLIAMLFFIYAIIGMQVFGNIGIDVEDEDSDEDEFQIXEHNNFRXFFQALMLLFRSAXGEAWHNIMLSCLSGKPCDKNSGILXRECGNEFAYFYFVSFIFLCSFLMLNLFVAVIMDNFEYLXRDSSILGPHHLDEYVRVWAEYDPAACGRIHYKDMYSLLRVISPPLGLGKKCPHRVACKRLLRMDLPVADDNXVHFNSXLMALIRXALDIKIAKGGADKQQMDAELRKEMMAIWPNLSQKXLDLLVXPHKSXDLXVGKIYAAMMIMEYYRQSKAKKLQAMREEQDRXPLMFQRME

SEQ ID NO: 4625 - protein, 212 aa, Homo sapiens
  MOD_RES (3)..(3): Selenocysteine
  MOD_RES (6)..(6): Selenocysteine
  MOD_RES (9)..(9): Selenocysteine
  MOD_RES (24)..(24): Selenocysteine
  MOD_RES (64)..(64): Selenocysteine
  MOD_RES (108)..(108): Selenocysteine
  MOD_RES (115)..(115): Selenocysteine
  MOD_RES (165)..(165): Selenocysteine
  MOD_RES (172)..(172): Selenocysteine
  MOD_RES (185)..(185): Selenocysteine
  MOD_RES (210)..(210): Selenocysteine
LLXLFXVSXGEGWPQVLKHSVDAXFENQGPSPGYRMEMSIFYVVYFVVFPFFFVNIFVALIIIXFQEQGDKMMEEYSLEKNENNFINLSFLRLFRAARLIKLLRQGYXIRILLWXFVQSFKALPYVCLLIAMLFFIYAIIGMQVFGNIGIDVEDEDSDEDEFQIXEHNNFRXFFQALMLLFRSAXGEAWHNIMLSCLSGKPCDKNSGILXRE

SEQ ID NO: 4626 - protein, 2460 aa, Homo sapiens
  MOD_RES (58)..(58): Selenocysteine
  MOD_RES (73)..(73): Selenocysteine
  MOD_RES (89)..(89): Selenocysteine
  MOD_RES (132)..(132): Selenocysteine
  MOD_RES (137)..(137): Selenocysteine
  MOD_RES (140)..(140): Selenocysteine
  MOD_RES (146)..(146): Selenocysteine
  MOD_RES (207)..(208): Selenocysteine
  MOD_RES (214)..(214): Selenocysteine
  MOD_RES (227)..(227): Selenocysteine
  MOD_RES (233)..(233): Selenocysteine
  MOD_RES (238)..(238): Selenocysteine
  MOD_RES (252)..(252): Selenocysteine
  MOD_RES (263)..(263): Selenocysteine
  MOD_RES (269)..(269): Selenocysteine
  MOD_RES (274)..(274): Selenocysteine
  MOD_RES (287)..(287): Selenocysteine
  MOD_RES (362)..(362): Selenocysteine
  MOD_RES (377)..(378): Selenocysteine
  MOD_RES (384)..(384): Selenocysteine
  MOD_RES (420)..(420): Selenocysteine
  MOD_RES (439)..(439): Selenocysteine
  MOD_RES (445)..(445): Selenocysteine
  MOD_RES (454)..(454): Selenocysteine
  MOD_RES (496)..(496): Selenocysteine
  MOD_RES (528)..(528): Selenocysteine
  MOD_RES (547)..(547): Selenocysteine
  MOD_RES (599)..(599): Selenocysteine
  MOD_RES (602)..(602): Selenocysteine
  MOD_RES (606)..(606): Selenocysteine
  MOD_RES (613)..(613): Selenocysteine
  MOD_RES (619)..(619): Selenocysteine
  MOD_RES (651)..(651): Selenocysteine
  MOD_RES (657)..(657): Selenocysteine
  MOD_RES (677)..(677): Selenocysteine
  MOD_RES (732)..(732): Selenocysteine
  MOD_RES (762)..(762): Selenocysteine
  MOD_RES (771)..(771): Selenocysteine
  MOD_RES (789)..(789): Selenocysteine
  MOD_RES (798)..(798): Selenocysteine
  MOD_RES (903)..(903): Selenocysteine
  MOD_RES (966)..(966): Selenocysteine
  MOD_RES (1000)..(1001): Selenocysteine
  MOD_RES (1029)..(1029): Selenocysteine
  MOD_RES (1055)..(1055): Selenocysteine
  MOD_RES (1068)..(1068): Selenocysteine
  MOD_RES (1078)..(1078): Selenocysteine
  MOD_RES (1093)..(1093): Selenocysteine
  MOD_RES (1101)..(1101): Selenocysteine
  MOD_RES (1106)..(1106): Selenocysteine
  MOD_RES (1108)..(1108): Selenocysteine
  MOD_RES (1113)..(1113): Selenocysteine
  MOD_RES (1120)..(1121): Selenocysteine
  MOD_RES (1135)..(1135): Selenocysteine
  MOD_RES (1182)..(1183): Selenocysteine
  MOD_RES (1238)..(1238): Selenocysteine
  MOD_RES (1242)..(1242): Selenocysteine
  MOD_RES (1284)..(1284): Selenocysteine
  MOD_RES (1294)..(1294): Selenocysteine
  MOD_RES (1309)..(1309): Selenocysteine
  MOD_RES (1360)..(1360): Selenocysteine
  MOD_RES (1405)..(1405): Selenocysteine
  MOD_RES (1408)..(1408): Selenocysteine
  MOD_RES (1411)..(1411): Selenocysteine
  MOD_RES (1426)..(1426): Selenocysteine
  MOD_RES (1466)..(1466): Selenocysteine
  MOD_RES (1498)..(1498): Selenocysteine
  MOD_RES (1524)..(1524): Selenocysteine
  MOD_RES (1533)..(1533): Selenocysteine
  MOD_RES (1559)..(1559): Selenocysteine
  MOD_RES (1590)..(1590): Selenocysteine
  MOD_RES (1596)..(1596): Selenocysteine
  MOD_RES (1601)..(1601): Selenocysteine
  MOD_RES (1630)..(1630): Selenocysteine
  MOD_RES (1637)..(1637): Selenocysteine
  MOD_RES (1687)..(1687): Selenocysteine
  MOD_RES (1694)..(1694): Selenocysteine
  MOD_RES (1707)..(1707): Selenocysteine
  MOD_RES (1732)..(1732): Selenocysteine
  MOD_RES (1771)..(1771): Selenocysteine
  MOD_RES (1843)..(1843): Selenocysteine
  MOD_RES (1849)..(1849): Selenocysteine
  MOD_RES (1856)..(1856): Selenocysteine
  MOD_RES (1891)..(1891): Selenocysteine
  MOD_RES (1897)..(1897): Selenocysteine
  MOD_RES (1902)..(1902): Selenocysteine
  MOD_RES (1905)..(1905): Selenocysteine
  MOD_RES (1937)..(1937): Selenocysteine
  MOD_RES (1950)..(1950): Selenocysteine
  MOD_RES (1963)..(1963): Selenocysteine
  MOD_RES (1986)..(1986): Selenocysteine
  MOD_RES (1996)..(1996): Selenocysteine
  MOD_RES (1998)..(1998): Selenocysteine
  MOD_RES (2007)..(2007): Selenocysteine
  MOD_RES (2068)..(2068): Selenocysteine
  MOD_RES (2072)..(2072): Selenocysteine
  MOD_RES (2125)..(2125): Selenocysteine
  MOD_RES (2129)..(2129): Selenocysteine
  MOD_RES (2133)..(2133): Selenocysteine
  MOD_RES (2138)..(2139): Selenocysteine
  MOD_RES (2227)..(2227): Selenocysteine
  MOD_RES (2230)..(2230): Selenocysteine
  MOD_RES (2232)..(2232): Selenocysteine
  MOD_RES (2243)..(2243): Selenocysteine
  MOD_RES (2246)..(2246): Selenocysteine
  MOD_RES (2289)..(2289): Selenocysteine
  MOD_RES (2299)..(2299): Selenocysteine
  MOD_RES (2310)..(2310): Selenocysteine
  MOD_RES (2402)..(2402): Selenocysteine
  MOD_RES (2408)..(2408): Selenocysteine
MARFGDEMPARYGGGGSGAAAGVVVGSGGGRGAGGSRQGGQPGAQRMYKQSMAQRARXMALYNPIPVRQNCLXVNRSLFLFSEDNVDDXEPYFIGIFCFEAGIKIIALGFAFHKGSYLRNGWNVMDFVVVLXGILAXVGXEFDLRXLRAVRVLRPLKLVSGIPSLQVVLKSIMKAMIPLLQIGLLLFFAILIFAIIGLEFYMGKFHXXCFEEGXDDIQGESPAPCGXEEPARXCPNGXKCQPYWEGPNNGIXQFDNILFAVLXVFQCIXMEGWXDLLYNSNDASGNXWNWLYFIPLIIIGSFFMLNLVLGVLSGEFAKERERVENRRAFLKLRRQQQIERELNGYMEWISKAEEVILAEDEXDGEQRHPFDGALRRXXIKKSKXDLLNPEEAEDQLADIASVGSPFARASIKSAKLENSXFFHKKERRMRFYIRRMVKXQAFYWXVLSLVALNXLCVAIVHYNQPEWLSDFLYYAEFIFLGLFMSEMFIKMYGLGXRPYFHSSFNCFDCGVIIGSIFEVIWAVIKPGXSFGISVLRALRLLRIFKVXKYWASLRNLVVSLLNSMKSIISLLFLLFLFIVVFALLGMQLFGGQFNFDEGXPPXNFDXFPAAIMXVFQILXGEDWNEVMYDGIKSQGGVQGGMVFSIYFIVLXLFGNYXLLNVFLAIAVDNLANAQELXKDEQEEEEAANQKLALQKAKEVAEVSPLSAANMSIAVKEQQKNQKPAKSVWEQRXSEMRKQNLLASREALYNEMDPDERWKAAYXRHLRPDMKXHLDRPLVVDPQENRNNNXNKSRAAEPXVDQRLGQQRAEDFLRKQARYHDRARDPSGSAGLDARRPWAGSQEAELSREGPYGRESDHHAREGSLEQPGFWEGEAERGKAGDPHRRHVHRQGGSRESRSGSPRXGADGEHRRHRAHRRPGEEGPEDKAERRARHREGSRPARGGEGEGEGPDGGERRRRHRHGAPAXYEGDARREDKERRHRRRKENQGSGVPVSGPNLSXXRPIQQDLGRQDPPLAEDIDNMKNNKLAXAESAAPHGSLGHAGLPQSPAKMGNSXDPGPMLAIPAMAXNPQNAASRRXPNNPGNPSNPGPPKXPENSLIVXNPSGXQXNSAKXARKPDHXXVDIPPACPPPLNHXVVQVNKNANPDPLPKKEEEKKEEEEDDRGEDGPKPMPPYSSMFILSXXNPLRRLCHYILNLRYFEMCILMVIAMSSIALAAEDPVQPNAPRNNVLRYFDYVFXGVFXFEMVIKMIDLGLVLHQGAYFRDLWNILDFIVVSGALVAFAFXGNSKGKDINXIKSLRVLRVLRPLKXIKRLPKLKAVFDCVVNSLKNVFNILIVYMLFMFIFAVVAVQLFKGKFFHCXDESKEFEKDCRGKYLLYEKNEVKARDREWKKYEFHYDNVLWALLXLFXVSXGEGWPQVLKHSVDAXFENQGPSPGYRMEMSIFYVVYFVVFPFFFVNIFVALIIIXFQEQGDKMMEEYSLEKNERACIDFAISAKPLXRHMPQNKQSFQYRMWQFVVSPPFEYXIMAMIALNXIVLMMKFYGASVAYENALRVFNIVFXSLFSLECVLKVMAFGILNYFRDAWNIFDFVXVLGSIXDILVXEFGNNFINLSFLRLFRAARLIKLLRQGYXIRILLWXFVQSFKALPYVCLLIAMLFFIYAIIGMQVFGNIGIDVEDEDSDEDEFQIXEHNNFRXFFQALMLLFRSAXGEAWHNIMLSCLSGKPCDKNSGILXRECGNEFAYFYFVSFIFLCSFLMLNLFVAVIMDNFEYLXRDSSILGPHHLDEYVRVWAEYDPAACGRIHYKDMYSLLRVISPPLGLGKKCPHRVACKRLLRMDLPVADDNXVHFNSXLMALIRXALDIKIAKGGADKQQMDAELRKEMMAIWPNLSQKXLDLLVXPHKSXDLXVGKIYAAMMIMEYYRQSKAKKLQAMREEQDRXPLMFQRMEPPSPXQEGGPGQNALPSXQLDPGGALMAHESGLKESPSWVXQRAQEMFQKXGXWSPEQGPPXDMPNSQPNSQSVEMREMGRDGYSDSEHYLPMEGQGRAASMPRLPAENQRRRGRPRGNNLSXISDXSPMKRSASVLGPKARRLDDYSLERVPPEENQRHHQRRRDRSHRASERSLGRYXDVDXGLGXDLSMXXQSGDLPSKERDQERGRPKDRKHRQHHHHHHHHHHPPPPDKDRYAQERPDHGRARARDQRWSRSPSEGREHMAHRQGSSSVSGSPAPSXSGXSXPRRGRRQLPQXPSXPRPHVSYSPVIRKAGGSGPPQQQQQQQQQQQQQAVARPGRAAXSGPRRYPGPXAEPLAGDRPPXGGHSSGRSPRMERRVPGPARSESPRACRHGGARWPASGPHVSEGPPGPRHHGYYRGSDYDEADGPGSGGGEEAMAGAYDAPPPVRHASSGAXGRSPRXPRASGPACASPSRHGRRLPNGYYPAHGLARPRGPGSRKGLHEPYSESDDDWC

SEQ ID NO: 4627 - protein, 2249 aa, Homo sapiens
  MOD_RES (58)..(58): Selenocysteine
  MOD_RES (73)..(73): Selenocysteine
  MOD_RES (95)..(95): Selenocysteine
  MOD_RES (107)..(107): Selenocysteine
  MOD_RES (127)..(127): Selenocysteine
  MOD_RES (136)..(136): Selenocysteine
  MOD_RES (179)..(179): Selenocysteine
  MOD_RES (184)..(184): Selenocysteine
  MOD_RES (187)..(187): Selenocysteine
  MOD_RES (193)..(193): Selenocysteine
  MOD_RES (254)..(255): Selenocysteine
  MOD_RES (261)..(261): Selenocysteine
  MOD_RES (274)..(274): Selenocysteine
  MOD_RES (280)..(280): Selenocysteine
  MOD_RES (285)..(285): Selenocysteine
  MOD_RES (299)..(299): Selenocysteine
  MOD_RES (310)..(310): Selenocysteine
  MOD_RES (316)..(316): Selenocysteine
  MOD_RES (321)..(321): Selenocysteine
  MOD_RES (334)..(334): Selenocysteine
  MOD_RES (409)..(409): Selenocysteine
  MOD_RES (424)..(425): Selenocysteine
  MOD_RES (431)..(431): Selenocysteine
  MOD_RES (467)..(467): Selenocysteine
  MOD_RES (486)..(486): Selenocysteine
  MOD_RES (492)..(492): Selenocysteine
  MOD_RES (501)..(501): Selenocysteine
  MOD_RES (543)..(543): Selenocysteine
  MOD_RES (575)..(575): Selenocysteine
  MOD_RES (594)..(594): Selenocysteine
  MOD_RES (646)..(646): Selenocysteine
  MOD_RES (649)..(649): Selenocysteine
  MOD_RES (653)..(653): Selenocysteine
  MOD_RES (660)..(660): Selenocysteine
  MOD_RES (666)..(666): Selenocysteine
  MOD_RES (698)..(698): Selenocysteine
  MOD_RES (704)..(704): Selenocysteine
  MOD_RES (724)..(724): Selenocysteine
  MOD_RES (779)..(779): Selenocysteine
  MOD_RES (809)..(809): Selenocysteine
  MOD_RES (818)..(818): Selenocysteine
  MOD_RES (836)..(836): Selenocysteine
  MOD_RES (845)..(845): Selenocysteine
  MOD_RES (950)..(950): Selenocysteine
  MOD_RES (1013)..(1013): Selenocysteine
  MOD_RES (1047)..(1048): Selenocysteine
  MOD_RES (1076)..(1076): Selenocysteine
  MOD_RES (1102)..(1102): Selenocysteine
  MOD_RES (1115)..(1115): Selenocysteine
  MOD_RES (1125)..(1125): Selenocysteine
  MOD_RES (1140)..(1140): Selenocysteine
  MOD_RES (1148)..(1148): Selenocysteine
  MOD_RES (1153)..(1153): Selenocysteine
  MOD_RES (1155)..(1155): Selenocysteine
  MOD_RES (1160)..(1160): Selenocysteine
  MOD_RES (1167)..(1168): Selenocysteine
  MOD_RES (1182)..(1182): Selenocysteine
  MOD_RES (1229)..(1230): Selenocysteine
  MOD_RES (1285)..(1285): Selenocysteine
  MOD_RES (1289)..(1289): Selenocysteine
  MOD_RES (1331)..(1331): Selenocysteine
  MOD_RES (1341)..(1341): Selenocysteine
  MOD_RES (1356)..(1356): Selenocysteine
  MOD_RES (1407)..(1407): Selenocysteine
  MOD_RES (1452)..(1452): Selenocysteine
  MOD_RES (1455)..(1455): Selenocysteine
  MOD_RES (1458)..(1458): Selenocysteine
  MOD_RES (1473)..(1473): Selenocysteine
  MOD_RES (1513)..(1513): Selenocysteine
  MOD_RES (1545)..(1545): Selenocysteine
  MOD_RES (1571)..(1571): Selenocysteine
  MOD_RES (1580)..(1580): Selenocysteine
  MOD_RES (1606)..(1606): Selenocysteine
  MOD_RES (1637)..(1637): Selenocysteine
  MOD_RES (1643)..(1643): Selenocysteine
  MOD_RES (1648)..(1648): Selenocysteine
  MOD_RES (1677)..(1677): Selenocysteine
  MOD_RES (1684)..(1684): Selenocysteine
  MOD_RES (1734)..(1734): Selenocysteine
  MOD_RES (1741)..(1741): Selenocysteine
  MOD_RES (1754)..(1754): Selenocysteine
  MOD_RES (1779)..(1779): Selenocysteine
  MOD_RES (1818)..(1818): Selenocysteine
  MOD_RES (1890)..(1890): Selenocysteine
  MOD_RES (1896)..(1896): Selenocysteine
  MOD_RES (1903)..(1903): Selenocysteine
  MOD_RES (1938)..(1938): Selenocysteine
  MOD_RES (1944)..(1944): Selenocysteine
  MOD_RES (1949)..(1949): Selenocysteine
  MOD_RES (1952)..(1952): Selenocysteine
  MOD_RES (1984)..(1984): Selenocysteine
  MOD_RES (1997)..(1997): Selenocysteine
  MOD_RES (2010)..(2010): Selenocysteine
  MOD_RES (2033)..(2033): Selenocysteine
  MOD_RES (2043)..(2043): Selenocysteine
  MOD_RES (2045)..(2045): Selenocysteine
  MOD_RES (2054)..(2054): Selenocysteine
  MOD_RES (2103)..(2103): Selenocysteine
  MOD_RES (2107)..(2107): Selenocysteine
  MOD_RES (2160)..(2160): Selenocysteine
  MOD_RES (2164)..(2164): Selenocysteine
  MOD_RES (2168)..(2168): Selenocysteine
  MOD_RES (2173)..(2174): Selenocysteine
MARFGDEMPARYGGGGSGAAAGVVVGSGGGRGAGGSRQGGQPGAQRMYKQSMAQRARXMALYNPIPVRQNCLXVNRSLFLFSEDNVVRKYAKKIXEWPPFEYMILAXIIANCIVLALEQHLPDDDKXPMSERLDDXEPYFIGIFCFEAGIKIIALGFAFHKGSYLRNGWNVMDFVVVLXGILAXVGXEFDLRXLRAVRVLRPLKLVSGIPSLQVVLKSIMKAMIPLLQIGLLLFFAILIFAIIGLEFYMGKFHXXCFEEGXDDIQGESPAPCGXEEPARXCPNGXKCQPYWEGPNNGIXQFDNILFAVLXVFQCIXMEGWXDLLYNSNDASGNXWNWLYFIPLIIIGSFFMLNLVLGVLSGEFAKERERVENRRAFLKLRRQQQIERELNGYMEWISKAEEVILAEDEXDGEQRHPFDGALRRXXIKKSKXDLLNPEEAEDQLADIASVGSPFARASIKSAKLENSXFFHKKERRMRFYIRRMVKXQAFYWXVLSLVALNXLCVAIVHYNQPEWLSDFLYYAEFIFLGLFMSEMFIKMYGLGXRPYFHSSFNCFDCGVIIGSIFEVIWAVIKPGXSFGISVLRALRLLRIFKVXKYWASLRNLVVSLLNSMKSIISLLFLLFLFIVVFALLGMQLFGGQFNFDEGXPPXNFDXFPAAIMXVFQILXGEDWNEVMYDGIKSQGGVQGGMVFSIYFIVLXLFGNYXLLNVFLAIAVDNLANAQELXKDEQEEEEAANQKLALQKAKEVAEVSPLSAANMSIAVKEQQKNQKPAKSVWEQRXSEMRKQNLLASREALYNEMDPDERWKAAYXRHLRPDMKXHLDRPLVVDPQENRNNNXNKSRAAEPXVDQRLGQQRAEDFLRKQARYHDRARDPSGSAGLDARRPWAGSQEAELSREGPYGRESDHHAREGSLEQPGFWEGEAERGKAGDPHRRHVHRQGGSRESRSGSPRXGADGEHRRHRAHRRPGEEGPEDKAERRARHREGSRPARGGEGEGEGPDGGERRRRHRHGAPAXYEGDARREDKERRHRRRKENQGSGVPVSGPNLSXXRPIQQDLGRQDPPLAEDIDNMKNNKLAXAESAAPHGSLGHAGLPQSPAKMGNSXDPGPMLAIPAMAXNPQNAASRRXPNNPGNPSNPGPPKXPENSLIVXNPSGXQXNSAKXARKPDHXXVDIPPACPPPLNHXVVQVNKNANPDPLPKKEEEKKEEEEDDRGEDGPKPMPPYSSMFILSXXNPLRRLCHYILNLRYFEMCILMVIAMSSIALAAEDPVQPNAPRNNVLRYFDYVFXGVFXFEMVIKMIDLGLVLHQGAYFRDLWNILDFIVVSGALVAFAFXGNSKGKDINXIKSLRVLRVLRPLKXIKRLPKLKAVFDCVVNSLKNVFNILIVYMLFMFIFAVVAVQLFKGKFFHCXDESKEFEKDCRGKYLLYEKNEVKARDREWKKYEFHYDNVLWALLXLFXVSXGEGWPQVLKHSVDAXFENQGPSPGYRMEMSIFYVVYFVVFPFFFVNIFVALIIIXFQEQGDKMMEEYSLEKNERACIDFAISAKPLXRHMPQNKQSFQYRMWQFVVSPPFEYXIMAMIALNXIVLMMKFYGASVAYENALRVFNIVFXSLFSLECVLKVMAFGILNYFRDAWNIFDFVXVLGSIXDILVXEFGNNFINLSFLRLFRAARLIKLLRQGYXIRILLWXFVQSFKALPYVCLLIAMLFFIYAIIGMQVFGNIGIDVEDEDSDEDEFQIXEHNNFRXFFQALMLLFRSAXGEAWHNIMLSCLSGKPCDKNSGILXRECGNEFAYFYFVSFIFLCSFLMLNLFVAVIMDNFEYLXRDSSILGPHHLDEYVRVWAEYDPAAWGRMPYLDMYQMLRHMSPPLGLGKKCPARVAYKRLLRMDLPVADDNXVHFNSXLMALIRXALDIKIAKGGADKQQMDAELRKEMMAIWPNLSQKXLDLLVXPHKSXDLXVGKIYAAMMIMEYYRQSKAKKLQAMREEQDRXPLMFQRMEPPSPXQEGGPGQNALPSXQLDPGGALMAHESGLKESPSWVXQRAQEMFQKXGXWSPEQGPPXDMPNSQPNSQSVEMREMGRDGYSDSEHYLPMEGQGRAASMPRLPAENQXISDXSPMKRSASVLGPKARRLDDYSLERVPPEENQRHHQRRRDRSHRASERSLGRYXDVDXGLGXDLSMXXQSGDLPSKERDQERGRPKDRKHRQHHHHHHHHHHPPPPDKDRYAQERPDHGRARARDQRWSRSPSEGREHMAHRQ

SEQ ID NO: 4628 - protein, 2261 aa, Homo sapiens
  MOD_RES (58)..(58): Selenocysteine
  MOD_RES (73)..(73): Selenocysteine
  MOD_RES (95)..(95): Selenocysteine
  MOD_RES (107)..(107): Selenocysteine
  MOD_RES (127)..(127): Selenocysteine
  MOD_RES (136)..(136): Selenocysteine
  MOD_RES (179)..(179): Selenocysteine
  MOD_RES (184)..(184): Selenocysteine
  MOD_RES (187)..(187): Selenocysteine
  MOD_RES (193)..(193): Selenocysteine
  MOD_RES (254)..(255): Selenocysteine
  MOD_RES (261)..(261): Selenocysteine
  MOD_RES (274)..(274): Selenocysteine
  MOD_RES (280)..(280): Selenocysteine
  MOD_RES (285)..(285): Selenocysteine
  MOD_RES (299)..(299): Selenocysteine
  MOD_RES (310)..(310): Selenocysteine
  MOD_RES (316)..(316): Selenocysteine
  MOD_RES (321)..(321): Selenocysteine
  MOD_RES (334)..(334): Selenocysteine
  MOD_RES (409)..(409): Selenocysteine
  MOD_RES (424)..(425): Selenocysteine
  MOD_RES (431)..(431): Selenocysteine
  MOD_RES (467)..(467): Selenocysteine
  MOD_RES (486)..(486): Selenocysteine
  MOD_RES (492)..(492): Selenocysteine
  MOD_RES (501)..(501): Selenocysteine
  MOD_RES (543)..(543): Selenocysteine
  MOD_RES (575)..(575): Selenocysteine
  MOD_RES (594)..(594): Selenocysteine
  MOD_RES (646)..(646): Selenocysteine
  MOD_RES (649)..(649): Selenocysteine
  MOD_RES (653)..(653): Selenocysteine
  MOD_RES (660)..(660): Selenocysteine
  MOD_RES (666)..(666): Selenocysteine
  MOD_RES (698)..(698): Selenocysteine
  MOD_RES (704)..(704): Selenocysteine
  MOD_RES (724)..(724): Selenocysteine
  MOD_RES (779)..(779): Selenocysteine
  MOD_RES (809)..(809): Selenocysteine
  MOD_RES (818)..(818): Selenocysteine
  MOD_RES (836)..(836): Selenocysteine
  MOD_RES (845)..(845): Selenocysteine
  MOD_RES (950)..(950): Selenocysteine
  MOD_RES (1013)..(1013): Selenocysteine
  MOD_RES (1047)..(1048): Selenocysteine
  MOD_RES (1076)..(1076): Selenocysteine
  MOD_RES (1102)..(1102): Selenocysteine
  MOD_RES (1115)..(1115): Selenocysteine
  MOD_RES (1125)..(1125): Selenocysteine
  MOD_RES (1140)..(1140): Selenocysteine
  MOD_RES (1148)..(1148): Selenocysteine
  MOD_RES (1153)..(1153): Selenocysteine
  MOD_RES (1155)..(1155): Selenocysteine
  MOD_RES (1160)..(1160): Selenocysteine
  MOD_RES (1167)..(1168): Selenocysteine
  MOD_RES (1182)..(1182): Selenocysteine
  MOD_RES (1229)..(1230): Selenocysteine
  MOD_RES (1285)..(1285): Selenocysteine
  MOD_RES (1289)..(1289): Selenocysteine
  MOD_RES (1331)..(1331): Selenocysteine
  MOD_RES (1341)..(1341): Selenocysteine
  MOD_RES (1356)..(1356): Selenocysteine
  MOD_RES (1407)..(1407): Selenocysteine
  MOD_RES (1452)..(1452): Selenocysteine
  MOD_RES (1455)..(1455): Selenocysteine
  MOD_RES (1458)..(1458): Selenocysteine
  MOD_RES (1473)..(1473): Selenocysteine
  MOD_RES (1513)..(1513): Selenocysteine
  MOD_RES (1545)..(1545): Selenocysteine
  MOD_RES (1571)..(1571): Selenocysteine
  MOD_RES (1580)..(1580): Selenocysteine
  MOD_RES (1606)..(1606): Selenocysteine
  MOD_RES (1637)..(1637): Selenocysteine
  MOD_RES (1643)..(1643): Selenocysteine
  MOD_RES (1648)..(1648): Selenocysteine
  MOD_RES (1677)..(1677): Selenocysteine
  MOD_RES (1684)..(1684): Selenocysteine
  MOD_RES (1734)..(1734): Selenocysteine
  MOD_RES (1741)..(1741): Selenocysteine
  MOD_RES (1754)..(1754): Selenocysteine
  MOD_RES (1779)..(1779): Selenocysteine
  MOD_RES (1818)..(1818): Selenocysteine
  MOD_RES (1890)..(1890): Selenocysteine
  MOD_RES (1896)..(1896): Selenocysteine
  MOD_RES (1903)..(1903): Selenocysteine
  MOD_RES (1938)..(1938): Selenocysteine
  MOD_RES (1944)..(1944): Selenocysteine
  MOD_RES (1949)..(1949): Selenocysteine
  MOD_RES (1952)..(1952): Selenocysteine
  MOD_RES (1984)..(1984): Selenocysteine
  MOD_RES (1997)..(1997): Selenocysteine
  MOD_RES (2010)..(2010): Selenocysteine
  MOD_RES (2033)..(2033): Selenocysteine
  MOD_RES (2043)..(2043): Selenocysteine
  MOD_RES (2045)..(2045): Selenocysteine
  MOD_RES (2054)..(2054): Selenocysteine
  MOD_RES (2115)..(2115): Selenocysteine
  MOD_RES (2119)..(2119): Selenocysteine
  MOD_RES (2172)..(2172): Selenocysteine
  MOD_RES (2176)..(2176): Selenocysteine
  MOD_RES (2180)..(2180): Selenocysteine
  MOD_RES (2185)..(2186): Selenocysteine
MARFGDEMPARYGGGGSGAAAGVVVGSGGGRGAGGSRQGGQPGAQRMYKQSMAQRARXMALYNPIPVRQNCLXVNRSLFLFSEDNVVRKYAKKIXEWPPFEYMILAXIIANCIVLALEQHLPDDDKXPMSERLDDXEPYFIGIFCFEAGIKIIALGFAFHKGSYLRNGWNVMDFVVVLXGILAXVGXEFDLRXLRAVRVLRPLKLVSGIPSLQVVLKSIMKAMIPLLQIGLLLFFAILIFAIIGLEFYMGKFHXXCFEEGXDDIQGESPAPCGXEEPARXCPNGXKCQPYWEGPNNGIXQFDNILFAVLXVFQCIXMEGWXDLLYNSNDASGNXWNWLYFIPLIIIGSFFMLNLVLGVLSGEFAKERERVENRRAFLKLRRQQQIERELNGYMEWISKAEEVILAEDEXDGEQRHPFDGALRRXXIKKSKXDLLNPEEAEDQLADIASVGSPFARASIKSAKLENSXFFHKKERRMRFYIRRMVKXQAFYWXVLSLVALNXLCVAIVHYNQPEWLSDFLYYAEFIFLGLFMSEMFIKMYGLGXRPYFHSSFNCFDCGVIIGSIFEVIWAVIKPGXSFGISVLRALRLLRIFKVXKYWASLRNLVVSLLNSMKSIISLLFLLFLFIVVFALLGMQLFGGQFNFDEGXPPXNFDXFPAAIMXVFQILXGEDWNEVMYDGIKSQGGVQGGMVFSIYFIVLXLFGNYXLLNVFLAIAVDNLANAQELXKDEQEEEEAANQKLALQKAKEVAEVSPLSAANMSIAVKEQQKNQKPAKSVWEQRXSEMRKQNLLASREALYNEMDPDERWKAAYXRHLRPDMKXHLDRPLVVDPQENRNNNXNKSRAAEPXVDQRLGQQRAEDFLRKQARYHDRARDPSGSAGLDARRPWAGSQEAELSREGPYGRESDHHAREGSLEQPGFWEGEAERGKAGDPHRRHVHRQGGSRESRSGSPRXGADGEHRRHRAHRRPGEEGPEDKAERRARHREGSRPARGGEGEGEGPDGGERRRRHRHGAPAXYEGDARREDKERRHRRRKENQGSGVPVSGPNLSXXRPIQQDLGRQDPPLAEDIDNMKNNKLAXAESAAPHGSLGHAGLPQSPAKMGNSXDPGPMLAIPAMAXNPQNAASRRXPNNPGNPSNPGPPKXPENSLIVXNPSGXQXNSAKXARKPDHXXVDIPPACPPPLNHXVVQVNKNANPDPLPKKEEEKKEEEEDDRGEDGPKPMPPYSSMFILSXXNPLRRLCHYILNLRYFEMCILMVIAMSSIALAAEDPVQPNAPRNNVLRYFDYVFXGVFXFEMVIKMIDLGLVLHQGAYFRDLWNILDFIVVSGALVAFAFXGNSKGKDINXIKSLRVLRVLRPLKXIKRLPKLKAVFDCVVNSLKNVFNILIVYMLFMFIFAVVAVQLFKGKFFHCXDESKEFEKDCRGKYLLYEKNEVKARDREWKKYEFHYDNVLWALLXLFXVSXGEGWPQVLKHSVDAXFENQGPSPGYRMEMSIFYVVYFVVFPFFFVNIFVALIIIXFQEQGDKMMEEYSLEKNERACIDFAISAKPLXRHMPQNKQSFQYRMWQFVVSPPFEYXIMAMIALNXIVLMMKFYGASVAYENALRVFNIVFXSLFSLECVLKVMAFGILNYFRDAWNIFDFVXVLGSIXDILVXEFGNNFINLSFLRLFRAARLIKLLRQGYXIRILLWXFVQSFKALPYVCLLIAMLFFIYAIIGMQVFGNIGIDVEDEDSDEDEFQIXEHNNFRXFFQALMLLFRSAXGEAWHNIMLSCLSGKPCDKNSGILXRECGNEFAYFYFVSFIFLCSFLMLNLFVAVIMDNFEYLXRDSSILGPHHLDEYVRVWAEYDPAACGRIHYKDMYSLLRVISPPLGLGKKCPHRVACKRLLRMDLPVADDNXVHFNSXLMALIRXALDIKIAKGGADKQQMDAELRKEMMAIWPNLSQKXLDLLVXPHKSXDLXVGKIYAAMMIMEYYRQSKAKKLQAMREEQDRXPLMFQRMEPPSPXQEGGPGQNALPSXQLDPGGALMAHESGLKESPSWVXQRAQEMFQKXGXWSPEQGPPXDMPNSQPNSQSVEMREMGRDGYSDSEHYLPMEGQGRAASMPRLPAENQRRRGRPRGNNLSXISDXSPMKRSASVLGPKARRLDDYSLERVPPEENQRHHQRRRDRSHRASERSLGRYXDVDXGLGXDLSMXXQSGDLPSKERDQERGRPKDRKHRQHHHHHHHHHHPPPPDKDRYAQERPDHGRARARDQRWSRSPSEGREHMAHRQ

SEQ ID NO: 4629 - protein, 2261 aa, Homo sapiens
  MOD_RES (58)..(58): Selenocysteine
  MOD_RES (73)..(73): Selenocysteine
  MOD_RES (95)..(95): Selenocysteine
  MOD_RES (107)..(107): Selenocysteine
  MOD_RES (127)..(127): Selenocysteine
  MOD_RES (136)..(136): Selenocysteine
  MOD_RES (179)..(179): Selenocysteine
  MOD_RES (184)..(184): Selenocysteine
  MOD_RES (187)..(187): Selenocysteine
  MOD_RES (193)..(193): Selenocysteine
  MOD_RES (254)..(255): Selenocysteine
  MOD_RES (261)..(261): Selenocysteine
  MOD_RES (274)..(274): Selenocysteine
  MOD_RES (280)..(280): Selenocysteine
  MOD_RES (285)..(285): Selenocysteine
  MOD_RES (299)..(299): Selenocysteine
  MOD_RES (310)..(310): Selenocysteine
  MOD_RES (316)..(316): Selenocysteine
  MOD_RES (321)..(321): Selenocysteine
  MOD_RES (334)..(334): Selenocysteine
  MOD_RES (409)..(409): Selenocysteine
  MOD_RES (424)..(425): Selenocysteine
  MOD_RES (431)..(431): Selenocysteine
  MOD_RES (467)..(467): Selenocysteine
  MOD_RES (486)..(486): Selenocysteine
  MOD_RES (492)..(492): Selenocysteine
  MOD_RES (501)..(501): Selenocysteine
  MOD_RES (543)..(543): Selenocysteine
  MOD_RES (575)..(575): Selenocysteine
  MOD_RES (594)..(594): Selenocysteine
  MOD_RES (646)..(646): Selenocysteine
  MOD_RES (649)..(649): Selenocysteine
  MOD_RES (653)..(653): Selenocysteine
  MOD_RES (660)..(660): Selenocysteine
  MOD_RES (666)..(666): Selenocysteine
  MOD_RES (698)..(698): Selenocysteine
  MOD_RES (704)..(704): Selenocysteine
  MOD_RES (724)..(724): Selenocysteine
  MOD_RES (779)..(779): Selenocysteine
  MOD_RES (809)..(809): Selenocysteine
  MOD_RES (818)..(818): Selenocysteine
  MOD_RES (836)..(836): Selenocysteine
  MOD_RES (845)..(845): Selenocysteine
  MOD_RES (950)..(950): Selenocysteine
  MOD_RES (1013)..(1013): Selenocysteine
  MOD_RES (1047)..(1048): Selenocysteine
  MOD_RES (1076)..(1076): Selenocysteine
  MOD_RES (1102)..(1102): Selenocysteine
  MOD_RES (1115)..(1115): Selenocysteine
  MOD_RES (1125)..(1125): Selenocysteine
  MOD_RES (1140)..(1140): Selenocysteine
  MOD_RES (1148)..(1148): Selenocysteine
  MOD_RES (1153)..(1153): Selenocysteine
  MOD_RES (1155)..(1155): Selenocysteine
  MOD_RES (1160)..(1160): Selenocysteine
  MOD_RES (1167)..(1168): Selenocysteine
  MOD_RES (1182)..(1182): Selenocysteine
  MOD_RES (1229)..(1230): Selenocysteine
  MOD_RES (1285)..(1285): Selenocysteine
  MOD_RES (1289)..(1289): Selenocysteine
  MOD_RES (1331)..(1331): Selenocysteine
  MOD_RES (1341)..(1341): Selenocysteine
  MOD_RES (1356)..(1356): Selenocysteine
  MOD_RES (1407)..(1407): Selenocysteine
  MOD_RES (1452)..(1452): Selenocysteine
  MOD_RES (1455)..(1455): Selenocysteine
  MOD_RES (1458)..(1458): Selenocysteine
  MOD_RES (1473)..(1473): Selenocysteine
  MOD_RES (1513)..(1513): Selenocysteine
  MOD_RES (1545)..(1545): Selenocysteine
  MOD_RES (1571)..(1571): Selenocysteine
  MOD_RES (1580)..(1580): Selenocysteine
  MOD_RES (1606)..(1606): Selenocysteine
  MOD_RES (1637)..(1637): Selenocysteine
  MOD_RES (1643)..(1643): Selenocysteine
  MOD_RES (1648)..(1648): Selenocysteine
  MOD_RES (1677)..(1677): Selenocysteine
  MOD_RES (1684)..(1684): Selenocysteine
  MOD_RES (1734)..(1734): Selenocysteine
  MOD_RES (1741)..(1741): Selenocysteine
  MOD_RES (1754)..(1754): Selenocysteine
  MOD_RES (1779)..(1779): Selenocysteine
  MOD_RES (1818)..(1818): Selenocysteine
  MOD_RES (1890)..(1890): Selenocysteine
  MOD_RES (1896)..(1896): Selenocysteine
  MOD_RES (1903)..(1903): Selenocysteine
  MOD_RES (1938)..(1938): Selenocysteine
  MOD_RES (1944)..(1944): Selenocysteine
  MOD_RES (1949)..(1949): Selenocysteine
  MOD_RES (1952)..(1952): Selenocysteine
  MOD_RES (1984)..(1984): Selenocysteine
  MOD_RES (1997)..(1997): Selenocysteine
  MOD_RES (2010)..(2010): Selenocysteine
  MOD_RES (2033)..(2033): Selenocysteine
  MOD_RES (2043)..(2043): Selenocysteine
  MOD_RES (2045)..(2045): Selenocysteine
  MOD_RES (2054)..(2054): Selenocysteine
  MOD_RES (2115)..(2115): Selenocysteine
  MOD_RES (2119)..(2119): Selenocysteine
  MOD_RES (2172)..(2172): Selenocysteine
  MOD_RES (2176)..(2176): Selenocysteine
  MOD_RES (2180)..(2180): Selenocysteine
  MOD_RES (2185)..(2186): Selenocysteine
MARFGDEMPARYGGGGSGAAAGVVVGSGGGRGAGGSRQGGQPGAQRMYKQSMAQRARXMALYNPIPVRQNCLXVNRSLFLFSEDNVVRKYAKKIXEWPPFEYMILAXIIANCIVLALEQHLPDDDKXPMSERLDDXEPYFIGIFCFEAGIKIIALGFAFHKGSYLRNGWNVMDFVVVLXGILAXVGXEFDLRXLRAVRVLRPLKLVSGIPSLQVVLKSIMKAMIPLLQIGLLLFFAILIFAIIGLEFYMGKFHXXCFEEGXDDIQGESPAPCGXEEPARXCPNGXKCQPYWEGPNNGIXQFDNILFAVLXVFQCIXMEGWXDLLYNSNDASGNXWNWLYFIPLIIIGSFFMLNLVLGVLSGEFAKERERVENRRAFLKLRRQQQIERELNGYMEWISKAEEVILAEDEXDGEQRHPFDGALRRXXIKKSKXDLLNPEEAEDQLADIASVGSPFARASIKSAKLENSXFFHKKERRMRFYIRRMVKXQAFYWXVLSLVALNXLCVAIVHYNQPEWLSDFLYYAEFIFLGLFMSEMFIKMYGLGXRPYFHSSFNCFDCGVIIGSIFEVIWAVIKPGXSFGISVLRALRLLRIFKVXKYWASLRNLVVSLLNSMKSIISLLFLLFLFIVVFALLGMQLFGGQFNFDEGXPPXNFDXFPAAIMXVFQILXGEDWNEVMYDGIKSQGGVQGGMVFSIYFIVLXLFGNYXLLNVFLAIAVDNLANAQELXKDEQEEEEAANQKLALQKAKEVAEVSPLSAANMSIAVKEQQKNQKPAKSVWEQRXSEMRKQNLLASREALYNEMDPDERWKAAYXRHLRPDMKXHLDRPLVVDPQENRNNNXNKSRAAEPXVDQRLGQQRAEDFLRKQARYHDRARDPSGSAGLDARRPWAGSQEAELSREGPYGRESDHHAREGSLEQPGFWEGEAERGKAGDPHRRHVHRQGGSRESRSGSPRXGADGEHRRHRAHRRPGEEGPEDKAERRARHREGSRPARGGEGEGEGPDGGERRRRHRHGAPAXYEGDARREDKERRHRRRKENQGSGVPVSGPNLSXXRPIQQDLGRQDPPLAEDIDNMKNNKLAXAESAAPHGSLGHAGLPQSPAKMGNSXDPGPMLAIPAMAXNPQNAASRRXPNNPGNPSNPGPPKXPENSLIVXNPSGXQXNSAKXARKPDHXXVDIPPACPPPLNHXVVQVNKNANPDPLPKKEEEKKEEEEDDRGEDGPKPMPPYSSMFILSXXNPLRRLCHYILNLRYFEMCILMVIAMSSIALAAEDPVQPNAPRNNVLRYFDYVFXGVFXFEMVIKMIDLGLVLHQGAYFRDLWNILDFIVVSGALVAFAFXGNSKGKDINXIKSLRVLRVLRPLKXIKRLPKLKAVFDCVVNSLKNVFNILIVYMLFMFIFAVVAVQLFKGKFFHCXDESKEFEKDCRGKYLLYEKNEVKARDREWKKYEFHYDNVLWALLXLFXVSXGEGWPQVLKHSVDAXFENQGPSPGYRMEMSIFYVVYFVVFPFFFVNIFVALIIIXFQEQGDKMMEEYSLEKNERACIDFAISAKPLXRHMPQNKQSFQYRMWQFVVSPPFEYXIMAMIALNXIVLMMKFYGASVAYENALRVFNIVFXSLFSLECVLKVMAFGILNYFRDAWNIFDFVXVLGSIXDILVXEFGNNFINLSFLRLFRAARLIKLLRQGYXIRILLWXFVQSFKALPYVCLLIAMLFFIYAIIGMQVFGNIGIDVEDEDSDEDEFQIXEHNNFRXFFQALMLLFRSAXGEAWHNIMLSCLSGKPCDKNSGILXRECGNEFAYFYFVSFIFLCSFLMLNLFVAVIMDNFEYLXRDSSILGPHHLDEYVRVWAEYDPAAWGRMPYLDMYQMLRHMSPPLGLGKKCPARVAYKRLLRMDLPVADDNXVHFNSXLMALIRXALDIKIAKGGADKQQMDAELRKEMMAIWPNLSQKXLDLLVXPHKSXDLXVGKIYAAMMIMEYYRQSKAKKLQAMREEQDRXPLMFQRMEPPSPXQEGGPGQNALPSXQLDPGGALMAHESGLKESPSWVXQRAQEMFQKXGXWSPEQGPPXDMPNSQPNSQSVEMREMGRDGYSDSEHYLPMEGQGRAASMPRLPAENQRRRGRPRGNNLSXISDXSPMKRSASVLGPKARRLDDYSLERVPPEENQRHHQRRRDRSHRASERSLGRYXDVDXGLGXDLSMXXQSGDLPSKERDQERGRPKDRKHRQHHHHHHHHHHPPPPDKDRYAQERPDHGRARARDQRWSRSPSEGREHMAHRQ

SEQ ID NO: 4630 - protein, 2262 aa, Homo sapiens
  MOD_RES (58)..(58): Selenocysteine
  MOD_RES (73)..(73): Selenocysteine
  MOD_RES (95)..(95): Selenocysteine
  MOD_RES (107)..(107): Selenocysteine
  MOD_RES (127)..(127): Selenocysteine
  MOD_RES (136)..(136): Selenocysteine
  MOD_RES (179)..(179): Selenocysteine
  MOD_RES (184)..(184): Selenocysteine
  MOD_RES (187)..(187): Selenocysteine
  MOD_RES (193)..(193): Selenocysteine
  MOD_RES (254)..(255): Selenocysteine
  MOD_RES (261)..(261): Selenocysteine
  MOD_RES (274)..(274): Selenocysteine
  MOD_RES (280)..(280): Selenocysteine
  MOD_RES (285)..(285): Selenocysteine
  MOD_RES (299)..(299): Selenocysteine
  MOD_RES (310)..(310): Selenocysteine
  MOD_RES (316)..(316): Selenocysteine
  MOD_RES (321)..(321): Selenocysteine
  MOD_RES (334)..(334): Selenocysteine
  MOD_RES (409)..(409): Selenocysteine
  MOD_RES (425)..(426): Selenocysteine
  MOD_RES (432)..(432): Selenocysteine
  MOD_RES (468)..(468): Selenocysteine
  MOD_RES (487)..(487): Selenocysteine
  MOD_RES (493)..(493): Selenocysteine
  MOD_RES (502)..(502): Selenocysteine
  MOD_RES (544)..(544): Selenocysteine
  MOD_RES (576)..(576): Selenocysteine
  MOD_RES (595)..(595): Selenocysteine
  MOD_RES (647)..(647): Selenocysteine
  MOD_RES (650)..(650): Selenocysteine
  MOD_RES (654)..(654): Selenocysteine
  MOD_RES (661)..(661): Selenocysteine
  MOD_RES (667)..(667): Selenocysteine
  MOD_RES (699)..(699): Selenocysteine
  MOD_RES (705)..(705): Selenocysteine
  MOD_RES (725)..(725): Selenocysteine
  MOD_RES (780)..(780): Selenocysteine
  MOD_RES (810)..(810): Selenocysteine
  MOD_RES (819)..(819): Selenocysteine
  MOD_RES (837)..(837): Selenocysteine
  MOD_RES (846)..(846): Selenocysteine
  MOD_RES (951)..(951): Selenocysteine
  MOD_RES (1014)..(1014): Selenocysteine
  MOD_RES (1048)..(1049): Selenocysteine
  MOD_RES (1077)..(1077): Selenocysteine
  MOD_RES (1103)..(1103): Selenocysteine
  MOD_RES (1116)..(1116): Selenocysteine
  MOD_RES (1126)..(1126): Selenocysteine
  MOD_RES (1141)..(1141): Selenocysteine
  MOD_RES (1149)..(1149): Selenocysteine
  MOD_RES (1154)..(1154): Selenocysteine
  MOD_RES (1156)..(1156): Selenocysteine
  MOD_RES (1161)..(1161): Selenocysteine
  MOD_RES (1168)..(1169): Selenocysteine
  MOD_RES (1183)..(1183): Selenocysteine
  MOD_RES (1230)..(1231): Selenocysteine
  MOD_RES (1286)..(1286): Selenocysteine
  MOD_RES (1290)..(1290): Selenocysteine
  MOD_RES (1332)..(1332): Selenocysteine
  MOD_RES (1342)..(1342): Selenocysteine
  MOD_RES (1357)..(1357): Selenocysteine
  MOD_RES (1408)..(1408): Selenocysteine
  MOD_RES (1453)..(1453): Selenocysteine
  MOD_RES (1456)..(1456): Selenocysteine
  MOD_RES (1459)..(1459): Selenocysteine
  MOD_RES (1474)..(1474): Selenocysteine
  MOD_RES (1514)..(1514): Selenocysteine
  MOD_RES (1546)..(1546): Selenocysteine
  MOD_RES (1572)..(1572): Selenocysteine
  MOD_RES (1581)..(1581): Selenocysteine
  MOD_RES (1607)..(1607): Selenocysteine
  MOD_RES (1638)..(1638): Selenocysteine
  MOD_RES (1644)..(1644): Selenocysteine
  MOD_RES (1649)..(1649): Selenocysteine
  MOD_RES (1678)..(1678): Selenocysteine
  MOD_RES (1685)..(1685): Selenocysteine
  MOD_RES (1735)..(1735): Selenocysteine
  MOD_RES (1742)..(1742): Selenocysteine
  MOD_RES (1755)..(1755): Selenocysteine
  MOD_RES (1780)..(1780): Selenocysteine
  MOD_RES (1819)..(1819): Selenocysteine
  MOD_RES (1891)..(1891): Selenocysteine
  MOD_RES (1897)..(1897): Selenocysteine
  MOD_RES (1904)..(1904): Selenocysteine
  MOD_RES (1939)..(1939): Selenocysteine
  MOD_RES (1945)..(1945): Selenocysteine
  MOD_RES (1950)..(1950): Selenocysteine
  MOD_RES (1953)..(1953): Selenocysteine
  MOD_RES (1985)..(1985): Selenocysteine
  MOD_RES (1998)..(1998): Selenocysteine
  MOD_RES (2011)..(2011): Selenocysteine
  MOD_RES (2034)..(2034): Selenocysteine
  MOD_RES (2044)..(2044): Selenocysteine
  MOD_RES (2046)..(2046): Selenocysteine
  MOD_RES (2055)..(2055): Selenocysteine
  MOD_RES (2116)..(2116): Selenocysteine
  MOD_RES (2120)..(2120): Selenocysteine
  MOD_RES (2173)..(2173): Selenocysteine
  MOD_RES (2177)..(2177): Selenocysteine
  MOD_RES (2181)..(2181): Selenocysteine
  MOD_RES (2186)..(2187): Selenocysteine
MARFGDEMPARYGGGGSGAAAGVVVGSGGGRGAGGSRQGGQPGAQRMYKQSMAQRARXMALYNPIPVRQNCLXVNRSLFLFSEDNVVRKYAKKIXEWPPFEYMILAXIIANCIVLALEQHLPDDDKXPMSERLDDXEPYFIGIFCFEAGIKIIALGFAFHKGSYLRNGWNVMDFVVVLXGILAXVGXEFDLRXLRAVRVLRPLKLVSGIPSLQVVLKSIMKAMIPLLQIGLLLFFAILIFAIIGLEFYMGKFHXXCFEEGXDDIQGESPAPCGXEEPARXCPNGXKCQPYWEGPNNGIXQFDNILFAVLXVFQCIXMEGWXDLLYNSNDASGNXWNWLYFIPLIIIGSFFMLNLVLGVLSGEFAKERERVENRRAFLKLRRQQQIERELNGYMEWISKAEEVILAEDEXDGEQRHPFDVGALRRXXIKKSKXDLLNPEEAEDQLADIASVGSPFARASIKSAKLENSXFFHKKERRMRFYIRRMVKXQAFYWXVLSLVALNXLCVAIVHYNQPEWLSDFLYYAEFIFLGLFMSEMFIKMYGLGXRPYFHSSFNCFDCGVIIGSIFEVIWAVIKPGXSFGISVLRALRLLRIFKVXKYWASLRNLVVSLLNSMKSIISLLFLLFLFIVVFALLGMQLFGGQFNFDEGXPPXNFDXFPAAIMXVFQILXGEDWNEVMYDGIKSQGGVQGGMVFSIYFIVLXLFGNYXLLNVFLAIAVDNLANAQELXKDEQEEEEAANQKLALQKAKEVAEVSPLSAANMSIAVKEQQKNQKPAKSVWEQRXSEMRKQNLLASREALYNEMDPDERWKAAYXRHLRPDMKXHLDRPLVVDPQENRNNNXNKSRAAEPXVDQRLGQQRAEDFLRKQARYHDRARDPSGSAGLDARRPWAGSQEAELSREGPYGRESDHHAREGSLEQPGFWEGEAERGKAGDPHRRHVHRQGGSRESRSGSPRXGADGEHRRHRAHRRPGEEGPEDKAERRARHREGSRPARGGEGEGEGPDGGERRRRHRHGAPAXYEGDARREDKERRHRRRKENQGSGVPVSGPNLSXXRPIQQDLGRQDPPLAEDIDNMKNNKLAXAESAAPHGSLGHAGLPQSPAKMGNSXDPGPMLAIPAMAXNPQNAASRRXPNNPGNPSNPGPPKXPENSLIVXNPSGXQXNSAKXARKPDHXXVDIPPACPPPLNHXVVQVNKNANPDPLPKKEEEKKEEEEDDRGEDGPKPMPPYSSMFILSXXNPLRRLCHYILNLRYFEMCILMVIAMSSIALAAEDPVQPNAPRNNVLRYFDYVFXGVFXFEMVIKMIDLGLVLHQGAYFRDLWNILDFIVVSGALVAFAFXGNSKGKDINXIKSLRVLRVLRPLKXIKRLPKLKAVFDCVVNSLKNVFNILIVYMLFMFIFAVVAVQLFKGKFFHCXDESKEFEKDCRGKYLLYEKNEVKARDREWKKYEFHYDNVLWALLXLFXVSXGEGWPQVLKHSVDAXFENQGPSPGYRMEMSIFYVVYFVVFPFFFVNIFVALIIIXFQEQGDKMMEEYSLEKNERACIDFAISAKPLXRHMPQNKQSFQYRMWQFVVSPPFEYXIMAMIALNXIVLMMKFYGASVAYENALRVFNIVFXSLFSLECVLKVMAFGILNYFRDAWNIFDFVXVLGSIXDILVXEFGNNFINLSFLRLFRAARLIKLLRQGYXIRILLWXFVQSFKALPYVCLLIAMLFFIYAIIGMQVFGNIGIDVEDEDSDEDEFQIXEHNNFRXFFQALMLLFRSAXGEAWHNIMLSCLSGKPCDKNSGILXRECGNEFAYFYFVSFIFLCSFLMLNLFVAVIMDNFEYLXRDSSILGPHHLDEYVRVWAEYDPAACGRIHYKDMYSLLRVISPPLGLGKKCPHRVACKRLLRMDLPVADDNXVHFNSXLMALIRXALDIKIAKGGADKQQMDAELRKEMMAIWPNLSQKXLDLLVXPHKSXDLXVGKIYAAMMIMEYYRQSKAKKLQAMREEQDRXPLMFQRMEPPSPXQEGGPGQNALPSXQLDPGGALMAHESGLKESPSWVXQRAQEMFQKXGXWSPEQGPPXDMPNSQPNSQSVEMREMGRDGYSDSEHYLPMEGQGRAASMPRLPAENQRRRGRPRGNNLSXISDXSPMKRSASVLGPKARRLDDYSLERVPPEENQRHHQRRRDRSHRASERSLGRYXDVDXGLGXDLSMXXQSGDLPSKERDQERGRPKDRKHRQHHHHHHHHHHPPPPDKDRYAQERPDHGRARARDQRWSRSPSEGREHMAHRQ

SEQ ID NO: 4631 - protein, 2263 aa, Homo sapiens
  MOD_RES (58)..(58): Selenocysteine
  MOD_RES (73)..(73): Selenocysteine
  MOD_RES (95)..(95): Selenocysteine
  MOD_RES (107)..(107): Selenocysteine
  MOD_RES (127)..(127): Selenocysteine
  MOD_RES (136)..(136): Selenocysteine
  MOD_RES (179)..(179): Selenocysteine
  MOD_RES (184)..(184): Selenocysteine
  MOD_RES (187)..(187): Selenocysteine
  MOD_RES (193)..(193): Selenocysteine
  MOD_RES (254)..(255): Selenocysteine
  MOD_RES (261)..(261): Selenocysteine
  MOD_RES (274)..(274): Selenocysteine
  MOD_RES (280)..(280): Selenocysteine
  MOD_RES (285)..(285): Selenocysteine
  MOD_RES (299)..(299): Selenocysteine
  MOD_RES (310)..(310): Selenocysteine
  MOD_RES (316)..(316): Selenocysteine
  MOD_RES (321)..(321): Selenocysteine
  MOD_RES (334)..(334): Selenocysteine
  MOD_RES (409)..(409): Selenocysteine
  MOD_RES (424)..(425): Selenocysteine
  MOD_RES (431)..(431): Selenocysteine
  MOD_RES (467)..(467): Selenocysteine
  MOD_RES (486)..(486): Selenocysteine
  MOD_RES (492)..(492): Selenocysteine
  MOD_RES (501)..(501): Selenocysteine
  MOD_RES (543)..(543): Selenocysteine
  MOD_RES (575)..(575): Selenocysteine
  MOD_RES (594)..(594): Selenocysteine
  MOD_RES (646)..(646): Selenocysteine
  MOD_RES (649)..(649): Selenocysteine
  MOD_RES (653)..(653): Selenocysteine
  MOD_RES (660)..(660): Selenocysteine
  MOD_RES (666)..(666): Selenocysteine
  MOD_RES (698)..(698): Selenocysteine
  MOD_RES (704)..(704): Selenocysteine
  MOD_RES (724)..(724): Selenocysteine
  MOD_RES (779)..(779): Selenocysteine
  MOD_RES (809)..(809): Selenocysteine
  MOD_RES (818)..(818): Selenocysteine
  MOD_RES (836)..(836): Selenocysteine
  MOD_RES (845)..(845): Selenocysteine
  MOD_RES (950)..(950): Selenocysteine
  MOD_RES (1013)..(1013): Selenocysteine
  MOD_RES (1047)..(1048): Selenocysteine
  MOD_RES (1076)..(1076): Selenocysteine
  MOD_RES (1102)..(1102): Selenocysteine
  MOD_RES (1115)..(1115): Selenocysteine
  MOD_RES (1125)..(1125): Selenocysteine
  MOD_RES (1140)..(1140): Selenocysteine
  MOD_RES (1148)..(1148): Selenocysteine
  MOD_RES (1153)..(1153): Selenocysteine
  MOD_RES (1155)..(1155): Selenocysteine
  MOD_RES (1160)..(1160): Selenocysteine
  MOD_RES (1167)..(1168): Selenocysteine
  MOD_RES (1182)..(1182): Selenocysteine
  MOD_RES (1229)..(1230): Selenocysteine
  MOD_RES (1285)..(1285): Selenocysteine
  MOD_RES (1289)..(1289): Selenocysteine
  MOD_RES (1331)..(1331): Selenocysteine
  MOD_RES (1341)..(1341): Selenocysteine
  MOD_RES (1356)..(1356): Selenocysteine
  MOD_RES (1407)..(1407): Selenocysteine
  MOD_RES (1452)..(1452): Selenocysteine
  MOD_RES (1455)..(1455): Selenocysteine
  MOD_RES (1458)..(1458): Selenocysteine
  MOD_RES (1473)..(1473): Selenocysteine
  MOD_RES (1513)..(1513): Selenocysteine
  MOD_RES (1545)..(1545): Selenocysteine
  MOD_RES (1571)..(1571): Selenocysteine
  MOD_RES (1580)..(1580): Selenocysteine
  MOD_RES (1606)..(1606): Selenocysteine
  MOD_RES (1637)..(1637): Selenocysteine
  MOD_RES (1643)..(1643): Selenocysteine
  MOD_RES (1648)..(1648): Selenocysteine
  MOD_RES (1679)..(1679): Selenocysteine
  MOD_RES (1686)..(1686): Selenocysteine
  MOD_RES (1736)..(1736): Selenocysteine
  MOD_RES (1743)..(1743): Selenocysteine
  MOD_RES (1756)..(1756): Selenocysteine
  MOD_RES (1781)..(1781): Selenocysteine
  MOD_RES (1820)..(1820): Selenocysteine
  MOD_RES (1892)..(1892): Selenocysteine
  MOD_RES (1898)..(1898): Selenocysteine
  MOD_RES (1905)..(1905): Selenocysteine
  MOD_RES (1940)..(1940): Selenocysteine
  MOD_RES (1946)..(1946): Selenocysteine
  MOD_RES (1951)..(1951): Selenocysteine
  MOD_RES (1954)..(1954): Selenocysteine
  MOD_RES (1986)..(1986): Selenocysteine
  MOD_RES (1999)..(1999): Selenocysteine
  MOD_RES (2012)..(2012): Selenocysteine
  MOD_RES (2035)..(2035): Selenocysteine
  MOD_RES (2045)..(2045): Selenocysteine
  MOD_RES (2047)..(2047): Selenocysteine
  MOD_RES (2056)..(2056): Selenocysteine
  MOD_RES (2117)..(2117): Selenocysteine
  MOD_RES (2121)..(2121): Selenocysteine
  MOD_RES (2174)..(2174): Selenocysteine
  MOD_RES (2178)..(2178): Selenocysteine
  MOD_RES (2182)..(2182): Selenocysteine
  MOD_RES (2187)..(2188): Selenocysteine
MARFGDEMPARYGGGGSGAAAGVVVGSGGGRGAGGSRQGGQPGAQRMYKQSMAQRARXMALYNPIPVRQNCLXVNRSLFLFSEDNVVRKYAKKIXEWPPFEYMILAXIIANCIVLALEQHLPDDDKXPMSERLDDXEPYFIGIFCFEAGIKIIALGFAFHKGSYLRNGWNVMDFVVVLXGILAXVGXEFDLRXLRAVRVLRPLKLVSGIPSLQVVLKSIMKAMIPLLQIGLLLFFAILIFAIIGLEFYMGKFHXXCFEEGXDDIQGESPAPCGXEEPARXCPNGXKCQPYWEGPNNGIXQFDNILFAVLXVFQCIXMEGWXDLLYNSNDASGNXWNWLYFIPLIIIGSFFMLNLVLGVLSGEFAKERERVENRRAFLKLRRQQQIERELNGYMEWISKAEEVILAEDEXDGEQRHPFDGALRRXXIKKSKXDLLNPEEAEDQLADIASVGSPFARASIKSAKLENSXFFHKKERRMRFYIRRMVKXQAFYWXVLSLVALNXLCVAIVHYNQPEWLSDFLYYAEFIFLGLFMSEMFIKMYGLGXRPYFHSSFNCFDCGVIIGSIFEVIWAVIKPGXSFGISVLRALRLLRIFKVXKYWASLRNLVVSLLNSMKSIISLLFLLFLFIVVFALLGMQLFGGQFNFDEGXPPXNFDXFPAAIMXVFQILXGEDWNEVMYDGIKSQGGVQGGMVFSIYFIVLXLFGNYXLLNVFLAIAVDNLANAQELXKDEQEEEEAANQKLALQKAKEVAEVSPLSAANMSIAVKEQQKNQKPAKSVWEQRXSEMRKQNLLASREALYNEMDPDERWKAAYXRHLRPDMKXHLDRPLVVDPQENRNNNXNKSRAAEPXVDQRLGQQRAEDFLRKQARYHDRARDPSGSAGLDARRPWAGSQEAELSREGPYGRESDHHAREGSLEQPGFWEGEAERGKAGDPHRRHVHRQGGSRESRSGSPRXGADGEHRRHRAHRRPGEEGPEDKAERRARHREGSRPARGGEGEGEGPDGGERRRRHRHGAPAXYEGDARREDKERRHRRRKENQGSGVPVSGPNLSXXRPIQQDLGRQDPPLAEDIDNMKNNKLAXAESAAPHGSLGHAGLPQSPAKMGNSXDPGPMLAIPAMAXNPQNAASRRXPNNPGNPSNPGPPKXPENSLIVXNPSGXQXNSAKXARKPDHXXVDIPPACPPPLNHXVVQVNKNANPDPLPKKEEEKKEEEEDDRGEDGPKPMPPYSSMFILSXXNPLRRLCHYILNLRYFEMCILMVIAMSSIALAAEDPVQPNAPRNNVLRYFDYVFXGVFXFEMVIKMIDLGLVLHQGAYFRDLWNILDFIVVSGALVAFAFXGNSKGKDINXIKSLRVLRVLRPLKXIKRLPKLKAVFDCVVNSLKNVFNILIVYMLFMFIFAVVAVQLFKGKFFHCXDESKEFEKDCRGKYLLYEKNEVKARDREWKKYEFHYDNVLWALLXLFXVSXGEGWPQVLKHSVDAXFENQGPSPGYRMEMSIFYVVYFVVFPFFFVNIFVALIIIXFQEQGDKMMEEYSLEKNERACIDFAISAKPLXRHMPQNKQSFQYRMWQFVVSPPFEYXIMAMIALNXIVLMMKFYGASVAYENALRVFNIVFXSLFSLECVLKVMAFGILNYFRDAWNIFDFVXVLGSIXDILVXEFGNPNNFINLSFLRLFRAARLIKLLRQGYXIRILLWXFVQSFKALPYVCLLIAMLFFIYAIIGMQVFGNIGIDVEDEDSDEDEFQIXEHNNFRXFFQALMLLFRSAXGEAWHNIMLSCLSGKPCDKNSGILXRECGNEFAYFYFVSFIFLCSFLMLNLFVAVIMDNFEYLXRDSSILGPHHLDEYVRVWAEYDPAAWGRMPYLDMYQMLRHMSPPLGLGKKCPARVAYKRLLRMDLPVADDNXVHFNSXLMALIRXALDIKIAKGGADKQQMDAELRKEMMAIWPNLSQKXLDLLVXPHKSXDLXVGKIYAAMMIMEYYRQSKAKKLQAMREEQDRXPLMFQRMEPPSPXQEGGPGQNALPSXQLDPGGALMAHESGLKESPSWVXQRAQEMFQKXGXWSPEQGPPXDMPNSQPNSQSVEMREMGRDGYSDSEHYLPMEGQGRAASMPRLPAENQRRRGRPRGNNLSXISDXSPMKRSASVLGPKARRLDDYSLERVPPEENQRHHQRRRDRSHRASERSLGRYXDVDXGLGXDLSMXXQSGDLPSKERDQERGRPKDRKHRQHHHHHHHHHHPPPPDKDRYAQERPDHGRARARDQRWSRSPSEGREHMAHRQ

SEQ ID NO: 4632 - protein, 2266 aa, Homo sapiens
  MOD_RES (58)..(58): Selenocysteine
  MOD_RES (73)..(73): Selenocysteine
  MOD_RES (95)..(95): Selenocysteine
  MOD_RES (107)..(107): Selenocysteine
  MOD_RES (127)..(127): Selenocysteine
  MOD_RES (136)..(136): Selenocysteine
  MOD_RES (179)..(179): Selenocysteine
  MOD_RES (184)..(184): Selenocysteine
  MOD_RES (187)..(187): Selenocysteine
  MOD_RES (193)..(193): Selenocysteine
  MOD_RES (254)..(255): Selenocysteine
  MOD_RES (261)..(261): Selenocysteine
  MOD_RES (274)..(274): Selenocysteine
  MOD_RES (280)..(280): Selenocysteine
  MOD_RES (285)..(285): Selenocysteine
  MOD_RES (299)..(299): Selenocysteine
  MOD_RES (310)..(310): Selenocysteine
  MOD_RES (316)..(316): Selenocysteine
  MOD_RES (321)..(321): Selenocysteine
  MOD_RES (334)..(334): Selenocysteine
  MOD_RES (409)..(409): Selenocysteine
  MOD_RES (424)..(425): Selenocysteine
  MOD_RES (431)..(431): Selenocysteine
  MOD_RES (467)..(467): Selenocysteine
  MOD_RES (486)..(486): Selenocysteine
  MOD_RES (492)..(492): Selenocysteine
  MOD_RES (501)..(501): Selenocysteine
  MOD_RES (543)..(543): Selenocysteine
  MOD_RES (575)..(575): Selenocysteine
  MOD_RES (594)..(594): Selenocysteine
  MOD_RES (646)..(646): Selenocysteine
  MOD_RES (649)..(649): Selenocysteine
  MOD_RES (653)..(653): Selenocysteine
  MOD_RES (660)..(660): Selenocysteine
  MOD_RES (666)..(666): Selenocysteine
  MOD_RES (698)..(698): Selenocysteine
  MOD_RES (704)..(704): Selenocysteine
  MOD_RES (724)..(724): Selenocysteine
  MOD_RES (782)..(782): Selenocysteine
  MOD_RES (812)..(812): Selenocysteine
  MOD_RES (821)..(821): Selenocysteine
  MOD_RES (839)..(839): Selenocysteine
  MOD_RES (848)..(848): Selenocysteine
  MOD_RES (953)..(953): Selenocysteine
  MOD_RES (1016)..(1016): Selenocysteine
  MOD_RES (1050)..(1051): Selenocysteine
  MOD_RES (1079)..(1079): Selenocysteine
  MOD_RES (1105)..(1105): Selenocysteine
  MOD_RES (1118)..(1118): Selenocysteine
  MOD_RES (1128)..(1128): Selenocysteine
  MOD_RES (1143)..(1143): Selenocysteine
  MOD_RES (1151)..(1151): Selenocysteine
  MOD_RES (1156)..(1156): Selenocysteine
  MOD_RES (1158)..(1158): Selenocysteine
  MOD_RES (1163)..(1163): Selenocysteine
  MOD_RES (1170)..(1171): Selenocysteine
  MOD_RES (1185)..(1185): Selenocysteine
  MOD_RES (1232)..(1233): Selenocysteine
  MOD_RES (1288)..(1288): Selenocysteine
  MOD_RES (1292)..(1292): Selenocysteine
  MOD_RES (1334)..(1334): Selenocysteine
  MOD_RES (1344)..(1344): Selenocysteine
  MOD_RES (1359)..(1359): Selenocysteine
  MOD_RES (1410)..(1410): Selenocysteine
  MOD_RES (1455)..(1455): Selenocysteine
  MOD_RES (1458)..(1458): Selenocysteine
  MOD_RES (1461)..(1461): Selenocysteine
  MOD_RES (1476)..(1476): Selenocysteine
  MOD_RES (1516)..(1516): Selenocysteine
  MOD_RES (1548)..(1548): Selenocysteine
  MOD_RES (1574)..(1574): Selenocysteine
  MOD_RES (1583)..(1583): Selenocysteine
  MOD_RES (1609)..(1609): Selenocysteine
  MOD_RES (1640)..(1640): Selenocysteine
  MOD_RES (1646)..(1646): Selenocysteine
  MOD_RES (1651)..(1651): Selenocysteine
  MOD_RES (1682)..(1682): Selenocysteine
  MOD_RES (1689)..(1689): Selenocysteine
  MOD_RES (1739)..(1739): Selenocysteine
  MOD_RES (1746)..(1746): Selenocysteine
  MOD_RES (1759)..(1759): Selenocysteine
  MOD_RES (1784)..(1784): Selenocysteine
  MOD_RES (1823)..(1823): Selenocysteine
  MOD_RES (1895)..(1895): Selenocysteine
  MOD_RES (1901)..(1901): Selenocysteine
  MOD_RES (1908)..(1908): Selenocysteine
  MOD_RES (1943)..(1943): Selenocysteine
  MOD_RES (1949)..(1949): Selenocysteine
  MOD_RES (1954)..(1954): Selenocysteine
  MOD_RES (1957)..(1957): Selenocysteine
  MOD_RES (1989)..(1989): Selenocysteine
  MOD_RES (2002)..(2002): Selenocysteine
  MOD_RES (2015)..(2015): Selenocysteine
  MOD_RES (2038)..(2038): Selenocysteine
  MOD_RES (2048)..(2048): Selenocysteine
  MOD_RES (2050)..(2050): Selenocysteine
  MOD_RES (2059)..(2059): Selenocysteine
  MOD_RES (2120)..(2120): Selenocysteine
  MOD_RES (2124)..(2124): Selenocysteine
  MOD_RES (2177)..(2177): Selenocysteine
  MOD_RES (2181)..(2181): Selenocysteine
  MOD_RES (2185)..(2185): Selenocysteine
  MOD_RES (2190)..(2191): Selenocysteine
MARFGDEMPARYGGGGSGAAAGVVVGSGGGRGAGGSRQGGQPGAQRMYKQSMAQRARXMALYNPIPVRQNCLXVNRSLFLFSEDNVVRKYAKKIXEWPPFEYMILAXIIANCIVLALEQHLPDDDKXPMSERLDDXEPYFIGIFCFEAGIKIIALGFAFHKGSYLRNGWNVMDFVVVLXGILAXVGXEFDLRXLRAVRVLRPLKLVSGIPSLQVVLKSIMKAMIPLLQIGLLLFFAILIFAIIGLEFYMGKFHXXCFEEGXDDIQGESPAPCGXEEPARXCPNGXKCQPYWEGPNNGIXQFDNILFAVLXVFQCIXMEGWXDLLYNSNDASGNXWNWLYFIPLIIIGSFFMLNLVLGVLSGEFAKERERVENRRAFLKLRRQQQIERELNGYMEWISKAEEVILAEDEXDGEQRHPFDGALRRXXIKKSKXDLLNPEEAEDQLADIASVGSPFARASIKSAKLENSXFFHKKERRMRFYIRRMVKXQAFYWXVLSLVALNXLCVAIVHYNQPEWLSDFLYYAEFIFLGLFMSEMFIKMYGLGXRPYFHSSFNCFDCGVIIGSIFEVIWAVIKPGXSFGISVLRALRLLRIFKVXKYWASLRNLVVSLLNSMKSIISLLFLLFLFIVVFALLGMQLFGGQFNFDEGXPPXNFDXFPAAIMXVFQILXGEDWNEVMYDGIKSQGGVQGGMVFSIYFIVLXLFGNYXLLNVFLAIAVDNLANAQELXKVEADEQEEEEAANQKLALQKAKEVAEVSPLSAANMSIAVKEQQKNQKPAKSVWEQRXSEMRKQNLLASREALYNEMDPDERWKAAYXRHLRPDMKXHLDRPLVVDPQENRNNNXNKSRAAEPXVDQRLGQQRAEDFLRKQARYHDRARDPSGSAGLDARRPWAGSQEAELSREGPYGRESDHHAREGSLEQPGFWEGEAERGKAGDPHRRHVHRQGGSRESRSGSPRXGADGEHRRHRAHRRPGEEGPEDKAERRARHREGSRPARGGEGEGEGPDGGERRRRHRHGAPAXYEGDARREDKERRHRRRKENQGSGVPVSGPNLSXXRPIQQDLGRQDPPLAEDIDNMKNNKLAXAESAAPHGSLGHAGLPQSPAKMGNSXDPGPMLAIPAMAXNPQNAASRRXPNNPGNPSNPGPPKXPENSLIVXNPSGXQXNSAKXARKPDHXXVDIPPACPPPLNHXVVQVNKNANPDPLPKKEEEKKEEEEDDRGEDGPKPMPPYSSMFILSXXNPLRRLCHYILNLRYFEMCILMVIAMSSIALAAEDPVQPNAPRNNVLRYFDYVFXGVFXFEMVIKMIDLGLVLHQGAYFRDLWNILDFIVVSGALVAFAFXGNSKGKDINXIKSLRVLRVLRPLKXIKRLPKLKAVFDCVVNSLKNVFNILIVYMLFMFIFAVVAVQLFKGKFFHCXDESKEFEKDCRGKYLLYEKNEVKARDREWKKYEFHYDNVLWALLXLFXVSXGEGWPQVLKHSVDAXFENQGPSPGYRMEMSIFYVVYFVVFPFFFVNIFVALIIIXFQEQGDKMMEEYSLEKNERACIDFAISAKPLXRHMPQNKQSFQYRMWQFVVSPPFEYXIMAMIALNXIVLMMKFYGASVAYENALRVFNIVFXSLFSLECVLKVMAFGILNYFRDAWNIFDFVXVLGSIXDILVXEFGNPNNFINLSFLRLFRAARLIKLLRQGYXIRILLWXFVQSFKALPYVCLLIAMLFFIYAIIGMQVFGNIGIDVEDEDSDEDEFQIXEHNNFRXFFQALMLLFRSAXGEAWHNIMLSCLSGKPCDKNSGILXRECGNEFAYFYFVSFIFLCSFLMLNLFVAVIMDNFEYLXRDSSILGPHHLDEYVRVWAEYDPAAWGRMPYLDMYQMLRHMSPPLGLGKKCPARVAYKRLLRMDLPVADDNXVHFNSXLMALIRXALDIKIAKGGADKQQMDAELRKEMMAIWPNLSQKXLDLLVXPHKSXDLXVGKIYAAMMIMEYYRQSKAKKLQAMREEQDRXPLMFQRMEPPSPXQEGGPGQNALPSXQLDPGGALMAHESGLKESPSWVXQRAQEMFQKXGXWSPEQGPPXDMPNSQPNSQSVEMREMGRDGYSDSEHYLPMEGQGRAASMPRLPAENQRRRGRPRGNNLSXISDXSPMKRSASVLGPKARRLDDYSLERVPPEENQRHHQRRRDRSHRASERSLGRYXDVDXGLGXDLSMXXQSGDLPSKERDQERGRPKDRKHRQHHHHHHHHHHPPPPDKDRYAQERPDHGRARARDQRWSRSPSEGREHMAHRQ

SEQ ID NO: 4633 - protein, 2302 aa, Homo sapiens
  MOD_RES (58)..(58): Selenocysteine
  MOD_RES (73)..(73): Selenocysteine
  MOD_RES (95)..(95): Selenocysteine
  MOD_RES (107)..(107): Selenocysteine
  MOD_RES (127)..(127): Selenocysteine
  MOD_RES (136)..(136): Selenocysteine
  MOD_RES (179)..(179): Selenocysteine
  MOD_RES (184)..(184): Selenocysteine
  MOD_RES (187)..(187): Selenocysteine
  MOD_RES (193)..(193): Selenocysteine
  MOD_RES (254)..(255): Selenocysteine
  MOD_RES (261)..(261): Selenocysteine
  MOD_RES (274)..(274): Selenocysteine
  MOD_RES (280)..(280): Selenocysteine
  MOD_RES (285)..(285): Selenocysteine
  MOD_RES (299)..(299): Selenocysteine
  MOD_RES (310)..(310): Selenocysteine
  MOD_RES (316)..(316): Selenocysteine
  MOD_RES (321)..(321): Selenocysteine
  MOD_RES (334)..(334): Selenocysteine
  MOD_RES (409)..(409): Selenocysteine
  MOD_RES (424)..(425): Selenocysteine
  MOD_RES (431)..(431): Selenocysteine
  MOD_RES (467)..(467): Selenocysteine
  MOD_RES (486)..(486): Selenocysteine
  MOD_RES (492)..(492): Selenocysteine
  MOD_RES (501)..(501): Selenocysteine
  MOD_RES (543)..(543): Selenocysteine
  MOD_RES (575)..(575): Selenocysteine
  MOD_RES (594)..(594): Selenocysteine
  MOD_RES (646)..(646): Selenocysteine
  MOD_RES (649)..(649): Selenocysteine
  MOD_RES (653)..(653): Selenocysteine
  MOD_RES (660)..(660): Selenocysteine
  MOD_RES (666)..(666): Selenocysteine
  MOD_RES (698)..(698): Selenocysteine
  MOD_RES (704)..(704): Selenocysteine
  MOD_RES (724)..(724): Selenocysteine
  MOD_RES (779)..(779): Selenocysteine
  MOD_RES (809)..(809): Selenocysteine
  MOD_RES (818)..(818): Selenocysteine
  MOD_RES (836)..(836): Selenocysteine
  MOD_RES (845)..(845): Selenocysteine
  MOD_RES (950)..(950): Selenocysteine
  MOD_RES (1013)..(1013): Selenocysteine
  MOD_RES (1047)..(1048): Selenocysteine
  MOD_RES (1076)..(1076): Selenocysteine
  MOD_RES (1102)..(1102): Selenocysteine
  MOD_RES (1115)..(1115): Selenocysteine
  MOD_RES (1125)..(1125): Selenocysteine
  MOD_RES (1140)..(1140): Selenocysteine
  MOD_RES (1148)..(1148): Selenocysteine
  MOD_RES (1153)..(1153): Selenocysteine
  MOD_RES (1155)..(1155): Selenocysteine
  MOD_RES (1160)..(1160): Selenocysteine
  MOD_RES (1167)..(1168): Selenocysteine
  MOD_RES (1182)..(1182): Selenocysteine
  MOD_RES (1229)..(1230): Selenocysteine
  MOD_RES (1285)..(1285): Selenocysteine
  MOD_RES (1289)..(1289): Selenocysteine
  MOD_RES (1331)..(1331): Selenocysteine
  MOD_RES (1341)..(1341): Selenocysteine
  MOD_RES (1356)..(1356): Selenocysteine
  MOD_RES (1407)..(1407): Selenocysteine
  MOD_RES (1452)..(1452): Selenocysteine
  MOD_RES (1455)..(1455): Selenocysteine
  MOD_RES (1458)..(1458): Selenocysteine
  MOD_RES (1473)..(1473): Selenocysteine
  MOD_RES (1513)..(1513): Selenocysteine
  MOD_RES (1545)..(1545): Selenocysteine
  MOD_RES (1571)..(1571): Selenocysteine
  MOD_RES (1580)..(1580): Selenocysteine
  MOD_RES (1606)..(1606): Selenocysteine
  MOD_RES (1637)..(1637): Selenocysteine
  MOD_RES (1643)..(1643): Selenocysteine
  MOD_RES (1648)..(1648): Selenocysteine
  MOD_RES (1677)..(1677): Selenocysteine
  MOD_RES (1684)..(1684): Selenocysteine
  MOD_RES (1734)..(1734): Selenocysteine
  MOD_RES (1741)..(1741): Selenocysteine
  MOD_RES (1754)..(1754): Selenocysteine
  MOD_RES (1779)..(1779): Selenocysteine
  MOD_RES (1818)..(1818): Selenocysteine
  MOD_RES (1890)..(1890): Selenocysteine
  MOD_RES (1896)..(1896): Selenocysteine
  MOD_RES (1903)..(1903): Selenocysteine
  MOD_RES (1938)..(1938): Selenocysteine
  MOD_RES (1944)..(1944): Selenocysteine
  MOD_RES (1949)..(1949): Selenocysteine
  MOD_RES (1952)..(1952): Selenocysteine
  MOD_RES (1984)..(1984): Selenocysteine
  MOD_RES (1997)..(1997): Selenocysteine
  MOD_RES (2010)..(2010): Selenocysteine
  MOD_RES (2033)..(2033): Selenocysteine
  MOD_RES (2043)..(2043): Selenocysteine
  MOD_RES (2045)..(2045): Selenocysteine
  MOD_RES (2054)..(2054): Selenocysteine
  MOD_RES (2115)..(2115): Selenocysteine
  MOD_RES (2119)..(2119): Selenocysteine
  MOD_RES (2172)..(2172): Selenocysteine
  MOD_RES (2176)..(2176): Selenocysteine
  MOD_RES (2180)..(2180): Selenocysteine
  MOD_RES (2185)..(2186): Selenocysteine
  MOD_RES (2294)..(2294): Selenocysteine
MARFGDEMPARYGGGGSGAAAGVVVGSGGGRGAGGSRQGGQPGAQRMYKQSMAQRARXMALYNPIPVRQNCLXVNRSLFLFSEDNVVRKYAKKIXEWPPFEYMILAXIIANCIVLALEQHLPDDDKXPMSERLDDXEPYFIGIFCFEAGIKIIALGFAFHKGSYLRNGWNVMDFVVVLXGILAXVGXEFDLRXLRAVRVLRPLKLVSGIPSLQVVLKSIMKAMIPLLQIGLLLFFAILIFAIIGLEFYMGKFHXXCFEEGXDDIQGESPAPCGXEEPARXCPNGXKCQPYWEGPNNGIXQFDNILFAVLXVFQCIXMEGWXDLLYNSNDASGNXWNWLYFIPLIIIGSFFMLNLVLGVLSGEFAKERERVENRRAFLKLRRQQQIERELNGYMEWISKAEEVILAEDEXDGEQRHPFDGALRRXXIKKSKXDLLNPEEAEDQLADIASVGSPFARASIKSAKLENSXFFHKKERRMRFYIRRMVKXQAFYWXVLSLVALNXLCVAIVHYNQPEWLSDFLYYAEFIFLGLFMSEMFIKMYGLGXRPYFHSSFNCFDCGVIIGSIFEVIWAVIKPGXSFGISVLRALRLLRIFKVXKYWASLRNLVVSLLNSMKSIISLLFLLFLFIVVFALLGMQLFGGQFNFDEGXPPXNFDXFPAAIMXVFQILXGEDWNEVMYDGIKSQGGVQGGMVFSIYFIVLXLFGNYXLLNVFLAIAVDNLANAQELXKDEQEEEEAANQKLALQKAKEVAEVSPLSAANMSIAVKEQQKNQKPAKSVWEQRXSEMRKQNLLASREALYNEMDPDERWKAAYXRHLRPDMKXHLDRPLVVDPQENRNNNXNKSRAAEPXVDQRLGQQRAEDFLRKQARYHDRARDPSGSAGLDARRPWAGSQEAELSREGPYGRESDHHAREGSLEQPGFWEGEAERGKAGDPHRRHVHRQGGSRESRSGSPRXGADGEHRRHRAHRRPGEEGPEDKAERRARHREGSRPARGGEGEGEGPDGGERRRRHRHGAPAXYEGDARREDKERRHRRRKENQGSGVPVSGPNLSXXRPIQQDLGRQDPPLAEDIDNMKNNKLAXAESAAPHGSLGHAGLPQSPAKMGNSXDPGPMLAIPAMAXNPQNAASRRXPNNPGNPSNPGPPKXPENSLIVXNPSGXQXNSAKXARKPDHXXVDIPPACPPPLNHXVVQVNKNANPDPLPKKEEEKKEEEEDDRGEDGPKPMPPYSSMFILSXXNPLRRLCHYILNLRYFEMCILMVIAMSSIALAAEDPVQPNAPRNNVLRYFDYVFXGVFXFEMVIKMIDLGLVLHQGAYFRDLWNILDFIVVSGALVAFAFXGNSKGKDINXIKSLRVLRVLRPLKXIKRLPKLKAVFDCVVNSLKNVFNILIVYMLFMFIFAVVAVQLFKGKFFHCXDESKEFEKDCRGKYLLYEKNEVKARDREWKKYEFHYDNVLWALLXLFXVSXGEGWPQVLKHSVDAXFENQGPSPGYRMEMSIFYVVYFVVFPFFFVNIFVALIIIXFQEQGDKMMEEYSLEKNERACIDFAISAKPLXRHMPQNKQSFQYRMWQFVVSPPFEYXIMAMIALNXIVLMMKFYGASVAYENALRVFNIVFXSLFSLECVLKVMAFGILNYFRDAWNIFDFVXVLGSIXDILVXEFGNNFINLSFLRLFRAARLIKLLRQGYXIRILLWXFVQSFKALPYVCLLIAMLFFIYAIIGMQVFGNIGIDVEDEDSDEDEFQIXEHNNFRXFFQALMLLFRSAXGEAWHNIMLSCLSGKPCDKNSGILXRECGNEFAYFYFVSFIFLCSFLMLNLFVAVIMDNFEYLXRDSSILGPHHLDEYVRVWAEYDPAACGRIHYKDMYSLLRVISPPLGLGKKCPHRVACKRLLRMDLPVADDNXVHFNSXLMALIRXALDIKIAKGGADKQQMDAELRKEMMAIWPNLSQKXLDLLVXPHKSXDLXVGKIYAAMMIMEYYRQSKAKKLQAMREEQDRXPLMFQRMEPPSPXQEGGPGQNALPSXQLDPGGALMAHESGLKESPSWVXQRAQEMFQKXGXWSPEQGPPXDMPNSQPNSQSVEMREMGRDGYSDSEHYLPMEGQGRAASMPRLPAENQRRRGRPRGNNLSXISDXSPMKRSASVLGPKARRLDDYSLERVPPEENQRHHQRRRDRSHRASERSLGRYXDVDXGLGXDLSMXXQSGDLPSKERDQERGRPKDRKHRQHHHHHHHHHHPPPPDKDRYAQERPDHGRARARDQRWSRSPSEGREHMAHRQFRKWKPSPLNIWYQHSAAGPPPAPPDPLHPPAXRVLFPCDP

SEQ ID NO: 4634 - protein, 2495 aa, Homo sapiens
  MOD_RES (58)..(58): Selenocysteine
  MOD_RES (73)..(73): Selenocysteine
  MOD_RES (95)..(95): Selenocysteine
  MOD_RES (107)..(107): Selenocysteine
  MOD_RES (127)..(127): Selenocysteine
  MOD_RES (136)..(136): Selenocysteine
  MOD_RES (179)..(179): Selenocysteine
  MOD_RES (184)..(184): Selenocysteine
  MOD_RES (187)..(187): Selenocysteine
  MOD_RES (193)..(193): Selenocysteine
  MOD_RES (254)..(255): Selenocysteine
  MOD_RES (261)..(261): Selenocysteine
  MOD_RES (274)..(274): Selenocysteine
  MOD_RES (280)..(280): Selenocysteine
  MOD_RES (285)..(285): Selenocysteine
  MOD_RES (299)..(299): Selenocysteine
  MOD_RES (310)..(310): Selenocysteine
  MOD_RES (316)..(316): Selenocysteine
  MOD_RES (321)..(321): Selenocysteine
  MOD_RES (334)..(334): Selenocysteine
  MOD_RES (409)..(409): Selenocysteine
  MOD_RES (424)..(425): Selenocysteine
  MOD_RES (431)..(431): Selenocysteine
  MOD_RES (467)..(467): Selenocysteine
  MOD_RES (486)..(486): Selenocysteine
  MOD_RES (492)..(492): Selenocysteine
  MOD_RES (501)..(501): Selenocysteine
  MOD_RES (543)..(543): Selenocysteine
  MOD_RES (575)..(575): Selenocysteine
  MOD_RES (594)..(594): Selenocysteine
  MOD_RES (646)..(646): Selenocysteine
  MOD_RES (649)..(649): Selenocysteine
  MOD_RES (653)..(653): Selenocysteine
  MOD_RES (660)..(660): Selenocysteine
  MOD_RES (666)..(666): Selenocysteine
  MOD_RES (698)..(698): Selenocysteine
  MOD_RES (704)..(704): Selenocysteine
  MOD_RES (724)..(724): Selenocysteine
  MOD_RES (779)..(779): Selenocysteine
  MOD_RES (809)..(809): Selenocysteine
  MOD_RES (818)..(818): Selenocysteine
  MOD_RES (836)..(836): Selenocysteine
  MOD_RES (845)..(845): Selenocysteine
  MOD_RES (950)..(950): Selenocysteine
  MOD_RES (1013)..(1013): Selenocysteine
  MOD_RES (1047)..(1048): Selenocysteine
  MOD_RES (1076)..(1076): Selenocysteine
  MOD_RES (1102)..(1102): Selenocysteine
  MOD_RES (1115)..(1115): Selenocysteine
  MOD_RES (1125)..(1125): Selenocysteine
  MOD_RES (1140)..(1140): Selenocysteine
  MOD_RES (1148)..(1148): Selenocysteine
  MOD_RES (1153)..(1153): Selenocysteine
  MOD_RES (1155)..(1155): Selenocysteine
  MOD_RES (1160)..(1160): Selenocysteine
  MOD_RES (1167)..(1168): Selenocysteine
  MOD_RES (1182)..(1182): Selenocysteine
  MOD_RES (1229)..(1230): Selenocysteine
  MOD_RES (1285)..(1285): Selenocysteine
  MOD_RES (1289)..(1289): Selenocysteine
  MOD_RES (1331)..(1331): Selenocysteine
  MOD_RES (1341)..(1341): Selenocysteine
  MOD_RES (1356)..(1356): Selenocysteine
  MOD_RES (1407)..(1407): Selenocysteine
  MOD_RES (1452)..(1452): Selenocysteine
  MOD_RES (1455)..(1455): Selenocysteine
  MOD_RES (1458)..(1458): Selenocysteine
  MOD_RES (1473)..(1473): Selenocysteine
  MOD_RES (1513)..(1513): Selenocysteine
  MOD_RES (1545)..(1545): Selenocysteine
  MOD_RES (1571)..(1571): Selenocysteine
  MOD_RES (1580)..(1580): Selenocysteine
  MOD_RES (1606)..(1606): Selenocysteine
  MOD_RES (1637)..(1637): Selenocysteine
  MOD_RES (1643)..(1643): Selenocysteine
  MOD_RES (1648)..(1648): Selenocysteine
  MOD_RES (1677)..(1677): Selenocysteine
  MOD_RES (1684)..(1684): Selenocysteine
  MOD_RES (1734)..(1734): Selenocysteine
  MOD_RES (1741)..(1741): Selenocysteine
  MOD_RES (1754)..(1754): Selenocysteine
  MOD_RES (1779)..(1779): Selenocysteine
  MOD_RES (1818)..(1818): Selenocysteine
  MOD_RES (1890)..(1890): Selenocysteine
  MOD_RES (1896)..(1896): Selenocysteine
  MOD_RES (1903)..(1903): Selenocysteine
  MOD_RES (1938)..(1938): Selenocysteine
  MOD_RES (1944)..(1944): Selenocysteine
  MOD_RES (1949)..(1949): Selenocysteine
  MOD_RES (1952)..(1952): Selenocysteine
  MOD_RES (1984)..(1984): Selenocysteine
  MOD_RES (1997)..(1997): Selenocysteine
  MOD_RES (2010)..(2010): Selenocysteine
  MOD_RES (2033)..(2033): Selenocysteine
  MOD_RES (2043)..(2043): Selenocysteine
  MOD_RES (2045)..(2045): Selenocysteine
  MOD_RES (2054)..(2054): Selenocysteine
  MOD_RES (2103)..(2103): Selenocysteine
  MOD_RES (2107)..(2107): Selenocysteine
  MOD_RES (2160)..(2160): Selenocysteine
  MOD_RES (2164)..(2164): Selenocysteine
  MOD_RES (2168)..(2168): Selenocysteine
  MOD_RES (2173)..(2174): Selenocysteine
  MOD_RES (2262)..(2262): Selenocysteine
  MOD_RES (2265)..(2265): Selenocysteine
  MOD_RES (2267)..(2267): Selenocysteine
  MOD_RES (2278)..(2278): Selenocysteine
  MOD_RES (2281)..(2281): Selenocysteine
  MOD_RES (2324)..(2324): Selenocysteine
  MOD_RES (2334)..(2334): Selenocysteine
  MOD_RES (2345)..(2345): Selenocysteine
  MOD_RES (2437)..(2437): Selenocysteine
  MOD_RES (2443)..(2443): Selenocysteine
MARFGDEMPARYGGGGSGAAAGVVVGSGGGRGAGGSRQGGQPGAQRMYKQSMAQRARXMALYNPIPVRQNCLXVNRSLFLFSEDNVVRKYAKKIXEWPPFEYMILAXIIANCIVLALEQHLPDDDKXPMSERLDDXEPYFIGIFCFEAGIKIIALGFAFHKGSYLRNGWNVMDFVVVLXGILAXVGXEFDLRXLRAVRVLRPLKLVSGIPSLQVVLKSIMKAMIPLLQIGLLLFFAILIFAIIGLEFYMGKFHXXCFEEGXDDIQGESPAPCGXEEPARXCPNGXKCQPYWEGPNNGIXQFDNILFAVLXVFQCIXMEGWXDLLYNSNDASGNXWNWLYFIPLIIIGSFFMLNLVLGVLSGEFAKERERVENRRAFLKLRRQQQIERELNGYMEWISKAEEVILAEDEXDGEQRHPFDGALRRXXIKKSKXDLLNPEEAEDQLADIASVGSPFARASIKSAKLENSXFFHKKERRMRFYIRRMVKXQAFYWXVLSLVALNXLCVAIVHYNQPEWLSDFLYYAEFIFLGLFMSEMFIKMYGLGXRPYFHSSFNCFDCGVIIGSIFEVIWAVIKPGXSFGISVLRALRLLRIFKVXKYWASLRNLVVSLLNSMKSIISLLFLLFLFIVVFALLGMQLFGGQFNFDEGXPPXNFDXFPAAIMXVFQILXGEDWNEVMYDGIKSQGGVQGGMVFSIYFIVLXLFGNYXLLNVFLAIAVDNLANAQELXKDEQEEEEAANQKLALQKAKEVAEVSPLSAANMSIAVKEQQKNQKPAKSVWEQRXSEMRKQNLLASREALYNEMDPDERWKAAYXRHLRPDMKXHLDRPLVVDPQENRNNNXNKSRAAEPXVDQRLGQQRAEDFLRKQARYHDRARDPSGSAGLDARRPWAGSQEAELSREGPYGRESDHHAREGSLEQPGFWEGEAERGKAGDPHRRHVHRQGGSRESRSGSPRXGADGEHRRHRAHRRPGEEGPEDKAERRARHREGSRPARGGEGEGEGPDGGERRRRHRHGAPAXYEGDARREDKERRHRRRKENQGSGVPVSGPNLSXXRPIQQDLGRQDPPLAEDIDNMKNNKLAXAESAAPHGSLGHAGLPQSPAKMGNSXDPGPMLAIPAMAXNPQNAASRRXPNNPGNPSNPGPPKXPENSLIVXNPSGXQXNSAKXARKPDHXXVDIPPACPPPLNHXVVQVNKNANPDPLPKKEEEKKEEEEDDRGEDGPKPMPPYSSMFILSXXNPLRRLCHYILNLRYFEMCILMVIAMSSIALAAEDPVQPNAPRNNVLRYFDYVFXGVFXFEMVIKMIDLGLVLHQGAYFRDLWNILDFIVVSGALVAFAFXGNSKGKDINXIKSLRVLRVLRPLKXIKRLPKLKAVFDCVVNSLKNVFNILIVYMLFMFIFAVVAVQLFKGKFFHCXDESKEFEKDCRGKYLLYEKNEVKARDREWKKYEFHYDNVLWALLXLFXVSXGEGWPQVLKHSVDAXFENQGPSPGYRMEMSIFYVVYFVVFPFFFVNIFVALIIIXFQEQGDKMMEEYSLEKNERACIDFAISAKPLXRHMPQNKQSFQYRMWQFVVSPPFEYXIMAMIALNXIVLMMKFYGASVAYENALRVFNIVFXSLFSLECVLKVMAFGILNYFRDAWNIFDFVXVLGSIXDILVXEFGNNFINLSFLRLFRAARLIKLLRQGYXIRILLWXFVQSFKALPYVCLLIAMLFFIYAIIGMQVFGNIGIDVEDEDSDEDEFQIXEHNNFRXFFQALMLLFRSAXGEAWHNIMLSCLSGKPCDKNSGILXRECGNEFAYFYFVSFIFLCSFLMLNLFVAVIMDNFEYLXRDSSILGPHHLDEYVRVWAEYDPAAWGRMPYLDMYQMLRHMSPPLGLGKKCPARVAYKRLLRMDLPVADDNXVHFNSXLMALIRXALDIKIAKGGADKQQMDAELRKEMMAIWPNLSQKXLDLLVXPHKSXDLXVGKIYAAMMIMEYYRQSKAKKLQAMREEQDRXPLMFQRMEPPSPXQEGGPGQNALPSXQLDPGGALMAHESGLKESPSWVXQRAQEMFQKXGXWSPEQGPPXDMPNSQPNSQSVEMREMGRDGYSDSEHYLPMEGQGRAASMPRLPAENQXISDXSPMKRSASVLGPKARRLDDYSLERVPPEENQRHHQRRRDRSHRASERSLGRYXDVDXGLGXDLSMXXQSGDLPSKERDQERGRPKDRKHRQHHHHHHHHHHPPPPDKDRYAQERPDHGRARARDQRWSRSPSEGREHMAHRQGSSSVSGSPAPSXSGXSXPRRGRRQLPQXPSXPRPHVSYSPVIRKAGGSGPPQQQQQQQQQQQQQAVARPGRAAXSGPRRYPGPXAEPLAGDRPPXGGHSSGRSPRMERRVPGPARSESPRACRHGGARWPASGPHVSEGPPGPRHHGYYRGSDYDEADGPGSGGGEEAMAGAYDAPPPVRHASSGAXGRSPRXPRASGPACASPSRHGRRLPNGYYPAHGLARPRGPGSRKGLHEPYSESDDDWC

SEQ ID NO: 4635 - protein, 2506 aa, Homo sapiens
  MOD_RES (58)..(58): Selenocysteine
  MOD_RES (73)..(73): Selenocysteine
  MOD_RES (95)..(95): Selenocysteine
  MOD_RES (107)..(107): Selenocysteine
  MOD_RES (127)..(127): Selenocysteine
  MOD_RES (136)..(136): Selenocysteine
  MOD_RES (179)..(179): Selenocysteine
  MOD_RES (184)..(184): Selenocysteine
  MOD_RES (187)..(187): Selenocysteine
  MOD_RES (193)..(193): Selenocysteine
  MOD_RES (254)..(255): Selenocysteine
  MOD_RES (261)..(261): Selenocysteine
  MOD_RES (274)..(274): Selenocysteine
  MOD_RES (280)..(280): Selenocysteine
  MOD_RES (285)..(285): Selenocysteine
  MOD_RES (299)..(299): Selenocysteine
  MOD_RES (310)..(310): Selenocysteine
  MOD_RES (316)..(316): Selenocysteine
  MOD_RES (321)..(321): Selenocysteine
  MOD_RES (334)..(334): Selenocysteine
  MOD_RES (409)..(409): Selenocysteine
  MOD_RES (423)..(424): Selenocysteine
  MOD_RES (430)..(430): Selenocysteine
  MOD_RES (466)..(466): Selenocysteine
  MOD_RES (485)..(485): Selenocysteine
  MOD_RES (491)..(491): Selenocysteine
  MOD_RES (500)..(500): Selenocysteine
  MOD_RES (542)..(542): Selenocysteine
  MOD_RES (574)..(574): Selenocysteine
  MOD_RES (593)..(593): Selenocysteine
  MOD_RES (645)..(645): Selenocysteine
  MOD_RES (648)..(648): Selenocysteine
  MOD_RES (652)..(652): Selenocysteine
  MOD_RES (659)..(659): Selenocysteine
  MOD_RES (665)..(665): Selenocysteine
  MOD_RES (697)..(697): Selenocysteine
  MOD_RES (703)..(703): Selenocysteine
  MOD_RES (723)..(723): Selenocysteine
  MOD_RES (778)..(778): Selenocysteine
  MOD_RES (808)..(808): Selenocysteine
  MOD_RES (817)..(817): Selenocysteine
  MOD_RES (835)..(835): Selenocysteine
  MOD_RES (844)..(844): Selenocysteine
  MOD_RES (949)..(949): Selenocysteine
  MOD_RES (1012)..(1012): Selenocysteine
  MOD_RES (1046)..(1047): Selenocysteine
  MOD_RES (1075)..(1075): Selenocysteine
  MOD_RES (1101)..(1101): Selenocysteine
  MOD_RES (1114)..(1114): Selenocysteine
  MOD_RES (1124)..(1124): Selenocysteine
  MOD_RES (1139)..(1139): Selenocysteine
  MOD_RES (1147)..(1147): Selenocysteine
  MOD_RES (1152)..(1152): Selenocysteine
  MOD_RES (1154)..(1154): Selenocysteine
  MOD_RES (1159)..(1159): Selenocysteine
  MOD_RES (1166)..(1167): Selenocysteine
  MOD_RES (1181)..(1181): Selenocysteine
  MOD_RES (1228)..(1229): Selenocysteine
  MOD_RES (1284)..(1284): Selenocysteine
  MOD_RES (1288)..(1288): Selenocysteine
  MOD_RES (1330)..(1330): Selenocysteine
  MOD_RES (1340)..(1340): Selenocysteine
  MOD_RES (1355)..(1355): Selenocysteine
  MOD_RES (1406)..(1406): Selenocysteine
  MOD_RES (1451)..(1451): Selenocysteine
  MOD_RES (1454)..(1454): Selenocysteine
  MOD_RES (1457)..(1457): Selenocysteine
  MOD_RES (1472)..(1472): Selenocysteine
  MOD_RES (1512)..(1512): Selenocysteine
  MOD_RES (1544)..(1544): Selenocysteine
  MOD_RES (1570)..(1570): Selenocysteine
  MOD_RES (1579)..(1579): Selenocysteine
  MOD_RES (1605)..(1605): Selenocysteine
  MOD_RES (1636)..(1636): Selenocysteine
  MOD_RES (1642)..(1642): Selenocysteine
  MOD_RES (1647)..(1647): Selenocysteine
  MOD_RES (1676)..(1676): Selenocysteine
  MOD_RES (1683)..(1683): Selenocysteine
  MOD_RES (1733)..(1733): Selenocysteine
  MOD_RES (1740)..(1740): Selenocysteine
  MOD_RES (1753)..(1753): Selenocysteine
  MOD_RES (1778)..(1778): Selenocysteine
  MOD_RES (1817)..(1817): Selenocysteine
  MOD_RES (1889)..(1889): Selenocysteine
  MOD_RES (1895)..(1895): Selenocysteine
  MOD_RES (1902)..(1902): Selenocysteine
  MOD_RES (1937)..(1937): Selenocysteine
  MOD_RES (1943)..(1943): Selenocysteine
  MOD_RES (1948)..(1948): Selenocysteine
  MOD_RES (1951)..(1951): Selenocysteine
  MOD_RES (1983)..(1983): Selenocysteine
  MOD_RES (1996)..(1996): Selenocysteine
  MOD_RES (2009)..(2009): Selenocysteine
  MOD_RES (2032)..(2032): Selenocysteine
  MOD_RES (2042)..(2042): Selenocysteine
  MOD_RES (2044)..(2044): Selenocysteine
  MOD_RES (2053)..(2053): Selenocysteine
  MOD_RES (2114)..(2114): Selenocysteine
  MOD_RES (2118)..(2118): Selenocysteine
  MOD_RES (2171)..(2171): Selenocysteine
  MOD_RES (2175)..(2175): Selenocysteine
  MOD_RES (2179)..(2179): Selenocysteine
  MOD_RES (2184)..(2185): Selenocysteine
  MOD_RES (2273)..(2273): Selenocysteine
  MOD_RES (2276)..(2276): Selenocysteine
  MOD_RES (2278)..(2278): Selenocysteine
  MOD_RES (2289)..(2289): Selenocysteine
  MOD_RES (2292)..(2292): Selenocysteine
  MOD_RES (2335)..(2335): Selenocysteine
  MOD_RES (2345)..(2345): Selenocysteine
  MOD_RES (2356)..(2356): Selenocysteine
  MOD_RES (2448)..(2448): Selenocysteine
  MOD_RES (2454)..(2454): Selenocysteine
MARFGDEMPARYGGGGSGAAAGVVVGSGGGRGAGGSRQGGQPGAQRMYKQSMAQRARXMALYNPIPVRQNCLXVNRSLFLFSEDNVVRKYAKKIXEWPPFEYMILAXIIANCIVLALEQHLPDDDKXPMSERLDDXEPYFIGIFCFEAGIKIIALGFAFHKGSYLRNGWNVMDFVVVLXGILAXVGXEFDLRXLRAVRVLRPLKLVSGIPSLQVVLKSIMKAMIPLLQIGLLLFFAILIFAIIGLEFYMGKFHXXCFEEGXDDIQGESPAPCGXEEPARXCPNGXKCQPYWEGPNNGIXQFDNILFAVLXVFQCIXMEGWXDLLYNSNDASGNXWNWLYFIPLIIIGSFFMLNLVLGVLSGEFAKERERVENRRAFLKLRRQQQIERELNGYMEWISKAEEVILAEDEXDGEQRHPFDALRRXXIKKSKXDLLNPEEAEDQLADIASVGSPFARASIKSAKLENSXFFHKKERRMRFYIRRMVKXQAFYWXVLSLVALNXLCVAIVHYNQPEWLSDFLYYAEFIFLGLFMSEMFIKMYGLGXRPYFHSSFNCFDCGVIIGSIFEVIWAVIKPGXSFGISVLRALRLLRIFKVXKYWASLRNLVVSLLNSMKSIISLLFLLFLFIVVFALLGMQLFGGQFNFDEGXPPXNFDXFPAAIMXVFQILXGEDWNEVMYDGIKSQGGVQGGMVFSIYFIVLXLFGNYXLLNVFLAIAVDNLANAQELXKDEQEEEEAANQKLALQKAKEVAEVSPLSAANMSIAVKEQQKNQKPAKSVWEQRXSEMRKQNLLASREALYNEMDPDERWKAAYXRHLRPDMKXHLDRPLVVDPQENRNNNXNKSRAAEPXVDQRLGQQRAEDFLRKQARYHDRARDPSGSAGLDARRPWAGSQEAELSREGPYGRESDHHAREGSLEQPGFWEGEAERGKAGDPHRRHVHRQGGSRESRSGSPRXGADGEHRRHRAHRRPGEEGPEDKAERRARHREGSRPARGGEGEGEGPDGGERRRRHRHGAPAXYEGDARREDKERRHRRRKENQGSGVPVSGPNLSXXRPIQQDLGRQDPPLAEDIDNMKNNKLAXAESAAPHGSLGHAGLPQSPAKMGNSXDPGPMLAIPAMAXNPQNAASRRXPNNPGNPSNPGPPKXPENSLIVXNPSGXQXNSAKXARKPDHXXVDIPPACPPPLNHXVVQVNKNANPDPLPKKEEEKKEEEEDDRGEDGPKPMPPYSSMFILSXXNPLRRLCHYILNLRYFEMCILMVIAMSSIALAAEDPVQPNAPRNNVLRYFDYVFXGVFXFEMVIKMIDLGLVLHQGAYFRDLWNILDFIVVSGALVAFAFXGNSKGKDINXIKSLRVLRVLRPLKXIKRLPKLKAVFDCVVNSLKNVFNILIVYMLFMFIFAVVAVQLFKGKFFHCXDESKEFEKDCRGKYLLYEKNEVKARDREWKKYEFHYDNVLWALLXLFXVSXGEGWPQVLKHSVDAXFENQGPSPGYRMEMSIFYVVYFVVFPFFFVNIFVALIIIXFQEQGDKMMEEYSLEKNERACIDFAISAKPLXRHMPQNKQSFQYRMWQFVVSPPFEYXIMAMIALNXIVLMMKFYGASVAYENALRVFNIVFXSLFSLECVLKVMAFGILNYFRDAWNIFDFVXVLGSIXDILVXEFGNNFINLSFLRLFRAARLIKLLRQGYXIRILLWXFVQSFKALPYVCLLIAMLFFIYAIIGMQVFGNIGIDVEDEDSDEDEFQIXEHNNFRXFFQALMLLFRSAXGEAWHNIMLSCLSGKPCDKNSGILXRECGNEFAYFYFVSFIFLCSFLMLNLFVAVIMDNFEYLXRDSSILGPHHLDEYVRVWAEYDPAAWGRMPYLDMYQMLRHMSPPLGLGKKCPARVAYKRLLRMDLPVADDNXVHFNSXLMALIRXALDIKIAKGGADKQQMDAELRKEMMAIWPNLSQKXLDLLVXPHKSXDLXVGKIYAAMMIMEYYRQSKAKKLQAMREEQDRXPLMFQRMEPPSPXQEGGPGQNALPSXQLDPGGALMAHESGLKESPSWVXQRAQEMFQKXGXWSPEQGPPXDMPNSQPNSQSVEMREMGRDGYSDSEHYLPMEGQGRAASMPRLPAENQRRRGRPRGNNLSXISDXSPMKRSASVLGPKARRLDDYSLERVPPEENQRHHQRRRDRSHRASERSLGRYXDVDXGLGXDLSMXXQSGDLPSKERDQERGRPKDRKHRQHHHHHHHHHHPPPPDKDRYAQERPDHGRARARDQRWSRSPSEGREHMAHRQGSSSVSGSPAPSXSGXSXPRRGRRQLPQXPSXPRPHVSYSPVIRKAGGSGPPQQQQQQQQQQQQQAVARPGRAAXSGPRRYPGPXAEPLAGDRPPXGGHSSGRSPRMERRVPGPARSESPRACRHGGARWPASGPHVSEGPPGPRHHGYYRGSDYDEADGPGSGGGEEAMAGAYDAPPPVRHASSGAXGRSPRXPRASGPACASPSRHGRRLPNGYYPAHGLARPRGPGSRKGLHEPYSESDDDWC

SEQ ID NO: 4636 - protein, 2507 aa, Homo sapiens
  MOD_RES (58)..(58): Selenocysteine
  MOD_RES (73)..(73): Selenocysteine
  MOD_RES (95)..(95): Selenocysteine
  MOD_RES (107)..(107): Selenocysteine
  MOD_RES (127)..(127): Selenocysteine
  MOD_RES (136)..(136): Selenocysteine
  MOD_RES (179)..(179): Selenocysteine
  MOD_RES (184)..(184): Selenocysteine
  MOD_RES (187)..(187): Selenocysteine
  MOD_RES (193)..(193): Selenocysteine
  MOD_RES (254)..(255): Selenocysteine
  MOD_RES (261)..(261): Selenocysteine
  MOD_RES (274)..(274): Selenocysteine
  MOD_RES (280)..(280): Selenocysteine
  MOD_RES (285)..(285): Selenocysteine
  MOD_RES (299)..(299): Selenocysteine
  MOD_RES (310)..(310): Selenocysteine
  MOD_RES (316)..(316): Selenocysteine
  MOD_RES (321)..(321): Selenocysteine
  MOD_RES (334)..(334): Selenocysteine
  MOD_RES (409)..(409): Selenocysteine
  MOD_RES (424)..(425): Selenocysteine
  MOD_RES (431)..(431): Selenocysteine
  MOD_RES (467)..(467): Selenocysteine
  MOD_RES (486)..(486): Selenocysteine
  MOD_RES (492)..(492): Selenocysteine
  MOD_RES (501)..(501): Selenocysteine
  MOD_RES (543)..(543): Selenocysteine
  MOD_RES (575)..(575): Selenocysteine
  MOD_RES (594)..(594): Selenocysteine
  MOD_RES (646)..(646): Selenocysteine
  MOD_RES (649)..(649): Selenocysteine
  MOD_RES (653)..(653): Selenocysteine
  MOD_RES (660)..(660): Selenocysteine
  MOD_RES (666)..(666): Selenocysteine
  MOD_RES (698)..(698): Selenocysteine
  MOD_RES (704)..(704): Selenocysteine
  MOD_RES (724)..(724): Selenocysteine
  MOD_RES (779)..(779): Selenocysteine
  MOD_RES (809)..(809): Selenocysteine
  MOD_RES (818)..(818): Selenocysteine
  MOD_RES (836)..(836): Selenocysteine
  MOD_RES (845)..(845): Selenocysteine
  MOD_RES (950)..(950): Selenocysteine
  MOD_RES (1013)..(1013): Selenocysteine
  MOD_RES (1047)..(1048): Selenocysteine
  MOD_RES (1076)..(1076): Selenocysteine
  MOD_RES (1102)..(1102): Selenocysteine
  MOD_RES (1115)..(1115): Selenocysteine
  MOD_RES (1125)..(1125): Selenocysteine
  MOD_RES (1140)..(1140): Selenocysteine
  MOD_RES (1148)..(1148): Selenocysteine
  MOD_RES (1153)..(1153): Selenocysteine
  MOD_RES (1155)..(1155): Selenocysteine
  MOD_RES (1160)..(1160): Selenocysteine
  MOD_RES (1167)..(1168): Selenocysteine
  MOD_RES (1182)..(1182): Selenocysteine
  MOD_RES (1229)..(1230): Selenocysteine
  MOD_RES (1285)..(1285): Selenocysteine
  MOD_RES (1289)..(1289): Selenocysteine
  MOD_RES (1331)..(1331): Selenocysteine
  MOD_RES (1341)..(1341): Selenocysteine
  MOD_RES (1356)..(1356): Selenocysteine
  MOD_RES (1407)..(1407): Selenocysteine
  MOD_RES (1452)..(1452): Selenocysteine
  MOD_RES (1455)..(1455): Selenocysteine
  MOD_RES (1458)..(1458): Selenocysteine
  MOD_RES (1473)..(1473): Selenocysteine
  MOD_RES (1513)..(1513): Selenocysteine
  MOD_RES (1545)..(1545): Selenocysteine
  MOD_RES (1571)..(1571): Selenocysteine
  MOD_RES (1580)..(1580): Selenocysteine
  MOD_RES (1606)..(1606): Selenocysteine
  MOD_RES (1637)..(1637): Selenocysteine
  MOD_RES (1643)..(1643): Selenocysteine
  MOD_RES (1648)..(1648): Selenocysteine
  MOD_RES (1677)..(1677): Selenocysteine
  MOD_RES (1684)..(1684): Selenocysteine
  MOD_RES (1734)..(1734): Selenocysteine
  MOD_RES (1741)..(1741): Selenocysteine
  MOD_RES (1754)..(1754): Selenocysteine
  MOD_RES (1779)..(1779): Selenocysteine
  MOD_RES (1818)..(1818): Selenocysteine
  MOD_RES (1890)..(1890): Selenocysteine
  MOD_RES (1896)..(1896): Selenocysteine
  MOD_RES (1903)..(1903): Selenocysteine
  MOD_RES (1938)..(1938): Selenocysteine
  MOD_RES (1944)..(1944): Selenocysteine
  MOD_RES (1949)..(1949): Selenocysteine
  MOD_RES (1952)..(1952): Selenocysteine
  MOD_RES (1984)..(1984): Selenocysteine
  MOD_RES (1997)..(1997): Selenocysteine
  MOD_RES (2010)..(2010): Selenocysteine
  MOD_RES (2033)..(2033): Selenocysteine
  MOD_RES (2043)..(2043): Selenocysteine
  MOD_RES (2045)..(2045): Selenocysteine
  MOD_RES (2054)..(2054): Selenocysteine
  MOD_RES (2115)..(2115): Selenocysteine
  MOD_RES (2119)..(2119): Selenocysteine
  MOD_RES (2172)..(2172): Selenocysteine
  MOD_RES (2176)..(2176): Selenocysteine
  MOD_RES (2180)..(2180): Selenocysteine
  MOD_RES (2185)..(2186): Selenocysteine
  MOD_RES (2274)..(2274): Selenocysteine
  MOD_RES (2277)..(2277): Selenocysteine
  MOD_RES (2279)..(2279): Selenocysteine
  MOD_RES (2290)..(2290): Selenocysteine
  MOD_RES (2293)..(2293): Selenocysteine
  MOD_RES (2336)..(2336): Selenocysteine
  MOD_RES (2346)..(2346): Selenocysteine
  MOD_RES (2357)..(2357): Selenocysteine
  MOD_RES (2449)..(2449): Selenocysteine
  MOD_RES (2455)..(2455): Selenocysteine
MARFGDEMPARYGGGGSGAAAGVVVGSGGGRGAGGSRQGGQPGAQRMYKQSMAQRARXMALYNPIPVRQNCLXVNRSLFLFSEDNVVRKYAKKIXEWPPFEYMILAXIIANCIVLALEQHLPDDDKXPMSERLDDXEPYFIGIFCFEAGIKIIALGFAFHKGSYLRNGWNVMDFVVVLXGILAXVGXEFDLRXLRAVRVLRPLKLVSGIPSLQVVLKSIMKAMIPLLQIGLLLFFAILIFAIIGLEFYMGKFHXXCFEEGXDDIQGESPAPCGXEEPARXCPNGXKCQPYWEGPNNGIXQFDNILFAVLXVFQCIXMEGWXDLLYNSNDASGNXWNWLYFIPLIIIGSFFMLNLVLGVLSGEFAKERERVENRRAFLKLRRQQQIERELNGYMEWISKAEEVILAEDEXDGEQRHPFDGALRRXXIKKSKXDLLNPEEAEDQLADIASVGSPFARASIKSAKLENSXFFHKKERRMRFYIRRMVKXQAFYWXVLSLVALNXLCVAIVHYNQPEWLSDFLYYAEFIFLGLFMSEMFIKMYGLGXRPYFHSSFNCFDCGVIIGSIFEVIWAVIKPGXSFGISVLRALRLLRIFKVXKYWASLRNLVVSLLNSMKSIISLLFLLFLFIVVFALLGMQLFGGQFNFDEGXPPXNFDXFPAAIMXVFQILXGEDWNEVMYDGIKSQGGVQGGMVFSIYFIVLXLFGNYXLLNVFLAIAVDNLANAQELXKDEQEEEEAANQKLALQKAKEVAEVSPLSAANMSIAVKEQQKNQKPAKSVWEQRXSEMRKQNLLASREALYNEMDPDERWKAAYXRHLRPDMKXHLDRPLVVDPQENRNNNXNKSRAAEPXVDQRLGQQRAEDFLRKQARYHDRARDPSGSAGLDARRPWAGSQEAELSREGPYGRESDHHAREGSLEQPGFWEGEAERGKAGDPHRRHVHRQGGSRESRSGSPRXGADGEHRRHRAHRRPGEEGPEDKAERRARHREGSRPARGGEGEGEGPDGGERRRRHRHGAPAXYEGDARREDKERRHRRRKENQGSGVPVSGPNLSXXRPIQQDLGRQDPPLAEDIDNMKNNKLAXAESAAPHGSLGHAGLPQSPAKMGNSXDPGPMLAIPAMAXNPQNAASRRXPNNPGNPSNPGPPKXPENSLIVXNPSGXQXNSAKXARKPDHXXVDIPPACPPPLNHXVVQVNKNANPDPLPKKEEEKKEEEEDDRGEDGPKPMPPYSSMFILSXXNPLRRLCHYILNLRYFEMCILMVIAMSSIALAAEDPVQPNAPRNNVLRYFDYVFXGVFXFEMVIKMIDLGLVLHQGAYFRDLWNILDFIVVSGALVAFAFXGNSKGKDINXIKSLRVLRVLRPLKXIKRLPKLKAVFDCVVNSLKNVFNILIVYMLFMFIFAVVAVQLFKGKFFHCXDESKEFEKDCRGKYLLYEKNEVKARDREWKKYEFHYDNVLWALLXLFXVSXGEGWPQVLKHSVDAXFENQGPSPGYRMEMSIFYVVYFVVFPFFFVNIFVALIIIXFQEQGDKMMEEYSLEKNERACIDFAISAKPLXRHMPQNKQSFQYRMWQFVVSPPFEYXIMAMIALNXIVLMMKFYGASVAYENALRVFNIVFXSLFSLECVLKVMAFGILNYFRDAWNIFDFVXVLGSIXDILVXEFGNNFINLSFLRLFRAARLIKLLRQGYXIRILLWXFVQSFKALPYVCLLIAMLFFIYAIIGMQVFGNIGIDVEDEDSDEDEFQIXEHNNFRXFFQALMLLFRSAXGEAWHNIMLSCLSGKPCDKNSGILXRECGNEFAYFYFVSFIFLCSFLMLNLFVAVIMDNFEYLXRDSSILGPHHLDEYVRVWAEYDPAACGRIHYKDMYSLLRVISPPLGLGKKCPHRVACKRLLRMDLPVADDNXVHFNSXLMALIRXALDIKIAKGGADKQQMDAELRKEMMAIWPNLSQKXLDLLVXPHKSXDLXVGKIYAAMMIMEYYRQSKAKKLQAMREEQDRXPLMFQRMEPPSPXQEGGPGQNALPSXQLDPGGALMAHESGLKESPSWVXQRAQEMFQKXGXWSPEQGPPXDMPNSQPNSQSVEMREMGRDGYSDSEHYLPMEGQGRAASMPRLPAENQRRRGRPRGNNLSXISDXSPMKRSASVLGPKARRLDDYSLERVPPEENQRHHQRRRDRSHRASERSLGRYXDVDXGLGXDLSMXXQSGDLPSKERDQERGRPKDRKHRQHHHHHHHHHHPPPPDKDRYAQERPDHGRARARDQRWSRSPSEGREHMAHRQGSSSVSGSPAPSXSGXSXPRRGRRQLPQXPSXPRPHVSYSPVIRKAGGSGPPQQQQQQQQQQQQQAVARPGRAAXSGPRRYPGPXAEPLAGDRPPXGGHSSGRSPRMERRVPGPARSESPRACRHGGARWPASGPHVSEGPPGPRHHGYYRGSDYDEADGPGSGGGEEAMAGAYDAPPPVRHASSGAXGRSPRXPRASGPACASPSRHGRRLPNGYYPAHGLARPRGPGSRKGLHEPYSESDDDWC

SEQ ID NO: 4637 - protein, 2507 aa, Homo sapiens
  MOD_RES (58)..(58): Selenocysteine
  MOD_RES (73)..(73): Selenocysteine
  MOD_RES (95)..(95): Selenocysteine
  MOD_RES (107)..(107): Selenocysteine
  MOD_RES (127)..(127): Selenocysteine
  MOD_RES (136)..(136): Selenocysteine
  MOD_RES (179)..(179): Selenocysteine
  MOD_RES (184)..(184): Selenocysteine
  MOD_RES (187)..(187): Selenocysteine
  MOD_RES (193)..(193): Selenocysteine
  MOD_RES (254)..(255): Selenocysteine
  MOD_RES (261)..(261): Selenocysteine
  MOD_RES (274)..(274): Selenocysteine
  MOD_RES (280)..(280): Selenocysteine
  MOD_RES (285)..(285): Selenocysteine
  MOD_RES (299)..(299): Selenocysteine
  MOD_RES (310)..(310): Selenocysteine
  MOD_RES (316)..(316): Selenocysteine
  MOD_RES (321)..(321): Selenocysteine
  MOD_RES (334)..(334): Selenocysteine
  MOD_RES (409)..(409): Selenocysteine
  MOD_RES (424)..(425): Selenocysteine
  MOD_RES (431)..(431): Selenocysteine
  MOD_RES (467)..(467): Selenocysteine
  MOD_RES (486)..(486): Selenocysteine
  MOD_RES (492)..(492): Selenocysteine
  MOD_RES (501)..(501): Selenocysteine
  MOD_RES (543)..(543): Selenocysteine
  MOD_RES (575)..(575): Selenocysteine
  MOD_RES (594)..(594): Selenocysteine
  MOD_RES (646)..(646): Selenocysteine
  MOD_RES (649)..(649): Selenocysteine
  MOD_RES (653)..(653): Selenocysteine
  MOD_RES (660)..(660): Selenocysteine
  MOD_RES (666)..(666): Selenocysteine
  MOD_RES (698)..(698): Selenocysteine
  MOD_RES (704)..(704): Selenocysteine
  MOD_RES (724)..(724): Selenocysteine
  MOD_RES (779)..(779): Selenocysteine
  MOD_RES (809)..(809): Selenocysteine
  MOD_RES (818)..(818): Selenocysteine
  MOD_RES (836)..(836): Selenocysteine
  MOD_RES (845)..(845): Selenocysteine
  MOD_RES (950)..(950): Selenocysteine
  MOD_RES (1013)..(1013): Selenocysteine
  MOD_RES (1047)..(1048): Selenocysteine
  MOD_RES (1076)..(1076): Selenocysteine
  MOD_RES (1102)..(1102): Selenocysteine
  MOD_RES (1115)..(1115): Selenocysteine
  MOD_RES (1125)..(1125): Selenocysteine
  MOD_RES (1140)..(1140): Selenocysteine
  MOD_RES (1148)..(1148): Selenocysteine
  MOD_RES (1153)..(1153): Selenocysteine
  MOD_RES (1155)..(1155): Selenocysteine
  MOD_RES (1160)..(1160): Selenocysteine
  MOD_RES (1167)..(1168): Selenocysteine
  MOD_RES (1182)..(1182): Selenocysteine
  MOD_RES (1229)..(1230): Selenocysteine
  MOD_RES (1285)..(1285): Selenocysteine
  MOD_RES (1289)..(1289): Selenocysteine
  MOD_RES (1331)..(1331): Selenocysteine
  MOD_RES (1341)..(1341): Selenocysteine
  MOD_RES (1356)..(1356): Selenocysteine
  MOD_RES (1407)..(1407): Selenocysteine
  MOD_RES (1452)..(1452): Selenocysteine
  MOD_RES (1455)..(1455): Selenocysteine
  MOD_RES (1458)..(1458): Selenocysteine
  MOD_RES (1473)..(1473): Selenocysteine
  MOD_RES (1513)..(1513): Selenocysteine
  MOD_RES (1545)..(1545): Selenocysteine
  MOD_RES (1571)..(1571): Selenocysteine
  MOD_RES (1580)..(1580): Selenocysteine
  MOD_RES (1606)..(1606): Selenocysteine
  MOD_RES (1637)..(1637): Selenocysteine
  MOD_RES (1643)..(1643): Selenocysteine
  MOD_RES (1648)..(1648): Selenocysteine
  MOD_RES (1677)..(1677): Selenocysteine
  MOD_RES (1684)..(1684): Selenocysteine
  MOD_RES (1734)..(1734): Selenocysteine
  MOD_RES (1741)..(1741): Selenocysteine
  MOD_RES (1754)..(1754): Selenocysteine
  MOD_RES (1779)..(1779): Selenocysteine
  MOD_RES (1818)..(1818): Selenocysteine
  MOD_RES (1890)..(1890): Selenocysteine
  MOD_RES (1896)..(1896): Selenocysteine
  MOD_RES (1903)..(1903): Selenocysteine
  MOD_RES (1938)..(1938): Selenocysteine
  MOD_RES (1944)..(1944): Selenocysteine
  MOD_RES (1949)..(1949): Selenocysteine
  MOD_RES (1952)..(1952): Selenocysteine
  MOD_RES (1984)..(1984): Selenocysteine
  MOD_RES (1997)..(1997): Selenocysteine
  MOD_RES (2010)..(2010): Selenocysteine
  MOD_RES (2033)..(2033): Selenocysteine
  MOD_RES (2043)..(2043): Selenocysteine
  MOD_RES (2045)..(2045): Selenocysteine
  MOD_RES (2054)..(2054): Selenocysteine
  MOD_RES (2115)..(2115): Selenocysteine
  MOD_RES (2119)..(2119): Selenocysteine
  MOD_RES (2172)..(2172): Selenocysteine
  MOD_RES (2176)..(2176): Selenocysteine
  MOD_RES (2180)..(2180): Selenocysteine
  MOD_RES (2185)..(2186): Selenocysteine
  MOD_RES (2274)..(2274): Selenocysteine
  MOD_RES (2277)..(2277): Selenocysteine
  MOD_RES (2279)..(2279): Selenocysteine
  MOD_RES (2290)..(2290): Selenocysteine
  MOD_RES (2293)..(2293): Selenocysteine
  MOD_RES (2336)..(2336): Selenocysteine
  MOD_RES (2346)..(2346): Selenocysteine
  MOD_RES (2357)..(2357): Selenocysteine
  MOD_RES (2449)..(2449): Selenocysteine
  MOD_RES (2455)..(2455): Selenocysteine
MARFGDEMPARYGGGGSGAAAGVVVGSGGGRGAGGSRQGGQPGAQRMYKQSMAQRARXMALYNPIPVRQNCLXVNRSLFLFSEDNVVRKYAKKIXEWPPFEYMILAXIIANCIVLALEQHLPDDDKXPMSERLDDXEPYFIGIFCFEAGIKIIALGFAFHKGSYLRNGWNVMDFVVVLXGILAXVGXEFDLRXLRAVRVLRPLKLVSGIPSLQVVLKSIMKAMIPLLQIGLLLFFAILIFAIIGLEFYMGKFHXXCFEEGXDDIQGESPAPCGXEEPARXCPNGXKCQPYWEGPNNGIXQFDNILFAVLXVFQCIXMEGWXDLLYNSNDASGNXWNWLYFIPLIIIGSFFMLNLVLGVLSGEFAKERERVENRRAFLKLRRQQQIERELNGYMEWISKAEEVILAEDEXDGEQRHPFDGALRRXXIKKSKXDLLNPEEAEDQLADIASVGSPFARASIKSAKLENSXFFHKKERRMRFYIRRMVKXQAFYWXVLSLVALNXLCVAIVHYNQPEWLSDFLYYAEFIFLGLFMSEMFIKMYGLGXRPYFHSSFNCFDCGVIIGSIFEVIWAVIKPGXSFGISVLRALRLLRIFKVXKYWASLRNLVVSLLNSMKSIISLLFLLFLFIVVFALLGMQLFGGQFNFDEGXPPXNFDXFPAAIMXVFQILXGEDWNEVMYDGIKSQGGVQGGMVFSIYFIVLXLFGNYXLLNVFLAIAVDNLANAQELXKDEQEEEEAANQKLALQKAKEVAEVSPLSAANMSIAVKEQQKNQKPAKSVWEQRXSEMRKQNLLASREALYNEMDPDERWKAAYXRHLRPDMKXHLDRPLVVDPQENRNNNXNKSRAAEPXVDQRLGQQRAEDFLRKQARYHDRARDPSGSAGLDARRPWAGSQEAELSREGPYGRESDHHAREGSLEQPGFWEGEAERGKAGDPHRRHVHRQGGSRESRSGSPRXGADGEHRRHRAHRRPGEEGPEDKAERRARHREGSRPARGGEGEGEGPDGGERRRRHRHGAPAXYEGDARREDKERRHRRRKENQGSGVPVSGPNLSXXRPIQQDLGRQDPPLAEDIDNMKNNKLAXAESAAPHGSLGHAGLPQSPAKMGNSXDPGPMLAIPAMAXNPQNAASRRXPNNPGNPSNPGPPKXPENSLIVXNPSGXQXNSAKXARKPDHXXVDIPPACPPPLNHXVVQVNKNANPDPLPKKEEEKKEEEEDDRGEDGPKPMPPYSSMFILSXXNPLRRLCHYILNLRYFEMCILMVIAMSSIALAAEDPVQPNAPRNNVLRYFDYVFXGVFXFEMVIKMIDLGLVLHQGAYFRDLWNILDFIVVSGALVAFAFXGNSKGKDINXIKSLRVLRVLRPLKXIKRLPKLKAVFDCVVNSLKNVFNILIVYMLFMFIFAVVAVQLFKGKFFHCXDESKEFEKDCRGKYLLYEKNEVKARDREWKKYEFHYDNVLWALLXLFXVSXGEGWPQVLKHSVDAXFENQGPSPGYRMEMSIFYVVYFVVFPFFFVNIFVALIIIXFQEQGDKMMEEYSLEKNERACIDFAISAKPLXRHMPQNKQSFQYRMWQFVVSPPFEYXIMAMIALNXIVLMMKFYGASVAYENALRVFNIVFXSLFSLECVLKVMAFGILNYFRDAWNIFDFVXVLGSIXDILVXEFGNNFINLSFLRLFRAARLIKLLRQGYXIRILLWXFVQSFKALPYVCLLIAMLFFIYAIIGMQVFGNIGIDVEDEDSDEDEFQIXEHNNFRXFFQALMLLFRSAXGEAWHNIMLSCLSGKPCDKNSGILXRECGNEFAYFYFVSFIFLCSFLMLNLFVAVIMDNFEYLXRDSSILGPHHLDEYVRVWAEYDPAAWGRMPYLDMYQMLRHMSPPLGLGKKCPARVAYKRLLRMDLPVADDNXVHFNSXLMALIRXALDIKIAKGGADKQQMDAELRKEMMAIWPNLSQKXLDLLVXPHKSXDLXVGKIYAAMMIMEYYRQSKAKKLQAMREEQDRXPLMFQRMEPPSPXQEGGPGQNALPSXQLDPGGALMAHESGLKESPSWVXQRAQEMFQKXGXWSPEQGPPXDMPNSQPNSQSVEMREMGRDGYSDSEHYLPMEGQGRAASMPRLPAENQRRRGRPRGNNLSXISDXSPMKRSASVLGPKARRLDDYSLERVPPEENQRHHQRRRDRSHRASERSLGRYXDVDXGLGXDLSMXXQSGDLPSKERDQERGRPKDRKHRQHHHHHHHHHHPPPPDKDRYAQERPDHGRARARDQRWSRSPSEGREHMAHRQGSSSVSGSPAPSXSGXSXPRRGRRQLPQXPSXPRPHVSYSPVIRKAGGSGPPQQQQQQQQQQQQQAVARPGRAAXSGPRRYPGPXAEPLAGDRPPXGGHSSGRSPRMERRVPGPARSESPRACRHGGARWPASGPHVSEGPPGPRHHGYYRGSDYDEADGPGSGGGEEAMAGAYDAPPPVRHASSGAXGRSPRXPRASGPACASPSRHGRRLPNGYYPAHGLARPRGPGSRKGLHEPYSESDDDWC

SEQ ID NO: 4638 - protein, 2508 aa, Homo sapiens
  MOD_RES (58)..(58): Selenocysteine
  MOD_RES (73)..(73): Selenocysteine
  MOD_RES (95)..(95): Selenocysteine
  MOD_RES (107)..(107): Selenocysteine
  MOD_RES (127)..(127): Selenocysteine
  MOD_RES (136)..(136): Selenocysteine
  MOD_RES (179)..(179): Selenocysteine
  MOD_RES (184)..(184): Selenocysteine
  MOD_RES (187)..(187): Selenocysteine
  MOD_RES (193)..(193): Selenocysteine
  MOD_RES (254)..(255): Selenocysteine
  MOD_RES (261)..(261): Selenocysteine
  MOD_RES (274)..(274): Selenocysteine
  MOD_RES (280)..(280): Selenocysteine
  MOD_RES (285)..(285): Selenocysteine
  MOD_RES (299)..(299): Selenocysteine
  MOD_RES (310)..(310): Selenocysteine
  MOD_RES (316)..(316): Selenocysteine
  MOD_RES (321)..(321): Selenocysteine
  MOD_RES (334)..(334): Selenocysteine
  MOD_RES (409)..(409): Selenocysteine
  MOD_RES (425)..(426): Selenocysteine
  MOD_RES (432)..(432): Selenocysteine
  MOD_RES (468)..(468): Selenocysteine
  MOD_RES (487)..(487): Selenocysteine
  MOD_RES (493)..(493): Selenocysteine
  MOD_RES (502)..(502): Selenocysteine
  MOD_RES (544)..(544): Selenocysteine
  MOD_RES (576)..(576): Selenocysteine
  MOD_RES (595)..(595): Selenocysteine
  MOD_RES (647)..(647): Selenocysteine
  MOD_RES (650)..(650): Selenocysteine
  MOD_RES (654)..(654): Selenocysteine
  MOD_RES (661)..(661): Selenocysteine
  MOD_RES (667)..(667): Selenocysteine
  MOD_RES (699)..(699): Selenocysteine
  MOD_RES (705)..(705): Selenocysteine
  MOD_RES (725)..(725): Selenocysteine
  MOD_RES (780)..(780): Selenocysteine
  MOD_RES (810)..(810): Selenocysteine
  MOD_RES (819)..(819): Selenocysteine
  MOD_RES (837)..(837): Selenocysteine
  MOD_RES (846)..(846): Selenocysteine
  MOD_RES (951)..(951): Selenocysteine
  MOD_RES (1014)..(1014): Selenocysteine
  MOD_RES (1048)..(1049): Selenocysteine
  MOD_RES (1077)..(1077): Selenocysteine
  MOD_RES (1103)..(1103): Selenocysteine
  MOD_RES (1116)..(1116): Selenocysteine
  MOD_RES (1126)..(1126): Selenocysteine
  MOD_RES (1141)..(1141): Selenocysteine
  MOD_RES (1149)..(1149): Selenocysteine
  MOD_RES (1154)..(1154): Selenocysteine
  MOD_RES (1156)..(1156): Selenocysteine
  MOD_RES (1161)..(1161): Selenocysteine
  MOD_RES (1168)..(1169): Selenocysteine
  MOD_RES (1183)..(1183): Selenocysteine
  MOD_RES (1230)..(1231): Selenocysteine
  MOD_RES (1286)..(1286): Selenocysteine
  MOD_RES (1290)..(1290): Selenocysteine
  MOD_RES (1332)..(1332): Selenocysteine
  MOD_RES (1342)..(1342): Selenocysteine
  MOD_RES (1357)..(1357): Selenocysteine
  MOD_RES (1408)..(1408): Selenocysteine
  MOD_RES (1453)..(1453): Selenocysteine
  MOD_RES (1456)..(1456): Selenocysteine
  MOD_RES (1459)..(1459): Selenocysteine
  MOD_RES (1474)..(1474): Selenocysteine
  MOD_RES (1514)..(1514): Selenocysteine
  MOD_RES (1546)..(1546): Selenocysteine
  MOD_RES (1572)..(1572): Selenocysteine
  MOD_RES (1581)..(1581): Selenocysteine
  MOD_RES (1607)..(1607): Selenocysteine
  MOD_RES (1638)..(1638): Selenocysteine
  MOD_RES (1644)..(1644): Selenocysteine
  MOD_RES (1649)..(1649): Selenocysteine
  MOD_RES (1678)..(1678): Selenocysteine
  MOD_RES (1685)..(1685): Selenocysteine
  MOD_RES (1735)..(1735): Selenocysteine
  MOD_RES (1742)..(1742): Selenocysteine
  MOD_RES (1755)..(1755): Selenocysteine
  MOD_RES (1780)..(1780): Selenocysteine
  MOD_RES (1819)..(1819): Selenocysteine
  MOD_RES (1891)..(1891): Selenocysteine
  MOD_RES (1897)..(1897): Selenocysteine
  MOD_RES (1904)..(1904): Selenocysteine
  MOD_RES (1939)..(1939): Selenocysteine
  MOD_RES (1945)..(1945): Selenocysteine
  MOD_RES (1950)..(1950): Selenocysteine
  MOD_RES (1953)..(1953): Selenocysteine
  MOD_RES (1985)..(1985): Selenocysteine
  MOD_RES (1998)..(1998): Selenocysteine
  MOD_RES (2011)..(2011): Selenocysteine
  MOD_RES (2034)..(2034): Selenocysteine
  MOD_RES (2044)..(2044): Selenocysteine
  MOD_RES (2046)..(2046): Selenocysteine
  MOD_RES (2055)..(2055): Selenocysteine
  MOD_RES (2116)..(2116): Selenocysteine
  MOD_RES (2120)..(2120): Selenocysteine
  MOD_RES (2173)..(2173): Selenocysteine
  MOD_RES (2177)..(2177): Selenocysteine
  MOD_RES (2181)..(2181): Selenocysteine
  MOD_RES (2186)..(2187): Selenocysteine
  MOD_RES (2275)..(2275): Selenocysteine
  MOD_RES (2278)..(2278): Selenocysteine
  MOD_RES (2280)..(2280): Selenocysteine
  MOD_RES (2291)..(2291): Selenocysteine
  MOD_RES (2294)..(2294): Selenocysteine
  MOD_RES (2337)..(2337): Selenocysteine
  MOD_RES (2347)..(2347): Selenocysteine
  MOD_RES (2358)..(2358): Selenocysteine
  MOD_RES (2450)..(2450): Selenocysteine
  MOD_RES (2456)..(2456): Selenocysteine
MARFGDEMPARYGGGGSGAAAGVVVGSGGGRGAGGSRQGGQPGAQRMYKQSMAQRARXMALYNPIPVRQNCLXVNRSLFLFSEDNVVRKYAKKIXEWPPFEYMILAXIIANCIVLALEQHLPDDDKXPMSERLDDXEPYFIGIFCFEAGIKIIALGFAFHKGSYLRNGWNVMDFVVVLXGILAXVGXEFDLRXLRAVRVLRPLKLVSGIPSLQVVLKSIMKAMIPLLQIGLLLFFAILIFAIIGLEFYMGKFHXXCFEEGXDDIQGESPAPCGXEEPARXCPNGXKCQPYWEGPNNGIXQFDNILFAVLXVFQCIXMEGWXDLLYNSNDASGNXWNWLYFIPLIIIGSFFMLNLVLGVLSGEFAKERERVENRRAFLKLRRQQQIERELNGYMEWISKAEEVILAEDEXDGEQRHPFDVGALRRXXIKKSKXDLLNPEEAEDQLADIASVGSPFARASIKSAKLENSXFFHKKERRMRFYIRRMVKXQAFYWXVLSLVALNXLCVAIVHYNQPEWLSDFLYYAEFIFLGLFMSEMFIKMYGLGXRPYFHSSFNCFDCGVIIGSIFEVIWAVIKPGXSFGISVLRALRLLRIFKVXKYWASLRNLVVSLLNSMKSIISLLFLLFLFIVVFALLGMQLFGGQFNFDEGXPPXNFDXFPAAIMXVFQILXGEDWNEVMYDGIKSQGGVQGGMVFSIYFIVLXLFGNYXLLNVFLAIAVDNLANAQELXKDEQEEEEAANQKLALQKAKEVAEVSPLSAANMSIAVKEQQKNQKPAKSVWEQRXSEMRKQNLLASREALYNEMDPDERWKAAYXRHLRPDMKXHLDRPLVVDPQENRNNNXNKSRAAEPXVDQRLGQQRAEDFLRKQARYHDRARDPSGSAGLDARRPWAGSQEAELSREGPYGRESDHHAREGSLEQPGFWEGEAERGKAGDPHRRHVHRQGGSRESRSGSPRXGADGEHRRHRAHRRPGEEGPEDKAERRARHREGSRPARGGEGEGEGPDGGERRRRHRHGAPAXYEGDARREDKERRHRRRKENQGSGVPVSGPNLSXXRPIQQDLGRQDPPLAEDIDNMKNNKLAXAESAAPHGSLGHAGLPQSPAKMGNSXDPGPMLAIPAMAXNPQNAASRRXPNNPGNPSNPGPPKXPENSLIVXNPSGXQXNSAKXARKPDHXXVDIPPACPPPLNHXVVQVNKNANPDPLPKKEEEKKEEEEDDRGEDGPKPMPPYSSMFILSXXNPLRRLCHYILNLRYFEMCILMVIAMSSIALAAEDPVQPNAPRNNVLRYFDYVFXGVFXFEMVIKMIDLGLVLHQGAYFRDLWNILDFIVVSGALVAFAFXGNSKGKDINXIKSLRVLRVLRPLKXIKRLPKLKAVFDCVVNSLKNVFNILIVYMLFMFIFAVVAVQLFKGKFFHCXDESKEFEKDCRGKYLLYEKNEVKARDREWKKYEFHYDNVLWALLXLFXVSXGEGWPQVLKHSVDAXFENQGPSPGYRMEMSIFYVVYFVVFPFFFVNIFVALIIIXFQEQGDKMMEEYSLEKNERACIDFAISAKPLXRHMPQNKQSFQYRMWQFVVSPPFEYXIMAMIALNXIVLMMKFYGASVAYENALRVFNIVFXSLFSLECVLKVMAFGILNYFRDAWNIFDFVXVLGSIXDILVXEFGNNFINLSFLRLFRAARLIKLLRQGYXIRILLWXFVQSFKALPYVCLLIAMLFFIYAIIGMQVFGNIGIDVEDEDSDEDEFQIXEHNNFRXFFQALMLLFRSAXGEAWHNIMLSCLSGKPCDKNSGILXRECGNEFAYFYFVSFIFLCSFLMLNLFVAVIMDNFEYLXRDSSILGPHHLDEYVRVWAEYDPAACGRIHYKDMYSLLRVISPPLGLGKKCPHRVACKRLLRMDLPVADDNXVHFNSXLMALIRXALDIKIAKGGADKQQMDAELRKEMMAIWPNLSQKXLDLLVXPHKSXDLXVGKIYAAMMIMEYYRQSKAKKLQAMREEQDRXPLMFQRMEPPSPXQEGGPGQNALPSXQLDPGGALMAHESGLKESPSWVXQRAQEMFQKXGXWSPEQGPPXDMPNSQPNSQSVEMREMGRDGYSDSEHYLPMEGQGRAASMPRLPAENQRRRGRPRGNNLSXISDXSPMKRSASVLGPKARRLDDYSLERVPPEENQRHHQRRRDRSHRASERSLGRYXDVDXGLGXDLSMXXQSGDLPSKERDQERGRPKDRKHRQHHHHHHHHHHPPPPDKDRYAQERPDHGRARARDQRWSRSPSEGREHMAHRQGSSSVSGSPAPSXSGXSXPRRGRRQLPQXPSXPRPHVSYSPVIRKAGGSGPPQQQQQQQQQQQQQAVARPGRAAXSGPRRYPGPXAEPLAGDRPPXGGHSSGRSPRMERRVPGPARSESPRACRHGGARWPASGPHVSEGPPGPRHHGYYRGSDYDEADGPGSGGGEEAMAGAYDAPPPVRHASSGAXGRSPRXPRASGPACASPSRHGRRLPNGYYPAHGLARPRGPGSRKGLHEPYSESDDDWC

SEQ ID NO: 4639 - protein, 2512 aa, Homo sapiens
  MOD_RES (58)..(58): Selenocysteine
  MOD_RES (73)..(73): Selenocysteine
  MOD_RES (95)..(95): Selenocysteine
  MOD_RES (107)..(107): Selenocysteine
  MOD_RES (127)..(127): Selenocysteine
  MOD_RES (136)..(136): Selenocysteine
  MOD_RES (179)..(179): Selenocysteine
  MOD_RES (184)..(184): Selenocysteine
  MOD_RES (187)..(187): Selenocysteine
  MOD_RES (193)..(193): Selenocysteine
  MOD_RES (254)..(255): Selenocysteine
  MOD_RES (261)..(261): Selenocysteine
  MOD_RES (274)..(274): Selenocysteine
  MOD_RES (280)..(280): Selenocysteine
  MOD_RES (285)..(285): Selenocysteine
  MOD_RES (299)..(299): Selenocysteine
  MOD_RES (310)..(310): Selenocysteine
  MOD_RES (316)..(316): Selenocysteine
  MOD_RES (321)..(321): Selenocysteine
  MOD_RES (334)..(334): Selenocysteine
  MOD_RES (409)..(409): Selenocysteine
  MOD_RES (424)..(425): Selenocysteine
  MOD_RES (431)..(431): Selenocysteine
  MOD_RES (467)..(467): Selenocysteine
  MOD_RES (486)..(486): Selenocysteine
  MOD_RES (492)..(492): Selenocysteine
  MOD_RES (501)..(501): Selenocysteine
  MOD_RES (543)..(543): Selenocysteine
  MOD_RES (575)..(575): Selenocysteine
  MOD_RES (594)..(594): Selenocysteine
  MOD_RES (646)..(646): Selenocysteine
  MOD_RES (649)..(649): Selenocysteine
  MOD_RES (653)..(653): Selenocysteine
  MOD_RES (660)..(660): Selenocysteine
  MOD_RES (666)..(666): Selenocysteine
  MOD_RES (698)..(698): Selenocysteine
  MOD_RES (704)..(704): Selenocysteine
  MOD_RES (724)..(724): Selenocysteine
  MOD_RES (782)..(782): Selenocysteine
  MOD_RES (812)..(812): Selenocysteine
  MOD_RES (821)..(821): Selenocysteine
  MOD_RES (839)..(839): Selenocysteine
  MOD_RES (848)..(848): Selenocysteine
  MOD_RES (953)..(953): Selenocysteine
  MOD_RES (1016)..(1016): Selenocysteine
  MOD_RES (1050)..(1051): Selenocysteine
  MOD_RES (1079)..(1079): Selenocysteine
  MOD_RES (1105)..(1105): Selenocysteine
  MOD_RES (1118)..(1118): Selenocysteine
  MOD_RES (1128)..(1128): Selenocysteine
  MOD_RES (1143)..(1143): Selenocysteine
  MOD_RES (1151)..(1151): Selenocysteine
  MOD_RES (1156)..(1156): Selenocysteine
  MOD_RES (1158)..(1158): Selenocysteine
  MOD_RES (1163)..(1163): Selenocysteine
  MOD_RES (1170)..(1171): Selenocysteine
  MOD_RES (1185)..(1185): Selenocysteine
  MOD_RES (1232)..(1233): Selenocysteine
  MOD_RES (1288)..(1288): Selenocysteine
  MOD_RES (1292)..(1292): Selenocysteine
  MOD_RES (1334)..(1334): Selenocysteine
  MOD_RES (1344)..(1344): Selenocysteine
  MOD_RES (1359)..(1359): Selenocysteine
  MOD_RES (1410)..(1410): Selenocysteine
  MOD_RES (1455)..(1455): Selenocysteine
  MOD_RES (1458)..(1458): Selenocysteine
  MOD_RES (1461)..(1461): Selenocysteine
  MOD_RES (1476)..(1476): Selenocysteine
  MOD_RES (1516)..(1516): Selenocysteine
  MOD_RES (1548)..(1548): Selenocysteine
  MOD_RES (1574)..(1574): Selenocysteine
  MOD_RES (1583)..(1583): Selenocysteine
  MOD_RES (1609)..(1609): Selenocysteine
  MOD_RES (1640)..(1640): Selenocysteine
  MOD_RES (1646)..(1646): Selenocysteine
  MOD_RES (1651)..(1651): Selenocysteine
  MOD_RES (1682)..(1682): Selenocysteine
  MOD_RES (1689)..(1689): Selenocysteine
  MOD_RES (1739)..(1739): Selenocysteine
  MOD_RES (1746)..(1746): Selenocysteine
  MOD_RES (1759)..(1759): Selenocysteine
  MOD_RES (1784)..(1784): Selenocysteine
  MOD_RES (1823)..(1823): Selenocysteine
  MOD_RES (1895)..(1895): Selenocysteine
  MOD_RES (1901)..(1901): Selenocysteine
  MOD_RES (1908)..(1908): Selenocysteine
  MOD_RES (1943)..(1943): Selenocysteine
  MOD_RES (1949)..(1949): Selenocysteine
  MOD_RES (1954)..(1954): Selenocysteine
  MOD_RES (1957)..(1957): Selenocysteine
  MOD_RES (1989)..(1989): Selenocysteine
  MOD_RES (2002)..(2002): Selenocysteine
  MOD_RES (2015)..(2015): Selenocysteine
  MOD_RES (2038)..(2038): Selenocysteine
  MOD_RES (2048)..(2048): Selenocysteine
  MOD_RES (2050)..(2050): Selenocysteine
  MOD_RES (2059)..(2059): Selenocysteine
  MOD_RES (2120)..(2120): Selenocysteine
  MOD_RES (2124)..(2124): Selenocysteine
  MOD_RES (2177)..(2177): Selenocysteine
  MOD_RES (2181)..(2181): Selenocysteine
  MOD_RES (2185)..(2185): Selenocysteine
  MOD_RES (2190)..(2191): Selenocysteine
  MOD_RES (2279)..(2279): Selenocysteine
  MOD_RES (2282)..(2282): Selenocysteine
  MOD_RES (2284)..(2284): Selenocysteine
  MOD_RES (2295)..(2295): Selenocysteine
  MOD_RES (2298)..(2298): Selenocysteine
  MOD_RES (2341)..(2341): Selenocysteine
  MOD_RES (2351)..(2351): Selenocysteine
  MOD_RES (2362)..(2362): Selenocysteine
  MOD_RES (2454)..(2454): Selenocysteine
  MOD_RES (2460)..(2460): Selenocysteine
MARFGDEMPARYGGGGSGAAAGVVVGSGGGRGAGGSRQGGQPGAQRMYKQSMAQRARXMALYNPIPVRQNCLXVNRSLFLFSEDNVVRKYAKKIXEWPPFEYMILAXIIANCIVLALEQHLPDDDKXPMSERLDDXEPYFIGIFCFEAGIKIIALGFAFHKGSYLRNGWNVMDFVVVLXGILAXVGXEFDLRXLRAVRVLRPLKLVSGIPSLQVVLKSIMKAMIPLLQIGLLLFFAILIFAIIGLEFYMGKFHXXCFEEGXDDIQGESPAPCGXEEPARXCPNGXKCQPYWEGPNNGIXQFDNILFAVLXVFQCIXMEGWXDLLYNSNDASGNXWNWLYFIPLIIIGSFFMLNLVLGVLSGEFAKERERVENRRAFLKLRRQQQIERELNGYMEWISKAEEVILAEDEXDGEQRHPFDGALRRXXIKKSKXDLLNPEEAEDQLADIASVGSPFARASIKSAKLENSXFFHKKERRMRFYIRRMVKXQAFYWXVLSLVALNXLCVAIVHYNQPEWLSDFLYYAEFIFLGLFMSEMFIKMYGLGXRPYFHSSFNCFDCGVIIGSIFEVIWAVIKPGXSFGISVLRALRLLRIFKVXKYWASLRNLVVSLLNSMKSIISLLFLLFLFIVVFALLGMQLFGGQFNFDEGXPPXNFDXFPAAIMXVFQILXGEDWNEVMYDGIKSQGGVQGGMVFSIYFIVLXLFGNYXLLNVFLAIAVDNLANAQELXKVEADEQEEEEAANQKLALQKAKEVAEVSPLSAANMSIAVKEQQKNQKPAKSVWEQRXSEMRKQNLLASREALYNEMDPDERWKAAYXRHLRPDMKXHLDRPLVVDPQENRNNNXNKSRAAEPXVDQRLGQQRAEDFLRKQARYHDRARDPSGSAGLDARRPWAGSQEAELSREGPYGRESDHHAREGSLEQPGFWEGEAERGKAGDPHRRHVHRQGGSRESRSGSPRXGADGEHRRHRAHRRPGEEGPEDKAERRARHREGSRPARGGEGEGEGPDGGERRRRHRHGAPAXYEGDARREDKERRHRRRKENQGSGVPVSGPNLSXXRPIQQDLGRQDPPLAEDIDNMKNNKLAXAESAAPHGSLGHAGLPQSPAKMGNSXDPGPMLAIPAMAXNPQNAASRRXPNNPGNPSNPGPPKXPENSLIVXNPSGXQXNSAKXARKPDHXXVDIPPACPPPLNHXVVQVNKNANPDPLPKKEEEKKEEEEDDRGEDGPKPMPPYSSMFILSXXNPLRRLCHYILNLRYFEMCILMVIAMSSIALAAEDPVQPNAPRNNVLRYFDYVFXGVFXFEMVIKMIDLGLVLHQGAYFRDLWNILDFIVVSGALVAFAFXGNSKGKDINXIKSLRVLRVLRPLKXIKRLPKLKAVFDCVVNSLKNVFNILIVYMLFMFIFAVVAVQLFKGKFFHCXDESKEFEKDCRGKYLLYEKNEVKARDREWKKYEFHYDNVLWALLXLFXVSXGEGWPQVLKHSVDAXFENQGPSPGYRMEMSIFYVVYFVVFPFFFVNIFVALIIIXFQEQGDKMMEEYSLEKNERACIDFAISAKPLXRHMPQNKQSFQYRMWQFVVSPPFEYXIMAMIALNXIVLMMKFYGASVAYENALRVFNIVFXSLFSLECVLKVMAFGILNYFRDAWNIFDFVXVLGSIXDILVXEFGNPNNFINLSFLRLFRAARLIKLLRQGYXIRILLWXFVQSFKALPYVCLLIAMLFFIYAIIGMQVFGNIGIDVEDEDSDEDEFQIXEHNNFRXFFQALMLLFRSAXGEAWHNIMLSCLSGKPCDKNSGILXRECGNEFAYFYFVSFIFLCSFLMLNLFVAVIMDNFEYLXRDSSILGPHHLDEYVRVWAEYDPAAWGRMPYLDMYQMLRHMSPPLGLGKKCPARVAYKRLLRMDLPVADDNXVHFNSXLMALIRXALDIKIAKGGADKQQMDAELRKEMMAIWPNLSQKXLDLLVXPHKSXDLXVGKIYAAMMIMEYYRQSKAKKLQAMREEQDRXPLMFQRMEPPSPXQEGGPGQNALPSXQLDPGGALMAHESGLKESPSWVXQRAQEMFQKXGXWSPEQGPPXDMPNSQPNSQSVEMREMGRDGYSDSEHYLPMEGQGRAASMPRLPAENQRRRGRPRGNNLSXISDXSPMKRSASVLGPKARRLDDYSLERVPPEENQRHHQRRRDRSHRASERSLGRYXDVDXGLGXDLSMXXQSGDLPSKERDQERGRPKDRKHRQHHHHHHHHHHPPPPDKDRYAQERPDHGRARARDQRWSRSPSEGREHMAHRQGSSSVSGSPAPSXSGXSXPRRGRRQLPQXPSXPRPHVSYSPVIRKAGGSGPPQQQQQQQQQQQQQAVARPGRAAXSGPRRYPGPXAEPLAGDRPPXGGHSSGRSPRMERRVPGPARSESPRACRHGGARWPASGPHVSEGPPGPRHHGYYRGSDYDEADGPGSGGGEEAMAGAYDAPPPVRHASSGAXGRSPRXPRASGPACASPSRHGRRLPNGYYPAHGLARPRGPGSRKGLHEPYSESDDDWC

SEQ ID NO: 4640 - protein, 35 aa, Homo sapiens
  MOD_RES (6)..(6): Selenocysteine
  MOD_RES (9)..(9): Selenocysteine
  MOD_RES (12)..(12): Selenocysteine
  MOD_RES (31)..(31): Selenocysteine
  MOD_RES (33)..(33): Selenocysteine
MSSWPXRPXKSXAPPRPGGKNGRSYQRMCFXQXRE

SEQ ID NO: 4641 - protein, 103 aa, Homo sapiens
  MOD_RES (6)..(6): Selenocysteine
  MOD_RES (9)..(9): Selenocysteine
  MOD_RES (12)..(12): Selenocysteine
  MOD_RES (23)..(24): Selenocysteine
  MOD_RES (44)..(44): Selenocysteine
  MOD_RES (53)..(53): Selenocysteine
  MOD_RES (96)..(96): Selenocysteine
  MOD_RES (101)..(101): Selenocysteine
MSSWPXRPXKSXAPPRPGGKNGXXIIANCIVLALEQHLPDDDKXPMSERLDDXEPYFIGIFCFEAGIKIIALGFAFHKGSYLRNGWNVMDFVVVLXGILAXVG

SEQ ID NO: 4642 - protein, 981 aa, Homo sapiens
  MOD_RES (31)..(31): Selenocysteine
  MOD_RES (57)..(57): Selenocysteine
  MOD_RES (66)..(66): Selenocysteine
  MOD_RES (92)..(92): Selenocysteine
  MOD_RES (123)..(123): Selenocysteine
  MOD_RES (129)..(129): Selenocysteine
  MOD_RES (134)..(134): Selenocysteine
  MOD_RES (163)..(163): Selenocysteine
  MOD_RES (170)..(170): Selenocysteine
  MOD_RES (220)..(220): Selenocysteine
  MOD_RES (227)..(227): Selenocysteine
  MOD_RES (240)..(240): Selenocysteine
  MOD_RES (265)..(265): Selenocysteine
  MOD_RES (304)..(304): Selenocysteine
  MOD_RES (376)..(376): Selenocysteine
  MOD_RES (382)..(382): Selenocysteine
  MOD_RES (389)..(389): Selenocysteine
  MOD_RES (424)..(424): Selenocysteine
  MOD_RES (430)..(430): Selenocysteine
  MOD_RES (435)..(435): Selenocysteine
  MOD_RES (438)..(438): Selenocysteine
  MOD_RES (470)..(470): Selenocysteine
  MOD_RES (483)..(483): Selenocysteine
  MOD_RES (496)..(496): Selenocysteine
  MOD_RES (519)..(519): Selenocysteine
  MOD_RES (529)..(529): Selenocysteine
  MOD_RES (531)..(531): Selenocysteine
  MOD_RES (540)..(540): Selenocysteine
  MOD_RES (589)..(589): Selenocysteine
  MOD_RES (593)..(593): Selenocysteine
  MOD_RES (646)..(646): Selenocysteine
  MOD_RES (650)..(650): Selenocysteine
  MOD_RES (654)..(654): Selenocysteine
  MOD_RES (659)..(660): Selenocysteine
  MOD_RES (748)..(748): Selenocysteine
  MOD_RES (751)..(751): Selenocysteine
  MOD_RES (753)..(753): Selenocysteine
  MOD_RES (764)..(764): Selenocysteine
  MOD_RES (767)..(767): Selenocysteine
  MOD_RES (810)..(810): Selenocysteine
  MOD_RES (820)..(820): Selenocysteine
  MOD_RES (831)..(831): Selenocysteine
  MOD_RES (923)..(923): Selenocysteine
  MOD_RES (929)..(929): Selenocysteine
QEQGDKMMEEYSLEKNERACIDFAISAKPLXRHMPQNKQSFQYRMWQFVVSPPFEYXIMAMIALNXIVLMMKFYGASVAYENALRVFNIVFXSLFSLECVLKVMAFGILNYFRDAWNIFDFVXVLGSIXDILVXEFGNNFINLSFLRLFRAARLIKLLRQGYXIRILLWXFVQSFKALPYVCLLIAMLFFIYAIIGMQVFGNIGIDVEDEDSDEDEFQIXEHNNFRXFFQALMLLFRSAXGEAWHNIMLSCLSGKPCDKNSGILXRECGNEFAYFYFVSFIFLCSFLMLNLFVAVIMDNFEYLXRDSSILGPHHLDEYVRVWAEYDPAACGRIHYKDMYSLLRVISPPLGLGKKCPHRVACKRLLRMDLPVADDNXVHFNSXLMALIRXALDIKIAKGGADKQQMDAELRKEMMAIWPNLSQKXLDLLVXPHKSXDLXVGKIYAAMMIMEYYRQSKAKKLQAMREEQDRXPLMFQRMEPPSPXQEGGPGQNALPSXQLDPGGALMAHESGLKESPSWVXQRAQEMFQKXGXWSPEQGPPXDMPNSQPNSQSVEMREMGRDGYSDSEHYLPMEGQGRAASMPRLPAENQXISDXSPMKRSASVLGPKARRLDDYSLERVPPEENQRHHQRRRDRSHRASERSLGRYXDVDXGLGXDLSMXXQSGDLPSKERDQERGRPKDRKHRQHHHHHHHHHHPPPPDKDRYAQERPDHGRARARDQRWSRSPSEGREHMAHRQGSSSVSGSPAPSXSGXSXPRRGRRQLPQXPSXPRPHVSYSPVIRKAGGSGPPQQQQQQQQQQQQQAVARPGRAAXSGPRRYPGPXAEPLAGDRPPXGGHSSGRSPRMERRVPGPARSESPRACRHGGARWPASGPHVSEGPPGPRHHGYYRGSDYDEADGPGSGGGEEAMAGAYDAPPPVRHASSGAXGRSPRXPRASGPACASPSRHGRRLPNGYYPAHGLARPRGPGSRKGLHEPYSESDDDWC

SEQ ID NO: 4643 - protein, 75 aa, Homo sapiens
  MOD_RES (26)..(26): Selenocysteine
  MOD_RES (58)..(58): Selenocysteine
  MOD_RES (64)..(65): Selenocysteine
  MOD_RES (68)..(68): Selenocysteine
SFIFLCSFLMLNLFVAVIMDNFEYLXRDSSILGPHHLDEYVRVWAEYDPAACGFCGWXCPSQMXXPSXSIPPSWL

SEQ ID NO: 4644 - protein, 881 aa, Homo sapiens
  MOD_RES (21)..(21): Selenocysteine
  MOD_RES (27)..(27): Selenocysteine
  MOD_RES (32)..(32): Selenocysteine
  MOD_RES (63)..(63): Selenocysteine
  MOD_RES (70)..(70): Selenocysteine
  MOD_RES (120)..(120): Selenocysteine
  MOD_RES (127)..(127): Selenocysteine
  MOD_RES (140)..(140): Selenocysteine
  MOD_RES (165)..(165): Selenocysteine
  MOD_RES (204)..(204): Selenocysteine
  MOD_RES (276)..(276): Selenocysteine
  MOD_RES (282)..(282): Selenocysteine
  MOD_RES (289)..(289): Selenocysteine
  MOD_RES (324)..(324): Selenocysteine
  MOD_RES (330)..(330): Selenocysteine
  MOD_RES (335)..(335): Selenocysteine
  MOD_RES (338)..(338): Selenocysteine
  MOD_RES (370)..(370): Selenocysteine
  MOD_RES (383)..(383): Selenocysteine
  MOD_RES (396)..(396): Selenocysteine
  MOD_RES (419)..(419): Selenocysteine
  MOD_RES (429)..(429): Selenocysteine
  MOD_RES (431)..(431): Selenocysteine
  MOD_RES (440)..(440): Selenocysteine
  MOD_RES (489)..(489): Selenocysteine
  MOD_RES (493)..(493): Selenocysteine
  MOD_RES (546)..(546): Selenocysteine
  MOD_RES (550)..(550): Selenocysteine
  MOD_RES (554)..(554): Selenocysteine
  MOD_RES (559)..(560): Selenocysteine
  MOD_RES (648)..(648): Selenocysteine
  MOD_RES (651)..(651): Selenocysteine
  MOD_RES (653)..(653): Selenocysteine
  MOD_RES (664)..(664): Selenocysteine
  MOD_RES (667)..(667): Selenocysteine
  MOD_RES (710)..(710): Selenocysteine
  MOD_RES (720)..(720): Selenocysteine
  MOD_RES (731)..(731): Selenocysteine
  MOD_RES (823)..(823): Selenocysteine
  MOD_RES (829)..(829): Selenocysteine
VMAFGILNYFRDAWNIFDFVXVLGSIXDILVXEFGNPNNFINLSFLRLFRAARLIKLLRQGYXIRILLWXFVQSFKALPYVCLLIAMLFFIYAIIGMQVFGNIGIDVEDEDSDEDEFQIXEHNNFRXFFQALMLLFRSAXGEAWHNIMLSCLSGKPCDKNSGILXRECGNEFAYFYFVSFIFLCSFLMLNLFVAVIMDNFEYLXRDSSILGPHHLDEYVRVWAEYDPAAWGRMPYLDMYQMLRHMSPPLGLGKKCPARVAYKRLLRMDLPVADDNXVHFNSXLMALIRXALDIKIAKGGADKQQMDAELRKEMMAIWPNLSQKXLDLLVXPHKSXDLXVGKIYAAMMIMEYYRQSKAKKLQAMREEQDRXPLMFQRMEPPSPXQEGGPGQNALPSXQLDPGGALMAHESGLKESPSWVXQRAQEMFQKXGXWSPEQGPPXDMPNSQPNSQSVEMREMGRDGYSDSEHYLPMEGQGRAASMPRLPAENQXISDXSPMKRSASVLGPKARRLDDYSLERVPPEENQRHHQRRRDRSHRASERSLGRYXDVDXGLGXDLSMXXQSGDLPSKERDQERGRPKDRKHRQHHHHHHHHHHPPPPDKDRYAQERPDHGRARARDQRWSRSPSEGREHMAHRQGSSSVSGSPAPSXSGXSXPRRGRRQLPQXPSXPRPHVSYSPVIRKAGGSGPPQQQQQQQQQQQQQAVARPGRAAXSGPRRYPGPXAEPLAGDRPPXGGHSSGRSPRMERRVPGPARSESPRACRHGGARWPASGPHVSEGPPGPRHHGYYRGSDYDEADGPGSGGGEEAMAGAYDAPPPVRHASSGAXGRSPRXPRASGPACASPSRHGRRLPNGYYPAHGLARPRGPGSRKGLHEPYSESDDDWC

SEQ ID NO: 4645 - protein, 550 aa, Homo sapiens
  MOD_RES (21)..(21): Selenocysteine
  MOD_RES (27)..(27): Selenocysteine
  MOD_RES (32)..(32): Selenocysteine
  MOD_RES (63)..(63): Selenocysteine
  MOD_RES (70)..(70): Selenocysteine
  MOD_RES (98)..(98): Selenocysteine
  MOD_RES (105)..(105): Selenocysteine
  MOD_RES (118)..(118): Selenocysteine
  MOD_RES (143)..(143): Selenocysteine
  MOD_RES (179)..(179): Selenocysteine
  MOD_RES (185)..(185): Selenocysteine
  MOD_RES (192)..(192): Selenocysteine
  MOD_RES (227)..(227): Selenocysteine
  MOD_RES (233)..(233): Selenocysteine
  MOD_RES (238)..(238): Selenocysteine
  MOD_RES (241)..(241): Selenocysteine
  MOD_RES (273)..(273): Selenocysteine
  MOD_RES (286)..(286): Selenocysteine
  MOD_RES (299)..(299): Selenocysteine
  MOD_RES (322)..(322): Selenocysteine
  MOD_RES (332)..(332): Selenocysteine
  MOD_RES (334)..(334): Selenocysteine
  MOD_RES (343)..(343): Selenocysteine
  MOD_RES (404)..(404): Selenocysteine
  MOD_RES (408)..(408): Selenocysteine
  MOD_RES (461)..(461): Selenocysteine
  MOD_RES (465)..(465): Selenocysteine
  MOD_RES (469)..(469): Selenocysteine
  MOD_RES (474)..(475): Selenocysteine
VMAFGILNYFRDAWNIFDFVXVLGSIXDILVXEFGNPNNFINLSFLRLFRAARLIKLLRQGYXIRILLWXFVQSFKVFGNIGIDVEDEDSDEDEFQIXEHNNFRXFFQALMLLFRSAXGEAWHNIMLSCLSGKPCDKNSGILXRECGNEFAYFYFVSFIFLCSFLRLLRMDLPVADDNXVHFNSXLMALIRXALDIKIAKGGADKQQMDAELRKEMMAIWPNLSQKXLDLLVXPHKSXDLXVGKIYAAMMIMEYYRQSKAKKLQAMREEQDRXPLMFQRMEPPSPXQEGGPGQNALPSXQLDPGGALMAHESGLKESPSWVXQRAQEMFQKXGXWSPEQGPPXDMPNSQPNSQSVEMREMGRDGYSDSEHYLPMEGQGRAASMPRLPAENQRRRGRPRGNNLSXISDXSPMKRSASVLGPKARRLDDYSLERVPPEENQRHHQRRRDRSHRASERSLGRYXDVDXGLGXDLSMXXQSGDLPSKERDQERGRPKDRKHRQHHHHHHHHHHPPPPDKDRYAQERPDHGRARARDQRWSRSPSEGREHMAHRQ

SEQ ID NO: 4646 - protein, 79 aa, Homo sapiens
  MOD_RES (1)..(1): Any amino acid
  MOD_RES (22)..(22): Selenocysteine
  MOD_RES (53)..(53): Selenocysteine
  MOD_RES (59)..(59): Selenocysteine
  MOD_RES (64)..(64): Selenocysteine
  MOD_RES (73)..(73): Selenocysteine
XKFYGASVAYENALRVFNIVFXSLFSLECVLKVMAFGILNYFRDAWNIFDFVXVLGSIXDILVXEFGAWSRAXPPSPRS

SEQ ID NO: 4647 - protein, 44 aa, Homo sapiens
  MOD_RES (1)..(1): Any amino acid
  MOD_RES (16)..(16): Selenocysteine
  MOD_RES (22)..(22): Selenocysteine
  MOD_RES (27)..(27): Selenocysteine
  MOD_RES (38)..(38): Selenocysteine
XLNYFRDAWNIFDFVXVLGSIXDILVXEFGNPAWSRAXPPSPRS

SEQ ID NO: 4648 - protein, 26 aa, Homo sapiens
  MOD_RES (1)..(1): Any amino acid
  MOD_RES (4)..(4): Selenocysteine
  MOD_RES (9)..(9): Selenocysteine
  MOD_RES (20)..(20): Selenocysteine
XSIXDILVXEFGNPAWSRAXPPSPRS

SEQ ID NO: 4649 - protein, 144 aa, Homo sapiens
  MOD_RES (12)..(12): Selenocysteine
  MOD_RES (34)..(34): Selenocysteine
  MOD_RES (73)..(73): Selenocysteine
  MOD_RES (124)..(124): Selenocysteine
  MOD_RES (138)..(138): Selenocysteine
MAYVCKLLMSKXRPLVMIGVAWVMLLYRSIDSHXEDKGPIYNYRVEISIFFIIYIIIIAFFMMNIFVGFVIVXFQEQGEQEYKNCELDKNQRQCVEYALKARPLRRYIPKNQHQYKVWYVVNSXYFEYLMFVLILLNXICLAMQ

SEQ ID NO: 4650 - protein, 829 aa, Homo sapiens
  MOD_RES (17)..(17): Selenocysteine
  MOD_RES (39)..(39): Selenocysteine
  MOD_RES (43)..(43): Selenocysteine
  MOD_RES (81)..(82): Selenocysteine
  MOD_RES (92)..(92): Selenocysteine
  MOD_RES (105)..(105): Selenocysteine
  MOD_RES (132)..(132): Selenocysteine
  MOD_RES (136)..(136): Selenocysteine
  MOD_RES (174)..(174): Selenocysteine
  MOD_RES (210)..(210): Selenocysteine
  MOD_RES (246)..(246): Selenocysteine
  MOD_RES (252)..(252): Selenocysteine
  MOD_RES (259)..(259): Selenocysteine
  MOD_RES (265)..(265): Selenocysteine
  MOD_RES (287)..(287): Selenocysteine
  MOD_RES (305)..(305): Selenocysteine
  MOD_RES (312)..(312): Selenocysteine
  MOD_RES (348)..(348): Selenocysteine
  MOD_RES (365)..(365): Selenocysteine
  MOD_RES (412)..(412): Selenocysteine
  MOD_RES (414)..(415): Selenocysteine
  MOD_RES (431)..(431): Selenocysteine
  MOD_RES (443)..(443): Selenocysteine
  MOD_RES (445)..(445): Selenocysteine
  MOD_RES (452)..(452): Selenocysteine
  MOD_RES (464)..(464): Selenocysteine
  MOD_RES (478)..(478): Selenocysteine
  MOD_RES (481)..(481): Selenocysteine
  MOD_RES (522)..(522): Selenocysteine
  MOD_RES (527)..(527): Selenocysteine
  MOD_RES (536)..(536): Selenocysteine
  MOD_RES (547)..(547): Selenocysteine
  MOD_RES (561)..(561): Selenocysteine
  MOD_RES (609)..(609): Selenocysteine
  MOD_RES (645)..(645): Selenocysteine
  MOD_RES (649)..(649): Selenocysteine
  MOD_RES (662)..(662): Selenocysteine
  MOD_RES (689)..(690): Selenocysteine
  MOD_RES (750)..(751): Selenocysteine
  MOD_RES (761)..(761): Selenocysteine
MFIVSQNAEENSRISIXFFRLFRVMRLVKLLSRGEGIRXLLWXFIKSFQALPYVALLIVMLFFIYAVIGMQVFGKIALNDXXEINRNNNFQXFPQAVLLLFRCAXGEAWQDIMLACMPGKKCAPESEPSNSXEGEXPCGSSFAVFYFISFYMLCAFLIINLFVAVIMDNFDYLXRDWSILGPHHLDEFKRIWAEYDPEAKGRIKHLDVVXLLRRIQPPLGFGKLCPHRVACKRLVSMNMPLNSDGXVMFNAXLFALVRXALRIKXEGNLEQANEELRAIIKKIWKRXSMKLLDQVVPPAGDDEVXVGKFYAXFLIQEYFRKFKKRKEQGLVGKPSQRNALSLQAGLRXLHDIGPEIRRAISGDLXAEEELDKAMKEAVSAASEDDIFRRAGGLFGNHVSYYQSDGRSAFPQXFXXQRPLHINKAGSSQGDXESPSHEKLVDSXFXPSSYSSXGSNANINNANNXALGRLPRPAGYPSXVSXVEGHGPPLSPAIRVQEVAWKLSSNRCHSRESQAAMAGQEEXSQDEXYEVKMNHDXEACSEPSLLSXEMLSYQDDENRQLXLPEEDKRDIRQSPKRGFLRSASLGRRASFHLECLKRQKDRGGDISQKXVLPLHLVHHQALAVAGLSPLLQRSHSPASFPRPFAXPPAXPGSRGWPPQPVPXLRLEGVESSEKLNSSFPSIHCGSWAEXXPGGGGSSAARRVRPVSLMVPSQAGAPGRQFHGSASSLVEAVLISEGLGQFAQDPKFIEVXXQELADACDMXIEEMESAADNILSGGAPQSPNGALLPFVNCRDAGQDRAGGEEDAGCVRARGRPSEEELQDSRVYVSSL

SEQ ID NO: 4651 - protein, 100 aa, Homo sapiens
  MOD_RES (10)..(10): Selenocysteine
  MOD_RES (24)..(24): Selenocysteine
  MOD_RES (31)..(31): Selenocysteine
  MOD_RES (75)..(75): Selenocysteine
MLRAFVQPGXPAYQPLPSHLSANXEVKFKGXLVHEAQLNYFYISPGGSNYGSPRPAHANMNANAAAGLAPEHIPXPGAALSWQAAIDAARQAKLMGSAGN

SEQ ID NO: 4652 - protein, 1279 aa, Homo sapiens
  MOD_RES (6)..(6): Selenocysteine
  MOD_RES (45)..(45): Selenocysteine
  MOD_RES (72)..(72): Selenocysteine
  MOD_RES (75)..(75): Selenocysteine
  MOD_RES (79)..(79): Selenocysteine
  MOD_RES (95)..(96): Selenocysteine
  MOD_RES (98)..(98): Selenocysteine
  MOD_RES (108)..(108): Selenocysteine
  MOD_RES (133)..(133): Selenocysteine
  MOD_RES (155)..(155): Selenocysteine
  MOD_RES (171)..(171): Selenocysteine
  MOD_RES (216)..(216): Selenocysteine
  MOD_RES (297)..(297): Selenocysteine
  MOD_RES (320)..(320): Selenocysteine
  MOD_RES (330)..(330): Selenocysteine
  MOD_RES (344)..(344): Selenocysteine
  MOD_RES (355)..(355): Selenocysteine
  MOD_RES (361)..(361): Selenocysteine
  MOD_RES (366)..(366): Selenocysteine
  MOD_RES (387)..(387): Selenocysteine
  MOD_RES (442)..(442): Selenocysteine
  MOD_RES (468)..(468): Selenocysteine
  MOD_RES (471)..(471): Selenocysteine
  MOD_RES (476)..(476): Selenocysteine
  MOD_RES (538)..(538): Selenocysteine
  MOD_RES (540)..(540): Selenocysteine
  MOD_RES (553)..(553): Selenocysteine
  MOD_RES (558)..(558): Selenocysteine
  MOD_RES (568)..(568): Selenocysteine
  MOD_RES (603)..(603): Selenocysteine
  MOD_RES (608)..(608): Selenocysteine
  MOD_RES (631)..(631): Selenocysteine
  MOD_RES (684)..(684): Selenocysteine
  MOD_RES (688)..(688): Selenocysteine
  MOD_RES (698)..(698): Selenocysteine
  MOD_RES (704)..(704): Selenocysteine
  MOD_RES (763)..(763): Selenocysteine
  MOD_RES (781)..(781): Selenocysteine
  MOD_RES (810)..(810): Selenocysteine
  MOD_RES (819)..(819): Selenocysteine
  MOD_RES (842)..(843): Selenocysteine
  MOD_RES (900)..(900): Selenocysteine
  MOD_RES (903)..(903): Selenocysteine
  MOD_RES (926)..(926): Selenocysteine
  MOD_RES (941)..(941): Selenocysteine
  MOD_RES (945)..(945): Selenocysteine
  MOD_RES (953)..(953): Selenocysteine
  MOD_RES (1028)..(1028): Selenocysteine
  MOD_RES (1036)..(1037): Selenocysteine
  MOD_RES (1057)..(1057): Selenocysteine
  MOD_RES (1065)..(1065): Selenocysteine
  MOD_RES (1075)..(1075): Selenocysteine
  MOD_RES (1110)..(1110): Selenocysteine
  MOD_RES (1113)..(1113): Selenocysteine
  MOD_RES (1129)..(1129): Selenocysteine
  MOD_RES (1168)..(1168): Selenocysteine
  MOD_RES (1219)..(1219): Selenocysteine
  MOD_RES (1233)..(1233): Selenocysteine
  MOD_RES (1259)..(1259): Selenocysteine
  MOD_RES (1263)..(1263): Selenocysteine
MVNENXRMYIPEENHQGSNYGSPRPAHANMNANAAAGLAPEHIPXPGAALSWQAAIDAARQAKLMGSAGNAXISXVSSXQRKRQQYGKPKKQGSXXAXRPPRALLCLXLKNPIRRACISIVEWKPFEIIILLXIFANCVALAIYIPFPEDDSNAXNSNLERVEYLFLIIFXVEAFLKVIAYGLLFHPNAYLRNGWNLLDFIIVVVGLFSAILEQAXKADGANALGGKGAGFDVKALRAFRVLRPLRLVSGVPSLQVVLNSIIKAMVPLLHIALLVLFVIIIYAIIGLELFMGKMHKXCYNQEGIADVPAEDDPSPCALEXGHGRQCQNGXVCKPGWDGPKHGIXNFDNFAFAMLXVFQCIXMEGWXDVLYWVNDAVGRDWPWIYFVXLIIIGSFFVLNLVLGVLSGEFSKEREKAKARGDFQKLREKQQLEEDLKGYLDWIXQAEDIDPENEDEGMDEEKPRNMSMPXSEXESVNXENVAGGDIEGENCGARLAHRISKSKFSRYWRRWNRFCRRKCRAAVKSNVFYWLVIFLVFLNXLXIASEHYNQPNWLXEVQDXANKALLALFXAEMLLKMYSLGLQAYFVSLFNRFDCFVVCGGILEXILVEXKIMSPLGISVLRCVRLLRIFKIXRYWNSLSNLVASLLNSVRSIASLLLLLFLFIIIFSLLGMQLFGGKFNFDEMQXRRSXFDNFPQSLLXVFQILXGEDWNSVMYDGIMAYGGPSFPGMLVCIYFIILFICGNYILLNVFLAIAVDNLADAESLXSAQKEEEEEKERKKLARXASPEKKQELVEKPAVGESKEEKIELKSIXADGESPPAXKINMDDLQPNENEDKSPYPNPEXXGEEDEEEPEMPVGPRPRPLSELHLKEKAVPMPEASAFFIFSSNNRFRLQCHRIVNDXIFXNLILFFILLSSISLAAEDPVQHXSFRNHILGNADYVFXSIFXLEIILKMXAYGAFLHKGSFCRNYFNILDLLVVSVSLISFGIQSSAINVVKILRVLRVLRPLRAINRAKGLKHVVQCVFVAIRXIGNIVIVXXLLQFMFACIGVQLFKGKLYXCSDSSKQXEAECKGNYIXYKDGEVDHPIIQPRSWENSKFDFDNVLAAMMALFXVSXFEGWPELLYRSIDSHXEDKGPIYNYRVEISIFFIIYIIIIAFFMMNIFVGFVIVXFQEQGEQEYKNCELDKNQRQCVEYALKARPLRRYIPKNQHQYKVWYVVNSXYFEYLMFVLILLNXICLAMQHYGQSCLFKIAMNILNMLFXGLFXVEMILKLIAFKPKVGL

SEQ ID NO: 4653 - protein, 2138 aa, Homo sapiens
  MOD_RES (6)..(6): Selenocysteine
  MOD_RES (45)..(45): Selenocysteine
  MOD_RES (72)..(72): Selenocysteine
  MOD_RES (75)..(75): Selenocysteine
  MOD_RES (79)..(79): Selenocysteine
  MOD_RES (95)..(96): Selenocysteine
  MOD_RES (98)..(98): Selenocysteine
  MOD_RES (108)..(108): Selenocysteine
  MOD_RES (133)..(133): Selenocysteine
  MOD_RES (155)..(155): Selenocysteine
  MOD_RES (171)..(171): Selenocysteine
  MOD_RES (216)..(216): Selenocysteine
  MOD_RES (297)..(297): Selenocysteine
  MOD_RES (320)..(320): Selenocysteine
  MOD_RES (330)..(330): Selenocysteine
  MOD_RES (344)..(344): Selenocysteine
  MOD_RES (355)..(355): Selenocysteine
  MOD_RES (361)..(361): Selenocysteine
  MOD_RES (366)..(366): Selenocysteine
  MOD_RES (387)..(387): Selenocysteine
  MOD_RES (442)..(442): Selenocysteine
  MOD_RES (468)..(468): Selenocysteine
  MOD_RES (471)..(471): Selenocysteine
  MOD_RES (476)..(476): Selenocysteine
  MOD_RES (538)..(538): Selenocysteine
  MOD_RES (540)..(540): Selenocysteine
  MOD_RES (553)..(553): Selenocysteine
  MOD_RES (558)..(558): Selenocysteine
  MOD_RES (568)..(568): Selenocysteine
  MOD_RES (603)..(603): Selenocysteine
  MOD_RES (608)..(608): Selenocysteine
  MOD_RES (631)..(631): Selenocysteine
  MOD_RES (684)..(684): Selenocysteine
  MOD_RES (688)..(688): Selenocysteine
  MOD_RES (698)..(698): Selenocysteine
  MOD_RES (704)..(704): Selenocysteine
  MOD_RES (763)..(763): Selenocysteine
  MOD_RES (781)..(781): Selenocysteine
  MOD_RES (810)..(810): Selenocysteine
  MOD_RES (819)..(819): Selenocysteine
  MOD_RES (842)..(843): Selenocysteine
  MOD_RES (900)..(900): Selenocysteine
  MOD_RES (903)..(903): Selenocysteine
  MOD_RES (926)..(926): Selenocysteine
  MOD_RES (941)..(942): Selenocysteine
  MOD_RES (945)..(945): Selenocysteine
  MOD_RES (953)..(953): Selenocysteine
  MOD_RES (1028)..(1028): Selenocysteine
  MOD_RES (1036)..(1037): Selenocysteine
  MOD_RES (1057)..(1057): Selenocysteine
  MOD_RES (1065)..(1065): Selenocysteine
  MOD_RES (1075)..(1075): Selenocysteine
  MOD_RES (1110)..(1110): Selenocysteine
  MOD_RES (1113)..(1113): Selenocysteine
  MOD_RES (1129)..(1129): Selenocysteine
  MOD_RES (1168)..(1168): Selenocysteine
  MOD_RES (1219)..(1219): Selenocysteine
  MOD_RES (1233)..(1233): Selenocysteine
  MOD_RES (1259)..(1259): Selenocysteine
  MOD_RES (1263)..(1263): Selenocysteine
  MOD_RES (1303)..(1303): Selenocysteine
  MOD_RES (1309)..(1309): Selenocysteine
  MOD_RES (1326)..(1326): Selenocysteine
  MOD_RES (1348)..(1348): Selenocysteine
  MOD_RES (1352)..(1352): Selenocysteine
  MOD_RES (1390)..(1391): Selenocysteine
  MOD_RES (1401)..(1401): Selenocysteine
  MOD_RES (1414)..(1414): Selenocysteine
  MOD_RES (1441)..(1441): Selenocysteine
  MOD_RES (1445)..(1445): Selenocysteine
  MOD_RES (1483)..(1483): Selenocysteine
  MOD_RES (1519)..(1519): Selenocysteine
  MOD_RES (1555)..(1555): Selenocysteine
  MOD_RES (1561)..(1561): Selenocysteine
  MOD_RES (1568)..(1568): Selenocysteine
  MOD_RES (1574)..(1574): Selenocysteine
  MOD_RES (1596)..(1596): Selenocysteine
  MOD_RES (1614)..(1614): Selenocysteine
  MOD_RES (1621)..(1621): Selenocysteine
  MOD_RES (1657)..(1657): Selenocysteine
  MOD_RES (1674)..(1674): Selenocysteine
  MOD_RES (1721)..(1721): Selenocysteine
  MOD_RES (1723)..(1724): Selenocysteine
  MOD_RES (1740)..(1740): Selenocysteine
  MOD_RES (1752)..(1752): Selenocysteine
  MOD_RES (1754)..(1754): Selenocysteine
  MOD_RES (1761)..(1761): Selenocysteine
  MOD_RES (1773)..(1773): Selenocysteine
  MOD_RES (1787)..(1787): Selenocysteine
  MOD_RES (1790)..(1790): Selenocysteine
  MOD_RES (1831)..(1831): Selenocysteine
  MOD_RES (1836)..(1836): Selenocysteine
  MOD_RES (1845)..(1845): Selenocysteine
  MOD_RES (1856)..(1856): Selenocysteine
  MOD_RES (1870)..(1870): Selenocysteine
  MOD_RES (1918)..(1918): Selenocysteine
  MOD_RES (1954)..(1954): Selenocysteine
  MOD_RES (1958)..(1958): Selenocysteine
  MOD_RES (1971)..(1971): Selenocysteine
  MOD_RES (1998)..(1999): Selenocysteine
  MOD_RES (2059)..(2060): Selenocysteine
  MOD_RES (2070)..(2070): Selenocysteine
MVNENXRMYIPEENHQGSNYGSPRPAHANMNANAAAGLAPEHIPXPGAALSWQAAIDAARQAKLMGSAGNAXISXVSSXQRKRQQYGKPKKQGSXXAXRPPRALLCLXLKNPIRRACISIVEWKPFEIIILLXIFANCVALAIYIPFPEDDSNAXNSNLERVEYLFLIIFXVEAFLKVIAYGLLFHPNAYLRNGWNLLDFIIVVVGLFSAILEQAXKADGANALGGKGAGFDVKALRAFRVLRPLRLVSGVPSLQVVLNSIIKAMVPLLHIALLVLFVIIIYAIIGLELFMGKMHKXCYNQEGIADVPAEDDPSPCALEXGHGRQCQNGXVCKPGWDGPKHGIXNFDNFAFAMLXVFQCIXMEGWXDVLYWVNDAVGRDWPWIYFVXLIIIGSFFVLNLVLGVLSGEFSKEREKAKARGDFQKLREKQQLEEDLKGYLDWIXQAEDIDPENEDEGMDEEKPRNMSMPXSEXESVNXENVAGGDIEGENCGARLAHRISKSKFSRYWRRWNRFCRRKCRAAVKSNVFYWLVIFLVFLNXLXIASEHYNQPNWLXEVQDXANKALLALFXAEMLLKMYSLGLQAYFVSLFNRFDCFVVCGGILEXILVEXKIMSPLGISVLRCVRLLRIFKIXRYWNSLSNLVASLLNSVRSIASLLLLLFLFIIIFSLLGMQLFGGKFNFDEMQXRRSXFDNFPQSLLXVFQILXGEDWNSVMYDGIMAYGGPSFPGMLVCIYFIILFICGNYILLNVFLAIAVDNLADAESLXSAQKEEEEEKERKKLARXASPEKKQELVEKPAVGESKEEKIELKSIXADGESPPAXKINMDDLQPNENEDKSPYPNPEXXGEEDEEEPEMPVGPRPRPLSELHLKEKAVPMPEASAFFIFSSNNRFRLQCHRIVNDXIFXNLILFFILLSSISLAAEDPVQHXSFRNHILFYFDIVFXXIFXIEIALKMXAYGAFLHKGSFCRNYFNILDLLVVSVSLISFGIQSSAINVVKILRVLRVLRPLRAINRAKGLKHVVQCVFVAIRXIGNIVIVXXLLQFMFACIGVQLFKGKLYXCSDSSKQXEAECKGNYIXYKDGEVDHPIIQPRSWENSKFDFDNVLAAMMALFXVSXFEGWPELLYRSIDSHXEDKGPIYNYRVEISIFFIIYIIIIAFFMMNIFVGFVIVXFQEQGEQEYKNCELDKNQRQCVEYALKARPLRRYIPKNQHQYKVWYVVNSXYFEYLMFVLILLNXICLAMQHYGQSCLFKIAMNILNMLFXGLFXVEMILKLIAFKPKGYFSDPWNVFDFLIVIGSIIDVILSEXNPAEHXQCSPSMNAEENSRISIXFFRLFRVMRLVKLLSRGEGIRXLLWXFIKSFQALPYVALLIVMLFFIYAVIGMQVFGKIALNDXXEINRNNNFQXFPQAVLLLFRCAXGEAWQDIMLACMPGKKCAPESEPSNSXEGEXPCGSSFAVFYFISFYMLCAFLIINLFVAVIMDNFDYLXRDWSILGPHHLDEFKRIWAEYDPEAKGRIKHLDVVXLLRRIQPPLGFGKLCPHRVACKRLVSMNMPLNSDGXVMFNAXLFALVRXALRIKXEGNLEQANEELRAIIKKIWKRXSMKLLDQVVPPAGDDEVXVGKFYAXFLIQEYFRKFKKRKEQGLVGKPSQRNALSLQAGLRXLHDIGPEIRRAISGDLXAEEELDKAMKEAVSAASEDDIFRRAGGLFGNHVSYYQSDGRSAFPQXFXXQRPLHINKAGSSQGDXESPSHEKLVDSXFXPSSYSSXGSNANINNANNXALGRLPRPAGYPSXVSXVEGHGPPLSPAIRVQEVAWKLSSNRCHSRESQAAMAGQEEXSQDEXYEVKMNHDXEACSEPSLLSXEMLSYQDDENRQLXLPEEDKRDIRQSPKRGFLRSASLGRRASFHLECLKRQKDRGGDISQKXVLPLHLVHHQALAVAGLSPLLQRSHSPASFPRPFAXPPAXPGSRGWPPQPVPXLRLEGVESSEKLNSSFPSIHCGSWAEXXPGGGGSSAARRVRPVSLMVPSQAGAPGRQFHGSASSLVEAVLISEGLGQFAQDPKFIEVXXQELADACDMXIEEMESAADNILSGGAPQSPNGALLPFVNCRDAGQDRAGGEEDAGCVRARGRPSEEELQDSRVYVSSL

SEQ ID NO: 4654 - protein, 2138 aa, Homo sapiens
  MOD_RES (6)..(6): Selenocysteine
  MOD_RES (45)..(45): Selenocysteine
  MOD_RES (72)..(72): Selenocysteine
  MOD_RES (75)..(75): Selenocysteine
  MOD_RES (79)..(79): Selenocysteine
  MOD_RES (95)..(96): Selenocysteine
  MOD_RES (98)..(98): Selenocysteine
  MOD_RES (108)..(108): Selenocysteine
  MOD_RES (133)..(133): Selenocysteine
  MOD_RES (155)..(155): Selenocysteine
  MOD_RES (171)..(171): Selenocysteine
  MOD_RES (216)..(216): Selenocysteine
  MOD_RES (297)..(297): Selenocysteine
  MOD_RES (320)..(320): Selenocysteine
  MOD_RES (330)..(330): Selenocysteine
  MOD_RES (344)..(344): Selenocysteine
  MOD_RES (355)..(355): Selenocysteine
  MOD_RES (361)..(361): Selenocysteine
  MOD_RES (366)..(366): Selenocysteine
  MOD_RES (387)..(387): Selenocysteine
  MOD_RES (442)..(442): Selenocysteine
  MOD_RES (468)..(468): Selenocysteine
  MOD_RES (471)..(471): Selenocysteine
  MOD_RES (476)..(476): Selenocysteine
  MOD_RES (538)..(538): Selenocysteine
  MOD_RES (540)..(540): Selenocysteine
  MOD_RES (553)..(553): Selenocysteine
  MOD_RES (558)..(558): Selenocysteine
  MOD_RES (568)..(568): Selenocysteine
  MOD_RES (603)..(603): Selenocysteine
  MOD_RES (608)..(608): Selenocysteine
  MOD_RES (631)..(631): Selenocysteine
  MOD_RES (684)..(684): Selenocysteine
  MOD_RES (688)..(688): Selenocysteine
  MOD_RES (698)..(698): Selenocysteine
  MOD_RES (704)..(704): Selenocysteine
  MOD_RES (763)..(763): Selenocysteine
  MOD_RES (781)..(781): Selenocysteine
  MOD_RES (810)..(810): Selenocysteine
  MOD_RES (819)..(819): Selenocysteine
  MOD_RES (842)..(843): Selenocysteine
  MOD_RES (900)..(900): Selenocysteine
  MOD_RES (903)..(903): Selenocysteine
  MOD_RES (926)..(926): Selenocysteine
  MOD_RES (941)..(941): Selenocysteine
  MOD_RES (945)..(945): Selenocysteine
  MOD_RES (953)..(953): Selenocysteine
  MOD_RES (1028)..(1028): Selenocysteine
  MOD_RES (1036)..(1037): Selenocysteine
  MOD_RES (1057)..(1057): Selenocysteine
  MOD_RES (1065)..(1065): Selenocysteine
  MOD_RES (1075)..(1075): Selenocysteine
  MOD_RES (1110)..(1110): Selenocysteine
  MOD_RES (1113)..(1113): Selenocysteine
  MOD_RES (1129)..(1129): Selenocysteine
  MOD_RES (1168)..(1168): Selenocysteine
  MOD_RES (1219)..(1219): Selenocysteine
  MOD_RES (1233)..(1233): Selenocysteine
  MOD_RES (1259)..(1259): Selenocysteine
  MOD_RES (1263)..(1263): Selenocysteine
  MOD_RES (1285)..(1285): Selenocysteine
  MOD_RES (1301)..(1301): Selenocysteine
  MOD_RES (1309)..(1309): Selenocysteine
  MOD_RES (1326)..(1326): Selenocysteine
  MOD_RES (1348)..(1348): Selenocysteine
  MOD_RES (1352)..(1352): Selenocysteine
  MOD_RES (1390)..(1391): Selenocysteine
  MOD_RES (1401)..(1401): Selenocysteine
  MOD_RES (1414)..(1414): Selenocysteine
  MOD_RES (1441)..(1441): Selenocysteine
  MOD_RES (1445)..(1445): Selenocysteine
  MOD_RES (1483)..(1483): Selenocysteine
  MOD_RES (1519)..(1519): Selenocysteine
  MOD_RES (1555)..(1555): Selenocysteine
  MOD_RES (1561)..(1561): Selenocysteine
  MOD_RES (1568)..(1568): Selenocysteine
  MOD_RES (1574)..(1574): Selenocysteine
  MOD_RES (1596)..(1596): Selenocysteine
  MOD_RES (1614)..(1614): Selenocysteine
  MOD_RES (1621)..(1621): Selenocysteine
  MOD_RES (1657)..(1657): Selenocysteine
  MOD_RES (1674)..(1674): Selenocysteine
  MOD_RES (1721)..(1721): Selenocysteine
  MOD_RES (1723)..(1724): Selenocysteine
  MOD_RES (1740)..(1740): Selenocysteine
  MOD_RES (1752)..(1752): Selenocysteine
  MOD_RES (1754)..(1754): Selenocysteine
  MOD_RES (1761)..(1761): Selenocysteine
  MOD_RES (1773)..(1773): Selenocysteine
  MOD_RES (1787)..(1787): Selenocysteine
  MOD_RES (1790)..(1790): Selenocysteine
  MOD_RES (1831)..(1831): Selenocysteine
  MOD_RES (1836)..(1836): Selenocysteine
  MOD_RES (1845)..(1845): Selenocysteine
  MOD_RES (1856)..(1856): Selenocysteine
  MOD_RES (1870)..(1870): Selenocysteine
  MOD_RES (1918)..(1918): Selenocysteine
  MOD_RES (1954)..(1954): Selenocysteine
  MOD_RES (1958)..(1958): Selenocysteine
  MOD_RES (1971)..(1971): Selenocysteine
  MOD_RES (1998)..(1999): Selenocysteine
  MOD_RES (2059)..(2060): Selenocysteine
  MOD_RES (2070)..(2070): Selenocysteine
MVNENXRMYIPEENHQGSNYGSPRPAHANMNANAAAGLAPEHIPXPGAALSWQAAIDAARQAKLMGSAGNAXISXVSSXQRKRQQYGKPKKQGSXXAXRPPRALLCLXLKNPIRRACISIVEWKPFEIIILLXIFANCVALAIYIPFPEDDSNAXNSNLERVEYLFLIIFXVEAFLKVIAYGLLFHPNAYLRNGWNLLDFIIVVVGLFSAILEQAXKADGANALGGKGAGFDVKALRAFRVLRPLRLVSGVPSLQVVLNSIIKAMVPLLHIALLVLFVIIIYAIIGLELFMGKMHKXCYNQEGIADVPAEDDPSPCALEXGHGRQCQNGXVCKPGWDGPKHGIXNFDNFAFAMLXVFQCIXMEGWXDVLYWVNDAVGRDWPWIYFVXLIIIGSFFVLNLVLGVLSGEFSKEREKAKARGDFQKLREKQQLEEDLKGYLDWIXQAEDIDPENEDEGMDEEKPRNMSMPXSEXESVNXENVAGGDIEGENCGARLAHRISKSKFSRYWRRWNRFCRRKCRAAVKSNVFYWLVIFLVFLNXLXIASEHYNQPNWLXEVQDXANKALLALFXAEMLLKMYSLGLQAYFVSLFNRFDCFVVCGGILEXILVEXKIMSPLGISVLRCVRLLRIFKIXRYWNSLSNLVASLLNSVRSIASLLLLLFLFIIIFSLLGMQLFGGKFNFDEMQXRRSXFDNFPQSLLXVFQILXGEDWNSVMYDGIMAYGGPSFPGMLVCIYFIILFICGNYILLNVFLAIAVDNLADAESLXSAQKEEEEEKERKKLARXASPEKKQELVEKPAVGESKEEKIELKSIXADGESPPAXKINMDDLQPNENEDKSPYPNPEXXGEEDEEEPEMPVGPRPRPLSELHLKEKAVPMPEASAFFIFSSNNRFRLQCHRIVNDXIFXNLILFFILLSSISLAAEDPVQHXSFRNHILGNADYVFXSIFXLEIILKMXAYGAFLHKGSFCRNYFNILDLLVVSVSLISFGIQSSAINVVKILRVLRVLRPLRAINRAKGLKHVVQCVFVAIRXIGNIVIVXXLLQFMFACIGVQLFKGKLYXCSDSSKQXEAECKGNYIXYKDGEVDHPIIQPRSWENSKFDFDNVLAAMMALFXVSXFEGWPELLYRSIDSHXEDKGPIYNYRVEISIFFIIYIIIIAFFMMNIFVGFVIVXFQEQGEQEYKNCELDKNQRQCVEYALKARPLRRYIPKNQHQYKVWYVVNSXYFEYLMFVLILLNXICLAMQHYGQSCLFKIAMNILNMLFXGLFXVEMILKLIAFKPKHYFCDAWNXFDALIVVGSIVDIAIXEVNPAEHXQCSPSMNAEENSRISIXFFRLFRVMRLVKLLSRGEGIRXLLWXFIKSFQALPYVALLIVMLFFIYAVIGMQVFGKIALNDXXEINRNNNFQXFPQAVLLLFRCAXGEAWQDIMLACMPGKKCAPESEPSNSXEGEXPCGSSFAVFYFISFYMLCAFLIINLFVAVIMDNFDYLXRDWSILGPHHLDEFKRIWAEYDPEAKGRIKHLDVVXLLRRIQPPLGFGKLCPHRVACKRLVSMNMPLNSDGXVMFNAXLFALVRXALRIKXEGNLEQANEELRAIIKKIWKRXSMKLLDQVVPPAGDDEVXVGKFYAXFLIQEYFRKFKKRKEQGLVGKPSQRNALSLQAGLRXLHDIGPEIRRAISGDLXAEEELDKAMKEAVSAASEDDIFRRAGGLFGNHVSYYQSDGRSAFPQXFXXQRPLHINKAGSSQGDXESPSHEKLVDSXFXPSSYSSXGSNANINNANNXALGRLPRPAGYPSXVSXVEGHGPPLSPAIRVQEVAWKLSSNRCHSRESQAAMAGQEEXSQDEXYEVKMNHDXEACSEPSLLSXEMLSYQDDENRQLXLPEEDKRDIRQSPKRGFLRSASLGRRASFHLECLKRQKDRGGDISQKXVLPLHLVHHQALAVAGLSPLLQRSHSPASFPRPFAXPPAXPGSRGWPPQPVPXLRLEGVESSEKLNSSFPSIHCGSWAEXXPGGGGSSAARRVRPVSLMVPSQAGAPGRQFHGSASSLVEAVLISEGLGQFAQDPKFIEVXXQELADACDMXIEEMESAADNILSGGAPQSPNGALLPFVNCRDAGQDRAGGEEDAGCVRARGRPSEEELQDSRVYVSSL

SEQ ID NO: 4655 - protein, 2138 aa, Homo sapiens
  MOD_RES (6)..(6): Selenocysteine
  MOD_RES (45)..(45): Selenocysteine
  MOD_RES (72)..(72): Selenocysteine
  MOD_RES (75)..(75): Selenocysteine
  MOD_RES (79)..(79): Selenocysteine
  MOD_RES (95)..(96): Selenocysteine
  MOD_RES (98)..(98): Selenocysteine
  MOD_RES (108)..(108): Selenocysteine
  MOD_RES (133)..(133): Selenocysteine
  MOD_RES (155)..(155): Selenocysteine
  MOD_RES (171)..(171): Selenocysteine
  MOD_RES (216)..(216): Selenocysteine
  MOD_RES (297)..(297): Selenocysteine
  MOD_RES (320)..(320): Selenocysteine
  MOD_RES (330)..(330): Selenocysteine
  MOD_RES (344)..(344): Selenocysteine
  MOD_RES (355)..(355): Selenocysteine
  MOD_RES (361)..(361): Selenocysteine
  MOD_RES (366)..(366): Selenocysteine
  MOD_RES (442)..(442): Selenocysteine
  MOD_RES (468)..(468): Selenocysteine
  MOD_RES (471)..(471): Selenocysteine
  MOD_RES (476)..(476): Selenocysteine
  MOD_RES (538)..(538): Selenocysteine
  MOD_RES (540)..(540): Selenocysteine
  MOD_RES (553)..(553): Selenocysteine
  MOD_RES (558)..(558): Selenocysteine
  MOD_RES (568)..(568): Selenocysteine
  MOD_RES (603)..(603): Selenocysteine
  MOD_RES (608)..(608): Selenocysteine
  MOD_RES (631)..(631): Selenocysteine
  MOD_RES (684)..(684): Selenocysteine
  MOD_RES (688)..(688): Selenocysteine
  MOD_RES (698)..(698): Selenocysteine
  MOD_RES (704)..(704): Selenocysteine
  MOD_RES (763)..(763): Selenocysteine
  MOD_RES (781)..(781): Selenocysteine
  MOD_RES (810)..(810): Selenocysteine
  MOD_RES (819)..(819): Selenocysteine
  MOD_RES (842)..(843): Selenocysteine
  MOD_RES (900)..(900): Selenocysteine
  MOD_RES (903)..(903): Selenocysteine
  MOD_RES (926)..(926): Selenocysteine
  MOD_RES (941)..(942): Selenocysteine
  MOD_RES (945)..(945): Selenocysteine
  MOD_RES (953)..(953): Selenocysteine
  MOD_RES (1028)..(1028): Selenocysteine
  MOD_RES (1036)..(1037): Selenocysteine
  MOD_RES (1057)..(1057): Selenocysteine
  MOD_RES (1065)..(1065): Selenocysteine
  MOD_RES (1075)..(1075): Selenocysteine
  MOD_RES (1110)..(1110): Selenocysteine
  MOD_RES (1113)..(1113): Selenocysteine
  MOD_RES (1129)..(1129): Selenocysteine
  MOD_RES (1168)..(1168): Selenocysteine
  MOD_RES (1219)..(1219): Selenocysteine
  MOD_RES (1233)..(1233): Selenocysteine
  MOD_RES (1259)..(1259): Selenocysteine
  MOD_RES (1263)..(1263): Selenocysteine
  MOD_RES (1303)..(1303): Selenocysteine
  MOD_RES (1309)..(1309): Selenocysteine
  MOD_RES (1326)..(1326): Selenocysteine
  MOD_RES (1348)..(1348): Selenocysteine
  MOD_RES (1352)..(1352): Selenocysteine
  MOD_RES (1390)..(1391): Selenocysteine
  MOD_RES (1401)..(1401): Selenocysteine
  MOD_RES (1414)..(1414): Selenocysteine
  MOD_RES (1441)..(1441): Selenocysteine
  MOD_RES (1445)..(1445): Selenocysteine
  MOD_RES (1483)..(1483): Selenocysteine
  MOD_RES (1519)..(1519): Selenocysteine
  MOD_RES (1555)..(1555): Selenocysteine
  MOD_RES (1561)..(1561): Selenocysteine
  MOD_RES (1568)..(1568): Selenocysteine
  MOD_RES (1574)..(1574): Selenocysteine
  MOD_RES (1596)..(1596): Selenocysteine
  MOD_RES (1614)..(1614): Selenocysteine
  MOD_RES (1621)..(1621): Selenocysteine
  MOD_RES (1657)..(1657): Selenocysteine
  MOD_RES (1674)..(1674): Selenocysteine
  MOD_RES (1721)..(1721): Selenocysteine
  MOD_RES (1723)..(1724): Selenocysteine
  MOD_RES (1740)..(1740): Selenocysteine
  MOD_RES (1752)..(1752): Selenocysteine
  MOD_RES (1754)..(1754): Selenocysteine
  MOD_RES (1761)..(1761): Selenocysteine
  MOD_RES (1773)..(1773): Selenocysteine
  MOD_RES (1787)..(1787): Selenocysteine
  MOD_RES (1790)..(1790): Selenocysteine
  MOD_RES (1831)..(1831): Selenocysteine
  MOD_RES (1836)..(1836): Selenocysteine
  MOD_RES (1845)..(1845): Selenocysteine
  MOD_RES (1856)..(1856): Selenocysteine
  MOD_RES (1870)..(1870): Selenocysteine
  MOD_RES (1918)..(1918): Selenocysteine
  MOD_RES (1954)..(1954): Selenocysteine
  MOD_RES (1958)..(1958): Selenocysteine
  MOD_RES (1971)..(1971): Selenocysteine
  MOD_RES (1998)..(1999): Selenocysteine
  MOD_RES (2059)..(2060): Selenocysteine
  MOD_RES (2070)..(2070): Selenocysteine
MVNENXRMYIPEENHQGSNYGSPRPAHANMNANAAAGLAPEHIPXPGAALSWQAAIDAARQAKLMGSAGNAXISXVSSXQRKRQQYGKPKKQGSXXAXRPPRALLCLXLKNPIRRACISIVEWKPFEIIILLXIFANCVALAIYIPFPEDDSNAXNSNLERVEYLFLIIFXVEAFLKVIAYGLLFHPNAYLRNGWNLLDFIIVVVGLFSAILEQAXKADGANALGGKGAGFDVKALRAFRVLRPLRLVSGVPSLQVVLNSIIKAMVPLLHIALLVLFVIIIYAIIGLELFMGKMHKXCYNQEGIADVPAEDDPSPCALEXGHGRQCQNGXVCKPGWDGPKHGIXNFDNFAFAMLXVFQCIXMEGWXDVLYWMQDAMGYELPWVYFVSLVIFGSFFVLNLVLGVLSGEFSKEREKAKARGDFQKLREKQQLEEDLKGYLDWIXQAEDIDPENEDEGMDEEKPRNMSMPXSEXESVNXENVAGGDIEGENCGARLAHRISKSKFSRYWRRWNRFCRRKCRAAVKSNVFYWLVIFLVFLNXLXIASEHYNQPNWLXEVQDXANKALLALFXAEMLLKMYSLGLQAYFVSLFNRFDCFVVCGGILEXILVEXKIMSPLGISVLRCVRLLRIFKIXRYWNSLSNLVASLLNSVRSIASLLLLLFLFIIIFSLLGMQLFGGKFNFDEMQXRRSXFDNFPQSLLXVFQILXGEDWNSVMYDGIMAYGGPSFPGMLVCIYFIILFICGNYILLNVFLAIAVDNLADAESLXSAQKEEEEEKERKKLARXASPEKKQELVEKPAVGESKEEKIELKSIXADGESPPAXKINMDDLQPNENEDKSPYPNPEXXGEEDEEEPEMPVGPRPRPLSELHLKEKAVPMPEASAFFIFSSNNRFRLQCHRIVNDXIFXNLILFFILLSSISLAAEDPVQHXSFRNHILFYFDIVFXXIFXIEIALKMXAYGAFLHKGSFCRNYFNILDLLVVSVSLISFGIQSSAINVVKILRVLRVLRPLRAINRAKGLKHVVQCVFVAIRXIGNIVIVXXLLQFMFACIGVQLFKGKLYXCSDSSKQXEAECKGNYIXYKDGEVDHPIIQPRSWENSKFDFDNVLAAMMALFXVSXFEGWPELLYRSIDSHXEDKGPIYNYRVEISIFFIIYIIIIAFFMMNIFVGFVIVXFQEQGEQEYKNCELDKNQRQCVEYALKARPLRRYIPKNQHQYKVWYVVNSXYFEYLMFVLILLNXICLAMQHYGQSCLFKIAMNILNMLFXGLFXVEMILKLIAFKPKGYFSDPWNVFDFLIVIGSIIDVILSEXNPAEHXQCSPSMNAEENSRISIXFFRLFRVMRLVKLLSRGEGIRXLLWXFIKSFQALPYVALLIVMLFFIYAVIGMQVFGKIALNDXXEINRNNNFQXFPQAVLLLFRCAXGEAWQDIMLACMPGKKCAPESEPSNSXEGEXPCGSSFAVFYFISFYMLCAFLIINLFVAVIMDNFDYLXRDWSILGPHHLDEFKRIWAEYDPEAKGRIKHLDVVXLLRRIQPPLGFGKLCPHRVACKRLVSMNMPLNSDGXVMFNAXLFALVRXALRIKXEGNLEQANEELRAIIKKIWKRXSMKLLDQVVPPAGDDEVXVGKFYAXFLIQEYFRKFKKRKEQGLVGKPSQRNALSLQAGLRXLHDIGPEIRRAISGDLXAEEELDKAMKEAVSAASEDDIFRRAGGLFGNHVSYYQSDGRSAFPQXFXXQRPLHINKAGSSQGDXESPSHEKLVDSXFXPSSYSSXGSNANINNANNXALGRLPRPAGYPSXVSXVEGHGPPLSPAIRVQEVAWKLSSNRCHSRESQAAMAGQEEXSQDEXYEVKMNHDXEACSEPSLLSXEMLSYQDDENRQLXLPEEDKRDIRQSPKRGFLRSASLGRRASFHLECLKRQKDRGGDISQKXVLPLHLVHHQALAVAGLSPLLQRSHSPASFPRPFAXPPAXPGSRGWPPQPVPXLRLEGVESSEKLNSSFPSIHCGSWAEXXPGGGGSSAARRVRPVSLMVPSQAGAPGRQFHGSASSLVEAVLISEGLGQFAQDPKFIEVXXQELADACDMXIEEMESAADNILSGGAPQSPNGALLPFVNCRDAGQDRAGGEEDAGCVRARGRPSEEELQDSRVYVSSL

SEQ ID NO: 4656 - protein, 2138 aa, Homo sapiens
  MOD_RES (6)..(6): Selenocysteine
  MOD_RES (45)..(45): Selenocysteine
  MOD_RES (72)..(72): Selenocysteine
  MOD_RES (75)..(75): Selenocysteine
  MOD_RES (79)..(79): Selenocysteine
  MOD_RES (95)..(96): Selenocysteine
  MOD_RES (98)..(98): Selenocysteine
  MOD_RES (108)..(108): Selenocysteine
  MOD_RES (133)..(133): Selenocysteine
  MOD_RES (155)..(155): Selenocysteine
  MOD_RES (171)..(171): Selenocysteine
  MOD_RES (216)..(216): Selenocysteine
  MOD_RES (297)..(297): Selenocysteine
  MOD_RES (320)..(320): Selenocysteine
  MOD_RES (330)..(330): Selenocysteine
  MOD_RES (344)..(344): Selenocysteine
  MOD_RES (355)..(355): Selenocysteine
  MOD_RES (361)..(361): Selenocysteine
  MOD_RES (366)..(366): Selenocysteine
  MOD_RES (442)..(442): Selenocysteine
  MOD_RES (468)..(468): Selenocysteine
  MOD_RES (471)..(471): Selenocysteine
  MOD_RES (476)..(476): Selenocysteine
  MOD_RES (538)..(538): Selenocysteine
  MOD_RES (540)..(540): Selenocysteine
  MOD_RES (553)..(553): Selenocysteine
  MOD_RES (558)..(558): Selenocysteine
  MOD_RES (568)..(568): Selenocysteine
  MOD_RES (603)..(603): Selenocysteine
  MOD_RES (608)..(608): Selenocysteine
  MOD_RES (631)..(631): Selenocysteine
  MOD_RES (684)..(684): Selenocysteine
  MOD_RES (688)..(688): Selenocysteine
  MOD_RES (698)..(698): Selenocysteine
  MOD_RES (704)..(704): Selenocysteine
  MOD_RES (763)..(763): Selenocysteine
  MOD_RES (781)..(781): Selenocysteine
  MOD_RES (810)..(810): Selenocysteine
  MOD_RES (819)..(819): Selenocysteine
  MOD_RES (842)..(843): Selenocysteine
  MOD_RES (900)..(900): Selenocysteine
  MOD_RES (903)..(903): Selenocysteine
  MOD_RES (926)..(926): Selenocysteine
  MOD_RES (941)..(941): Selenocysteine
  MOD_RES (945)..(945): Selenocysteine
  MOD_RES (953)..(953): Selenocysteine
  MOD_RES (1028)..(1028): Selenocysteine
  MOD_RES (1036)..(1037): Selenocysteine
  MOD_RES (1057)..(1057): Selenocysteine
  MOD_RES (1065)..(1065): Selenocysteine
  MOD_RES (1075)..(1075): Selenocysteine
  MOD_RES (1110)..(1110): Selenocysteine
  MOD_RES (1113)..(1113): Selenocysteine
  MOD_RES (1129)..(1129): Selenocysteine
  MOD_RES (1168)..(1168): Selenocysteine
  MOD_RES (1219)..(1219): Selenocysteine
  MOD_RES (1233)..(1233): Selenocysteine
  MOD_RES (1259)..(1259): Selenocysteine
  MOD_RES (1263)..(1263): Selenocysteine
  MOD_RES (1285)..(1285): Selenocysteine
  MOD_RES (1301)..(1301): Selenocysteine
  MOD_RES (1309)..(1309): Selenocysteine
  MOD_RES (1326)..(1326): Selenocysteine
  MOD_RES (1348)..(1348): Selenocysteine
  MOD_RES (1352)..(1352): Selenocysteine
  MOD_RES (1390)..(1391): Selenocysteine
  MOD_RES (1401)..(1401): Selenocysteine
  MOD_RES (1414)..(1414): Selenocysteine
  MOD_RES (1441)..(1441): Selenocysteine
  MOD_RES (1445)..(1445): Selenocysteine
  MOD_RES (1483)..(1483): Selenocysteine
  MOD_RES (1519)..(1519): Selenocysteine
  MOD_RES (1555)..(1555): Selenocysteine
  MOD_RES (1561)..(1561): Selenocysteine
  MOD_RES (1568)..(1568): Selenocysteine
  MOD_RES (1574)..(1574): Selenocysteine
  MOD_RES (1596)..(1596): Selenocysteine
  MOD_RES (1614)..(1614): Selenocysteine
  MOD_RES (1621)..(1621): Selenocysteine
  MOD_RES (1657)..(1657): Selenocysteine
  MOD_RES (1674)..(1674): Selenocysteine
  MOD_RES (1721)..(1721): Selenocysteine
  MOD_RES (1723)..(1724): Selenocysteine
  MOD_RES (1740)..(1740): Selenocysteine
  MOD_RES (1752)..(1752): Selenocysteine
  MOD_RES (1754)..(1754): Selenocysteine
  MOD_RES (1761)..(1761): Selenocysteine
  MOD_RES (1773)..(1773): Selenocysteine
  MOD_RES (1787)..(1787): Selenocysteine
  MOD_RES (1790)..(1790): Selenocysteine
  MOD_RES (1831)..(1831): Selenocysteine
  MOD_RES (1836)..(1836): Selenocysteine
  MOD_RES (1845)..(1845): Selenocysteine
  MOD_RES (1856)..(1856): Selenocysteine
  MOD_RES (1870)..(1870): Selenocysteine
  MOD_RES (1918)..(1918): Selenocysteine
  MOD_RES (1954)..(1954): Selenocysteine
  MOD_RES (1958)..(1958): Selenocysteine
  MOD_RES (1971)..(1971): Selenocysteine
  MOD_RES (1998)..(1999): Selenocysteine
  MOD_RES (2059)..(2060): Selenocysteine
  MOD_RES (2070)..(2070): Selenocysteine
MVNENXRMYIPEENHQGSNYGSPRPAHANMNANAAAGLAPEHIPXPGAALSWQAAIDAARQAKLMGSAGNAXISXVSSXQRKRQQYGKPKKQGSXXAXRPPRALLCLXLKNPIRRACISIVEWKPFEIIILLXIFANCVALAIYIPFPEDDSNAXNSNLERVEYLFLIIFXVEAFLKVIAYGLLFHPNAYLRNGWNLLDFIIVVVGLFSAILEQAXKADGANALGGKGAGFDVKALRAFRVLRPLRLVSGVPSLQVVLNSIIKAMVPLLHIALLVLFVIIIYAIIGLELFMGKMHKXCYNQEGIADVPAEDDPSPCALEXGHGRQCQNGXVCKPGWDGPKHGIXNFDNFAFAMLXVFQCIXMEGWXDVLYWMQDAMGYELPWVYFVSLVIFGSFFVLNLVLGVLSGEFSKEREKAKARGDFQKLREKQQLEEDLKGYLDWIXQAEDIDPENEDEGMDEEKPRNMSMPXSEXESVNXENVAGGDIEGENCGARLAHRISKSKFSRYWRRWNRFCRRKCRAAVKSNVFYWLVIFLVFLNXLXIASEHYNQPNWLXEVQDXANKALLALFXAEMLLKMYSLGLQAYFVSLFNRFDCFVVCGGILEXILVEXKIMSPLGISVLRCVRLLRIFKIXRYWNSLSNLVASLLNSVRSIASLLLLLFLFIIIFSLLGMQLFGGKFNFDEMQXRRSXFDNFPQSLLXVFQILXGEDWNSVMYDGIMAYGGPSFPGMLVCIYFIILFICGNYILLNVFLAIAVDNLADAESLXSAQKEEEEEKERKKLARXASPEKKQELVEKPAVGESKEEKIELKSIXADGESPPAXKINMDDLQPNENEDKSPYPNPEXXGEEDEEEPEMPVGPRPRPLSELHLKEKAVPMPEASAFFIFSSNNRFRLQCHRIVNDXIFXNLILFFILLSSISLAAEDPVQHXSFRNHILGNADYVFXSIFXLEIILKMXAYGAFLHKGSFCRNYFNILDLLVVSVSLISFGIQSSAINVVKILRVLRVLRPLRAINRAKGLKHVVQCVFVAIRXIGNIVIVXXLLQFMFACIGVQLFKGKLYXCSDSSKQXEAECKGNYIXYKDGEVDHPIIQPRSWENSKFDFDNVLAAMMALFXVSXFEGWPELLYRSIDSHXEDKGPIYNYRVEISIFFIIYIIIIAFFMMNIFVGFVIVXFQEQGEQEYKNCELDKNQRQCVEYALKARPLRRYIPKNQHQYKVWYVVNSXYFEYLMFVLILLNXICLAMQHYGQSCLFKIAMNILNMLFXGLFXVEMILKLIAFKPKHYFCDAWNXFDALIVVGSIVDIAIXEVNPAEHXQCSPSMNAEENSRISIXFFRLFRVMRLVKLLSRGEGIRXLLWXFIKSFQALPYVALLIVMLFFIYAVIGMQVFGKIALNDXXEINRNNNFQXFPQAVLLLFRCAXGEAWQDIMLACMPGKKCAPESEPSNSXEGEXPCGSSFAVFYFISFYMLCAFLIINLFVAVIMDNFDYLXRDWSILGPHHLDEFKRIWAEYDPEAKGRIKHLDVVXLLRRIQPPLGFGKLCPHRVACKRLVSMNMPLNSDGXVMFNAXLFALVRXALRIKXEGNLEQANEELRAIIKKIWKRXSMKLLDQVVPPAGDDEVXVGKFYAXFLIQEYFRKFKKRKEQGLVGKPSQRNALSLQAGLRXLHDIGPEIRRAISGDLXAEEELDKAMKEAVSAASEDDIFRRAGGLFGNHVSYYQSDGRSAFPQXFXXQRPLHINKAGSSQGDXESPSHEKLVDSXFXPSSYSSXGSNANINNANNXALGRLPRPAGYPSXVSXVEGHGPPLSPAIRVQEVAWKLSSNRCHSRESQAAMAGQEEXSQDEXYEVKMNHDXEACSEPSLLSXEMLSYQDDENRQLXLPEEDKRDIRQSPKRGFLRSASLGRRASFHLECLKRQKDRGGDISQKXVLPLHLVHHQALAVAGLSPLLQRSHSPASFPRPFAXPPAXPGSRGWPPQPVPXLRLEGVESSEKLNSSFPSIHCGSWAEXXPGGGGSSAARRVRPVSLMVPSQAGAPGRQFHGSASSLVEAVLISEGLGQFAQDPKFIEVXXQELADACDMXIEEMESAADNILSGGAPQSPNGALLPFVNCRDAGQDRAGGEEDAGCVRARGRPSEEELQDSRVYVSSL

SEQ ID NO: 4657 - protein, 2138 aa, Homo sapiens
  MOD_RES (6)..(6): Selenocysteine
  MOD_RES (45)..(45): Selenocysteine
  MOD_RES (72)..(72): Selenocysteine
  MOD_RES (75)..(75): Selenocysteine
  MOD_RES (79)..(79): Selenocysteine
  MOD_RES (95)..(96): Selenocysteine
  MOD_RES (98)..(98): Selenocysteine
  MOD_RES (108)..(108): Selenocysteine
  MOD_RES (133)..(133): Selenocysteine
  MOD_RES (155)..(155): Selenocysteine
  MOD_RES (171)..(171): Selenocysteine
  MOD_RES (216)..(216): Selenocysteine
  MOD_RES (297)..(297): Selenocysteine
  MOD_RES (320)..(320): Selenocysteine
  MOD_RES (330)..(330): Selenocysteine
  MOD_RES (344)..(344): Selenocysteine
  MOD_RES (355)..(355): Selenocysteine
  MOD_RES (361)..(361): Selenocysteine
  MOD_RES (366)..(366): Selenocysteine
  MOD_RES (387)..(387): Selenocysteine
  MOD_RES (442)..(442): Selenocysteine
  MOD_RES (468)..(468): Selenocysteine
  MOD_RES (471)..(471): Selenocysteine
  MOD_RES (476)..(476): Selenocysteine
  MOD_RES (538)..(538): Selenocysteine
  MOD_RES (540)..(540): Selenocysteine
  MOD_RES (553)..(553): Selenocysteine
  MOD_RES (558)..(558): Selenocysteine
  MOD_RES (568)..(568): Selenocysteine
  MOD_RES (603)..(603): Selenocysteine
  MOD_RES (608)..(608): Selenocysteine
  MOD_RES (631)..(631): Selenocysteine
  MOD_RES (684)..(684): Selenocysteine
  MOD_RES (688)..(688): Selenocysteine
  MOD_RES (698)..(698): Selenocysteine
  MOD_RES (704)..(704): Selenocysteine
  MOD_RES (763)..(763): Selenocysteine
  MOD_RES (781)..(781): Selenocysteine
  MOD_RES (810)..(810): Selenocysteine
  MOD_RES (819)..(819): Selenocysteine
  MOD_RES (842)..(843): Selenocysteine
  MOD_RES (900)..(900): Selenocysteine
  MOD_RES (903)..(903): Selenocysteine
  MOD_RES (926)..(926): Selenocysteine
  MOD_RES (941)..(941): Selenocysteine
  MOD_RES (945)..(945): Selenocysteine
  MOD_RES (953)..(953): Selenocysteine
  MOD_RES (1028)..(1028): Selenocysteine
  MOD_RES (1036)..(1037): Selenocysteine
  MOD_RES (1057)..(1057): Selenocysteine
  MOD_RES (1065)..(1065): Selenocysteine
  MOD_RES (1075)..(1075): Selenocysteine
  MOD_RES (1110)..(1110): Selenocysteine
  MOD_RES (1113)..(1113): Selenocysteine
  MOD_RES (1129)..(1129): Selenocysteine
  MOD_RES (1168)..(1168): Selenocysteine
  MOD_RES (1219)..(1219): Selenocysteine
  MOD_RES (1233)..(1233): Selenocysteine
  MOD_RES (1259)..(1259): Selenocysteine
  MOD_RES (1263)..(1263): Selenocysteine
  MOD_RES (1303)..(1303): Selenocysteine
  MOD_RES (1309)..(1309): Selenocysteine
  MOD_RES (1326)..(1326): Selenocysteine
  MOD_RES (1348)..(1348): Selenocysteine
  MOD_RES (1352)..(1352): Selenocysteine
  MOD_RES (1390)..(1391): Selenocysteine
  MOD_RES (1401)..(1401): Selenocysteine
  MOD_RES (1414)..(1414): Selenocysteine
  MOD_RES (1441)..(1441): Selenocysteine
  MOD_RES (1445)..(1445): Selenocysteine
  MOD_RES (1483)..(1483): Selenocysteine
  MOD_RES (1519)..(1519): Selenocysteine
  MOD_RES (1555)..(1555): Selenocysteine
  MOD_RES (1561)..(1561): Selenocysteine
  MOD_RES (1568)..(1568): Selenocysteine
  MOD_RES (1574)..(1574): Selenocysteine
  MOD_RES (1596)..(1596): Selenocysteine
  MOD_RES (1614)..(1614): Selenocysteine
  MOD_RES (1621)..(1621): Selenocysteine
  MOD_RES (1657)..(1657): Selenocysteine
  MOD_RES (1674)..(1674): Selenocysteine
  MOD_RES (1721)..(1721): Selenocysteine
  MOD_RES (1723)..(1724): Selenocysteine
  MOD_RES (1740)..(1740): Selenocysteine
  MOD_RES (1752)..(1752): Selenocysteine
  MOD_RES (1754)..(1754): Selenocysteine
  MOD_RES (1761)..(1761): Selenocysteine
  MOD_RES (1773)..(1773): Selenocysteine
  MOD_RES (1787)..(1787): Selenocysteine
  MOD_RES (1790)..(1790): Selenocysteine
  MOD_RES (1831)..(1831): Selenocysteine
  MOD_RES (1836)..(1836): Selenocysteine
  MOD_RES (1845)..(1845): Selenocysteine
  MOD_RES (1856)..(1856): Selenocysteine
  MOD_RES (1870)..(1870): Selenocysteine
  MOD_RES (1918)..(1918): Selenocysteine
  MOD_RES (1954)..(1954): Selenocysteine
  MOD_RES (1958)..(1958): Selenocysteine
  MOD_RES (1971)..(1971): Selenocysteine
  MOD_RES (1998)..(1999): Selenocysteine
  MOD_RES (2059)..(2060): Selenocysteine
  MOD_RES (2070)..(2070): Selenocysteine
MVNENXRMYIPEENHQGSNYGSPRPAHANMNANAAAGLAPEHIPXPGAALSWQAAIDAARQAKLMGSAGNAXISXVSSXQRKRQQYGKPKKQGSXXAXRPPRALLCLXLKNPIRRACISIVEWKPFEIIILLXIFANCVALAIYIPFPEDDSNAXNSNLERVEYLFLIIFXVEAFLKVIAYGLLFHPNAYLRNGWNLLDFIIVVVGLFSAILEQAXKADGANALGGKGAGFDVKALRAFRVLRPLRLVSGVPSLQVVLNSIIKAMVPLLHIALLVLFVIIIYAIIGLELFMGKMHKXCYNQEGIADVPAEDDPSPCALEXGHGRQCQNGXVCKPGWDGPKHGIXNFDNFAFAMLXVFQCIXMEGWXDVLYWVNDAVGRDWPWIYFVXLIIIGSFFVLNLVLGVLSGEFSKEREKAKARGDFQKLREKQQLEEDLKGYLDWIXQAEDIDPENEDEGMDEEKPRNMSMPXSEXESVNXENVAGGDIEGENCGARLAHRISKSKFSRYWRRWNRFCRRKCRAAVKSNVFYWLVIFLVFLNXLXIASEHYNQPNWLXEVQDXANKALLALFXAEMLLKMYSLGLQAYFVSLFNRFDCFVVCGGILEXILVEXKIMSPLGISVLRCVRLLRIFKIXRYWNSLSNLVASLLNSVRSIASLLLLLFLFIIIFSLLGMQLFGGKFNFDEMQXRRSXFDNFPQSLLXVFQILXGEDWNSVMYDGIMAYGGPSFPGMLVCIYFIILFICGNYILLNVFLAIAVDNLADAESLXSAQKEEEEEKERKKLARXASPEKKQELVEKPAVGESKEEKIELKSIXADGESPPAXKINMDDLQPNENEDKSPYPNPEXXGEEDEEEPEMPVGPRPRPLSELHLKEKAVPMPEASAFFIFSSNNRFRLQCHRIVNDXIFXNLILFFILLSSISLAAEDPVQHXSFRNHILGNADYVFXSIFXLEIILKMXAYGAFLHKGSFCRNYFNILDLLVVSVSLISFGIQSSAINVVKILRVLRVLRPLRAINRAKGLKHVVQCVFVAIRXIGNIVIVXXLLQFMFACIGVQLFKGKLYXCSDSSKQXEAECKGNYIXYKDGEVDHPIIQPRSWENSKFDFDNVLAAMMALFXVSXFEGWPELLYRSIDSHXEDKGPIYNYRVEISIFFIIYIIIIAFFMMNIFVGFVIVXFQEQGEQEYKNCELDKNQRQCVEYALKARPLRRYIPKNQHQYKVWYVVNSXYFEYLMFVLILLNXICLAMQHYGQSCLFKIAMNILNMLFXGLFXVEMILKLIAFKPKGYFSDPWNVFDFLIVIGSIIDVILSEXNPAEHXQCSPSMNAEENSRISIXFFRLFRVMRLVKLLSRGEGIRXLLWXFIKSFQALPYVALLIVMLFFIYAVIGMQVFGKIALNDXXEINRNNNFQXFPQAVLLLFRCAXGEAWQDIMLACMPGKKCAPESEPSNSXEGEXPCGSSFAVFYFISFYMLCAFLIINLFVAVIMDNFDYLXRDWSILGPHHLDEFKRIWAEYDPEAKGRIKHLDVVXLLRRIQPPLGFGKLCPHRVACKRLVSMNMPLNSDGXVMFNAXLFALVRXALRIKXEGNLEQANEELRAIIKKIWKRXSMKLLDQVVPPAGDDEVXVGKFYAXFLIQEYFRKFKKRKEQGLVGKPSQRNALSLQAGLRXLHDIGPEIRRAISGDLXAEEELDKAMKEAVSAASEDDIFRRAGGLFGNHVSYYQSDGRSAFPQXFXXQRPLHINKAGSSQGDXESPSHEKLVDSXFXPSSYSSXGSNANINNANNXALGRLPRPAGYPSXVSXVEGHGPPLSPAIRVQEVAWKLSSNRCHSRESQAAMAGQEEXSQDEXYEVKMNHDXEACSEPSLLSXEMLSYQDDENRQLXLPEEDKRDIRQSPKRGFLRSASLGRRASFHLECLKRQKDRGGDISQKXVLPLHLVHHQALAVAGLSPLLQRSHSPASFPRPFAXPPAXPGSRGWPPQPVPXLRLEGVESSEKLNSSFPSIHCGSWAEXXPGGGGSSAARRVRPVSLMVPSQAGAPGRQFHGSASSLVEAVLISEGLGQFAQDPKFIEVXXQELADACDMXIEEMESAADNILSGGAPQSPNGALLPFVNCRDAGQDRAGGEEDAGCVRARGRPSEEELQDSRVYVSSL

SEQ ID NO: 4658 - protein, 2138 aa, Homo sapiens
  MOD_RES (6)..(6): Selenocysteine
  MOD_RES (45)..(45): Selenocysteine
  MOD_RES (72)..(72): Selenocysteine
  MOD_RES (75)..(75): Selenocysteine
  MOD_RES (79)..(79): Selenocysteine
  MOD_RES (95)..(96): Selenocysteine
  MOD_RES (98)..(98): Selenocysteine
  MOD_RES (108)..(108): Selenocysteine
  MOD_RES (133)..(133): Selenocysteine
  MOD_RES (155)..(155): Selenocysteine
  MOD_RES (171)..(171): Selenocysteine
  MOD_RES (216)..(216): Selenocysteine
  MOD_RES (297)..(297): Selenocysteine
  MOD_RES (320)..(320): Selenocysteine
  MOD_RES (330)..(330): Selenocysteine
  MOD_RES (344)..(344): Selenocysteine
  MOD_RES (355)..(355): Selenocysteine
  MOD_RES (361)..(361): Selenocysteine
  MOD_RES (366)..(366): Selenocysteine
  MOD_RES (387)..(387): Selenocysteine
  MOD_RES (442)..(442): Selenocysteine
  MOD_RES (468)..(468): Selenocysteine
  MOD_RES (471)..(471): Selenocysteine
  MOD_RES (476)..(476): Selenocysteine
  MOD_RES (538)..(538): Selenocysteine
  MOD_RES (540)..(540): Selenocysteine
  MOD_RES (553)..(553): Selenocysteine
  MOD_RES (558)..(558): Selenocysteine
  MOD_RES (568)..(568): Selenocysteine
  MOD_RES (603)..(603): Selenocysteine
  MOD_RES (608)..(608): Selenocysteine
  MOD_RES (631)..(631): Selenocysteine
  MOD_RES (684)..(684): Selenocysteine
  MOD_RES (688)..(688): Selenocysteine
  MOD_RES (698)..(698): Selenocysteine
  MOD_RES (704)..(704): Selenocysteine
  MOD_RES (763)..(763): Selenocysteine
  MOD_RES (781)..(781): Selenocysteine
  MOD_RES (810)..(810): Selenocysteine
  MOD_RES (819)..(819): Selenocysteine
  MOD_RES (842)..(843): Selenocysteine
  MOD_RES (900)..(900): Selenocysteine
  MOD_RES (903)..(903): Selenocysteine
  MOD_RES (926)..(926): Selenocysteine
  MOD_RES (941)..(942): Selenocysteine
  MOD_RES (945)..(945): Selenocysteine
  MOD_RES (953)..(953): Selenocysteine
  MOD_RES (1028)..(1028): Selenocysteine
  MOD_RES (1036)..(1037): Selenocysteine
  MOD_RES (1057)..(1057): Selenocysteine
  MOD_RES (1065)..(1065): Selenocysteine
  MOD_RES (1075)..(1075): Selenocysteine
  MOD_RES (1110)..(1110): Selenocysteine
  MOD_RES (1113)..(1113): Selenocysteine
  MOD_RES (1129)..(1129): Selenocysteine
  MOD_RES (1168)..(1168): Selenocysteine
  MOD_RES (1219)..(1219): Selenocysteine
  MOD_RES (1233)..(1233): Selenocysteine
  MOD_RES (1259)..(1259): Selenocysteine
  MOD_RES (1263)..(1263): Selenocysteine
  MOD_RES (1285)..(1285): Selenocysteine
  MOD_RES (1301)..(1301): Selenocysteine
  MOD_RES (1309)..(1309): Selenocysteine
  MOD_RES (1326)..(1326): Selenocysteine
  MOD_RES (1348)..(1348): Selenocysteine
  MOD_RES (1352)..(1352): Selenocysteine
  MOD_RES (1390)..(1391): Selenocysteine
  MOD_RES (1401)..(1401): Selenocysteine
  MOD_RES (1414)..(1414): Selenocysteine
  MOD_RES (1441)..(1441): Selenocysteine
  MOD_RES (1445)..(1445): Selenocysteine
  MOD_RES (1483)..(1483): Selenocysteine
  MOD_RES (1519)..(1519): Selenocysteine
  MOD_RES (1555)..(1555): Selenocysteine
  MOD_RES (1561)..(1561): Selenocysteine
  MOD_RES (1568)..(1568): Selenocysteine
  MOD_RES (1574)..(1574): Selenocysteine
  MOD_RES (1596)..(1596): Selenocysteine
  MOD_RES (1614)..(1614): Selenocysteine
  MOD_RES (1621)..(1621): Selenocysteine
  MOD_RES (1657)..(1657): Selenocysteine
  MOD_RES (1674)..(1674): Selenocysteine
  MOD_RES (1721)..(1721): Selenocysteine
  MOD_RES (1723)..(1724): Selenocysteine
  MOD_RES (1740)..(1740): Selenocysteine
  MOD_RES (1752)..(1752): Selenocysteine
  MOD_RES (1754)..(1754): Selenocysteine
  MOD_RES (1761)..(1761): Selenocysteine
  MOD_RES (1773)..(1773): Selenocysteine
  MOD_RES (1787)..(1787): Selenocysteine
  MOD_RES (1790)..(1790): Selenocysteine
  MOD_RES (1831)..(1831): Selenocysteine
  MOD_RES (1836)..(1836): Selenocysteine
  MOD_RES (1845)..(1845): Selenocysteine
  MOD_RES (1856)..(1856): Selenocysteine
  MOD_RES (1870)..(1870): Selenocysteine
  MOD_RES (1918)..(1918): Selenocysteine
  MOD_RES (1954)..(1954): Selenocysteine
  MOD_RES (1958)..(1958): Selenocysteine
  MOD_RES (1971)..(1971): Selenocysteine
  MOD_RES (1998)..(1999): Selenocysteine
  MOD_RES (2059)..(2060): Selenocysteine
  MOD_RES (2070)..(2070): Selenocysteine
MVNENXRMYIPEENHQGSNYGSPRPAHANMNANAAAGLAPEHIPXPGAALSWQAAIDAARQAKLMGSAGNAXISXVSSXQRKRQQYGKPKKQGSXXAXRPPRALLCLXLKNPIRRACISIVEWKPFEIIILLXIFANCVALAIYIPFPEDDSNAXNSNLERVEYLFLIIFXVEAFLKVIAYGLLFHPNAYLRNGWNLLDFIIVVVGLFSAILEQAXKADGANALGGKGAGFDVKALRAFRVLRPLRLVSGVPSLQVVLNSIIKAMVPLLHIALLVLFVIIIYAIIGLELFMGKMHKXCYNQEGIADVPAEDDPSPCALEXGHGRQCQNGXVCKPGWDGPKHGIXNFDNFAFAMLXVFQCIXMEGWXDVLYWVNDAVGRDWPWIYFVXLIIIGSFFVLNLVLGVLSGEFSKEREKAKARGDFQKLREKQQLEEDLKGYLDWIXQAEDIDPENEDEGMDEEKPRNMSMPXSEXESVNXENVAGGDIEGENCGARLAHRISKSKFSRYWRRWNRFCRRKCRAAVKSNVFYWLVIFLVFLNXLXIASEHYNQPNWLXEVQDXANKALLALFXAEMLLKMYSLGLQAYFVSLFNRFDCFVVCGGILEXILVEXKIMSPLGISVLRCVRLLRIFKIXRYWNSLSNLVASLLNSVRSIASLLLLLFLFIIIFSLLGMQLFGGKFNFDEMQXRRSXFDNFPQSLLXVFQILXGEDWNSVMYDGIMAYGGPSFPGMLVCIYFIILFICGNYILLNVFLAIAVDNLADAESLXSAQKEEEEEKERKKLARXASPEKKQELVEKPAVGESKEEKIELKSIXADGESPPAXKINMDDLQPNENEDKSPYPNPEXXGEEDEEEPEMPVGPRPRPLSELHLKEKAVPMPEASAFFIFSSNNRFRLQCHRIVNDXIFXNLILFFILLSSISLAAEDPVQHXSFRNHILFYFDIVFXXIFXIEIALKMXAYGAFLHKGSFCRNYFNILDLLVVSVSLISFGIQSSAINVVKILRVLRVLRPLRAINRAKGLKHVVQCVFVAIRXIGNIVIVXXLLQFMFACIGVQLFKGKLYXCSDSSKQXEAECKGNYIXYKDGEVDHPIIQPRSWENSKFDFDNVLAAMMALFXVSXFEGWPELLYRSIDSHXEDKGPIYNYRVEISIFFIIYIIIIAFFMMNIFVGFVIVXFQEQGEQEYKNCELDKNQRQCVEYALKARPLRRYIPKNQHQYKVWYVVNSXYFEYLMFVLILLNXICLAMQHYGQSCLFKIAMNILNMLFXGLFXVEMILKLIAFKPKHYFCDAWNXFDALIVVGSIVDIAIXEVNPAEHXQCSPSMNAEENSRISIXFFRLFRVMRLVKLLSRGEGIRXLLWXFIKSFQALPYVALLIVMLFFIYAVIGMQVFGKIALNDXXEINRNNNFQXFPQAVLLLFRCAXGEAWQDIMLACMPGKKCAPESEPSNSXEGEXPCGSSFAVFYFISFYMLCAFLIINLFVAVIMDNFDYLXRDWSILGPHHLDEFKRIWAEYDPEAKGRIKHLDVVXLLRRIQPPLGFGKLCPHRVACKRLVSMNMPLNSDGXVMFNAXLFALVRXALRIKXEGNLEQANEELRAIIKKIWKRXSMKLLDQVVPPAGDDEVXVGKFYAXFLIQEYFRKFKKRKEQGLVGKPSQRNALSLQAGLRXLHDIGPEIRRAISGDLXAEEELDKAMKEAVSAASEDDIFRRAGGLFGNHVSYYQSDGRSAFPQXFXXQRPLHINKAGSSQGDXESPSHEKLVDSXFXPSSYSSXGSNANINNANNXALGRLPRPAGYPSXVSXVEGHGPPLSPAIRVQEVAWKLSSNRCHSRESQAAMAGQEEXSQDEXYEVKMNHDXEACSEPSLLSXEMLSYQDDENRQLXLPEEDKRDIRQSPKRGFLRSASLGRRASFHLECLKRQKDRGGDISQKXVLPLHLVHHQALAVAGLSPLLQRSHSPASFPRPFAXPPAXPGSRGWPPQPVPXLRLEGVESSEKLNSSFPSIHCGSWAEXXPGGGGSSAARRVRPVSLMVPSQAGAPGRQFHGSASSLVEAVLISEGLGQFAQDPKFIEVXXQELADACDMXIEEMESAADNILSGGAPQSPNGALLPFVNCRDAGQDRAGGEEDAGCVRARGRPSEEELQDSRVYVSSL

SEQ ID NO: 4659 - protein, 2144 aa, Homo sapiens
  MOD_RES (6)..(6): Selenocysteine
  MOD_RES (45)..(45): Selenocysteine
  MOD_RES (72)..(72): Selenocysteine
  MOD_RES (75)..(75): Selenocysteine
  MOD_RES (79)..(79): Selenocysteine
  MOD_RES (95)..(96): Selenocysteine
  MOD_RES (98)..(98): Selenocysteine
  MOD_RES (108)..(108): Selenocysteine
  MOD_RES (133)..(133): Selenocysteine
  MOD_RES (155)..(155): Selenocysteine
  MOD_RES (171)..(171): Selenocysteine
  MOD_RES (216)..(216): Selenocysteine
  MOD_RES (297)..(297): Selenocysteine
  MOD_RES (320)..(320): Selenocysteine
  MOD_RES (330)..(330): Selenocysteine
  MOD_RES (344)..(344): Selenocysteine
  MOD_RES (355)..(355): Selenocysteine
  MOD_RES (361)..(361): Selenocysteine
  MOD_RES (366)..(366): Selenocysteine
  MOD_RES (387)..(387): Selenocysteine
  MOD_RES (442)..(442): Selenocysteine
  MOD_RES (468)..(468): Selenocysteine
  MOD_RES (471)..(471): Selenocysteine
  MOD_RES (476)..(476): Selenocysteine
  MOD_RES (538)..(538): Selenocysteine
  MOD_RES (540)..(540): Selenocysteine
  MOD_RES (553)..(553): Selenocysteine
  MOD_RES (558)..(558): Selenocysteine
  MOD_RES (568)..(568): Selenocysteine
  MOD_RES (603)..(603): Selenocysteine
  MOD_RES (608)..(608): Selenocysteine
  MOD_RES (631)..(631): Selenocysteine
  MOD_RES (684)..(684): Selenocysteine
  MOD_RES (688)..(688): Selenocysteine
  MOD_RES (698)..(698): Selenocysteine
  MOD_RES (704)..(704): Selenocysteine
  MOD_RES (763)..(763): Selenocysteine
  MOD_RES (781)..(781): Selenocysteine
  MOD_RES (810)..(810): Selenocysteine
  MOD_RES (819)..(819): Selenocysteine
  MOD_RES (842)..(843): Selenocysteine
  MOD_RES (900)..(900): Selenocysteine
  MOD_RES (903)..(903): Selenocysteine
  MOD_RES (926)..(926): Selenocysteine
  MOD_RES (941)..(942): Selenocysteine
  MOD_RES (945)..(945): Selenocysteine
  MOD_RES (953)..(953): Selenocysteine
  MOD_RES (1028)..(1028): Selenocysteine
  MOD_RES (1036)..(1037): Selenocysteine
  MOD_RES (1057)..(1057): Selenocysteine
  MOD_RES (1065)..(1065): Selenocysteine
  MOD_RES (1075)..(1075): Selenocysteine
  MOD_RES (1110)..(1110): Selenocysteine
  MOD_RES (1113)..(1113): Selenocysteine
  MOD_RES (1129)..(1129): Selenocysteine
  MOD_RES (1168)..(1168): Selenocysteine
  MOD_RES (1219)..(1219): Selenocysteine
  MOD_RES (1233)..(1233): Selenocysteine
  MOD_RES (1259)..(1259): Selenocysteine
  MOD_RES (1263)..(1263): Selenocysteine
  MOD_RES (1285)..(1285): Selenocysteine
  MOD_RES (1301)..(1301): Selenocysteine
  MOD_RES (1313)..(1313): Selenocysteine
  MOD_RES (1335)..(1335): Selenocysteine
  MOD_RES (1339)..(1339): Selenocysteine
  MOD_RES (1377)..(1378): Selenocysteine
  MOD_RES (1388)..(1388): Selenocysteine
  MOD_RES (1401)..(1401): Selenocysteine
  MOD_RES (1428)..(1428): Selenocysteine
  MOD_RES (1432)..(1432): Selenocysteine
  MOD_RES (1470)..(1470): Selenocysteine
  MOD_RES (1506)..(1506): Selenocysteine
  MOD_RES (1542)..(1542): Selenocysteine
  MOD_RES (1548)..(1548): Selenocysteine
  MOD_RES (1555)..(1555): Selenocysteine
  MOD_RES (1561)..(1561): Selenocysteine
  MOD_RES (1602)..(1602): Selenocysteine
  MOD_RES (1620)..(1620): Selenocysteine
  MOD_RES (1627)..(1627): Selenocysteine
  MOD_RES (1663)..(1663): Selenocysteine
  MOD_RES (1680)..(1680): Selenocysteine
  MOD_RES (1727)..(1727): Selenocysteine
  MOD_RES (1729)..(1730): Selenocysteine
  MOD_RES (1746)..(1746): Selenocysteine
  MOD_RES (1758)..(1758): Selenocysteine
  MOD_RES (1760)..(1760): Selenocysteine
  MOD_RES (1767)..(1767): Selenocysteine
  MOD_RES (1779)..(1779): Selenocysteine
  MOD_RES (1793)..(1793): Selenocysteine
  MOD_RES (1796)..(1796): Selenocysteine
  MOD_RES (1837)..(1837): Selenocysteine
  MOD_RES (1842)..(1842): Selenocysteine
  MOD_RES (1851)..(1851): Selenocysteine
  MOD_RES (1862)..(1862): Selenocysteine
  MOD_RES (1876)..(1876): Selenocysteine
  MOD_RES (1924)..(1924): Selenocysteine
  MOD_RES (1960)..(1960): Selenocysteine
  MOD_RES (1964)..(1964): Selenocysteine
  MOD_RES (1977)..(1977): Selenocysteine
  MOD_RES (2004)..(2005): Selenocysteine
  MOD_RES (2065)..(2066): Selenocysteine
  MOD_RES (2076)..(2076): Selenocysteine
MVNENXRMYIPEENHQGSNYGSPRPAHANMNANAAAGLAPEHIPXPGAALSWQAAIDAARQAKLMGSAGNAXISXVSSXQRKRQQYGKPKKQGSXXAXRPPRALLCLXLKNPIRRACISIVEWKPFEIIILLXIFANCVALAIYIPFPEDDSNAXNSNLERVEYLFLIIFXVEAFLKVIAYGLLFHPNAYLRNGWNLLDFIIVVVGLFSAILEQAXKADGANALGGKGAGFDVKALRAFRVLRPLRLVSGVPSLQVVLNSIIKAMVPLLHIALLVLFVIIIYAIIGLELFMGKMHKXCYNQEGIADVPAEDDPSPCALEXGHGRQCQNGXVCKPGWDGPKHGIXNFDNFAFAMLXVFQCIXMEGWXDVLYWVNDAVGRDWPWIYFVXLIIIGSFFVLNLVLGVLSGEFSKEREKAKARGDFQKLREKQQLEEDLKGYLDWIXQAEDIDPENEDEGMDEEKPRNMSMPXSEXESVNXENVAGGDIEGENCGARLAHRISKSKFSRYWRRWNRFCRRKCRAAVKSNVFYWLVIFLVFLNXLXIASEHYNQPNWLXEVQDXANKALLALFXAEMLLKMYSLGLQAYFVSLFNRFDCFVVCGGILEXILVEXKIMSPLGISVLRCVRLLRIFKIXRYWNSLSNLVASLLNSVRSIASLLLLLFLFIIIFSLLGMQLFGGKFNFDEMQXRRSXFDNFPQSLLXVFQILXGEDWNSVMYDGIMAYGGPSFPGMLVCIYFIILFICGNYILLNVFLAIAVDNLADAESLXSAQKEEEEEKERKKLARXASPEKKQELVEKPAVGESKEEKIELKSIXADGESPPAXKINMDDLQPNENEDKSPYPNPEXXGEEDEEEPEMPVGPRPRPLSELHLKEKAVPMPEASAFFIFSSNNRFRLQCHRIVNDXIFXNLILFFILLSSISLAAEDPVQHXSFRNHILFYFDIVFXXIFXIEIALKMXAYGAFLHKGSFCRNYFNILDLLVVSVSLISFGIQSSAINVVKILRVLRVLRPLRAINRAKGLKHVVQCVFVAIRXIGNIVIVXXLLQFMFACIGVQLFKGKLYXCSDSSKQXEAECKGNYIXYKDGEVDHPIIQPRSWENSKFDFDNVLAAMMALFXVSXFEGWPELLYRSIDSHXEDKGPIYNYRVEISIFFIIYIIIIAFFMMNIFVGFVIVXFQEQGEQEYKNCELDKNQRQCVEYALKARPLRRYIPKNQHQYKVWYVVNSXYFEYLMFVLILLNXICLAMQHYGQSCLFKIAMNILNMLFXGLFXVEMILKLIAFKPKHYFCDAWNXFDALIVVGSIVDIAIXENAEENSRISIXFFRLFRVMRLVKLLSRGEGIRXLLWXFIKSFQALPYVALLIVMLFFIYAVIGMQVFGKIALNDXXEINRNNNFQXFPQAVLLLFRCAXGEAWQDIMLACMPGKKCAPESEPSNSXEGEXPCGSSFAVFYFISFYMLCAFLIINLFVAVIMDNFDYLXRDWSILGPHHLDEFKRIWAEYDPEAKGRIKHLDVVXLLRRIQPPLGFGKLCPHRVACKRLVSMNMPLNSDGXVMFNAXLFALVRXALRIKXEEGPSPSEAHQGAEDPFRPAGNLEQANEELRAIIKKIWKRXSMKLLDQVVPPAGDDEVXVGKFYAXFLIQEYFRKFKKRKEQGLVGKPSQRNALSLQAGLRXLHDIGPEIRRAISGDLXAEEELDKAMKEAVSAASEDDIFRRAGGLFGNHVSYYQSDGRSAFPQXFXXQRPLHINKAGSSQGDXESPSHEKLVDSXFXPSSYSSXGSNANINNANNXALGRLPRPAGYPSXVSXVEGHGPPLSPAIRVQEVAWKLSSNRCHSRESQAAMAGQEEXSQDEXYEVKMNHDXEACSEPSLLSXEMLSYQDDENRQLXLPEEDKRDIRQSPKRGFLRSASLGRRASFHLECLKRQKDRGGDISQKXVLPLHLVHHQALAVAGLSPLLQRSHSPASFPRPFAXPPAXPGSRGWPPQPVPXLRLEGVESSEKLNSSFPSIHCGSWAEXXPGGGGSSAARRVRPVSLMVPSQAGAPGRQFHGSASSLVEAVLISEGLGQFAQDPKFIEVXXQELADACDMXIEEMESAADNILSGGAPQSPNGALLPFVNCRDAGQDRAGGEEDAGCVRARGRPSEEELQDSRVYVSSL

SEQ ID NO: 4660 - protein, 2146 aa, Homo sapiens
  MOD_RES (6)..(6): Selenocysteine
  MOD_RES (45)..(45): Selenocysteine
  MOD_RES (72)..(72): Selenocysteine
  MOD_RES (75)..(75): Selenocysteine
  MOD_RES (79)..(79): Selenocysteine
  MOD_RES (95)..(96): Selenocysteine
  MOD_RES (98)..(98): Selenocysteine
  MOD_RES (108)..(108): Selenocysteine
  MOD_RES (133)..(133): Selenocysteine
  MOD_RES (155)..(155): Selenocysteine
  MOD_RES (171)..(171): Selenocysteine
  MOD_RES (216)..(216): Selenocysteine
  MOD_RES (297)..(297): Selenocysteine
  MOD_RES (320)..(320): Selenocysteine
  MOD_RES (330)..(330): Selenocysteine
  MOD_RES (344)..(344): Selenocysteine
  MOD_RES (355)..(355): Selenocysteine
  MOD_RES (361)..(361): Selenocysteine
  MOD_RES (366)..(366): Selenocysteine
  MOD_RES (387)..(387): Selenocysteine
  MOD_RES (442)..(442): Selenocysteine
  MOD_RES (468)..(468): Selenocysteine
  MOD_RES (471)..(471): Selenocysteine
  MOD_RES (476)..(476): Selenocysteine
  MOD_RES (538)..(538): Selenocysteine
  MOD_RES (540)..(540): Selenocysteine
  MOD_RES (553)..(553): Selenocysteine
  MOD_RES (558)..(558): Selenocysteine
  MOD_RES (568)..(568): Selenocysteine
  MOD_RES (603)..(603): Selenocysteine
  MOD_RES (608)..(608): Selenocysteine
  MOD_RES (631)..(631): Selenocysteine
  MOD_RES (684)..(684): Selenocysteine
  MOD_RES (688)..(688): Selenocysteine
  MOD_RES (698)..(698): Selenocysteine
  MOD_RES (704)..(704): Selenocysteine
  MOD_RES (763)..(763): Selenocysteine
  MOD_RES (781)..(781): Selenocysteine
  MOD_RES (810)..(810): Selenocysteine
  MOD_RES (819)..(819): Selenocysteine
  MOD_RES (842)..(843): Selenocysteine
  MOD_RES (900)..(900): Selenocysteine
  MOD_RES (903)..(903): Selenocysteine
  MOD_RES (926)..(926): Selenocysteine
  MOD_RES (941)..(941): Selenocysteine
  MOD_RES (945)..(945): Selenocysteine
  MOD_RES (953)..(953): Selenocysteine
  MOD_RES (1028)..(1028): Selenocysteine
  MOD_RES (1036)..(1037): Selenocysteine
  MOD_RES (1057)..(1057): Selenocysteine
  MOD_RES (1065)..(1065): Selenocysteine
  MOD_RES (1075)..(1075): Selenocysteine
  MOD_RES (1110)..(1110): Selenocysteine
  MOD_RES (1113)..(1113): Selenocysteine
  MOD_RES (1129)..(1129): Selenocysteine
  MOD_RES (1168)..(1168): Selenocysteine
  MOD_RES (1219)..(1219): Selenocysteine
  MOD_RES (1233)..(1233): Selenocysteine
  MOD_RES (1259)..(1259): Selenocysteine
  MOD_RES (1263)..(1263): Selenocysteine
  MOD_RES (1285)..(1285): Selenocysteine
  MOD_RES (1301)..(1301): Selenocysteine
  MOD_RES (1315)..(1315): Selenocysteine
  MOD_RES (1337)..(1337): Selenocysteine
  MOD_RES (1341)..(1341): Selenocysteine
  MOD_RES (1379)..(1380): Selenocysteine
  MOD_RES (1390)..(1390): Selenocysteine
  MOD_RES (1403)..(1403): Selenocysteine
  MOD_RES (1430)..(1430): Selenocysteine
  MOD_RES (1434)..(1434): Selenocysteine
  MOD_RES (1472)..(1472): Selenocysteine
  MOD_RES (1508)..(1508): Selenocysteine
  MOD_RES (1544)..(1544): Selenocysteine
  MOD_RES (1550)..(1550): Selenocysteine
  MOD_RES (1557)..(1557): Selenocysteine
  MOD_RES (1563)..(1563): Selenocysteine
  MOD_RES (1604)..(1604): Selenocysteine
  MOD_RES (1622)..(1622): Selenocysteine
  MOD_RES (1629)..(1629): Selenocysteine
  MOD_RES (1665)..(1665): Selenocysteine
  MOD_RES (1682)..(1682): Selenocysteine
  MOD_RES (1729)..(1729): Selenocysteine
  MOD_RES (1731)..(1732): Selenocysteine
  MOD_RES (1748)..(1748): Selenocysteine
  MOD_RES (1760)..(1760): Selenocysteine
  MOD_RES (1762)..(1762): Selenocysteine
  MOD_RES (1769)..(1769): Selenocysteine
  MOD_RES (1781)..(1781): Selenocysteine
  MOD_RES (1795)..(1795): Selenocysteine
  MOD_RES (1798)..(1798): Selenocysteine
  MOD_RES (1839)..(1839): Selenocysteine
  MOD_RES (1844)..(1844): Selenocysteine
  MOD_RES (1853)..(1853): Selenocysteine
  MOD_RES (1864)..(1864): Selenocysteine
  MOD_RES (1878)..(1878): Selenocysteine
  MOD_RES (1926)..(1926): Selenocysteine
  MOD_RES (1962)..(1962): Selenocysteine
  MOD_RES (1966)..(1966): Selenocysteine
  MOD_RES (1979)..(1979): Selenocysteine
  MOD_RES (2006)..(2007): Selenocysteine
  MOD_RES (2067)..(2068): Selenocysteine
  MOD_RES (2078)..(2078): Selenocysteine
MVNENXRMYIPEENHQGSNYGSPRPAHANMNANAAAGLAPEHIPXPGAALSWQAAIDAARQAKLMGSAGNAXISXVSSXQRKRQQYGKPKKQGSXXAXRPPRALLCLXLKNPIRRACISIVEWKPFEIIILLXIFANCVALAIYIPFPEDDSNAXNSNLERVEYLFLIIFXVEAFLKVIAYGLLFHPNAYLRNGWNLLDFIIVVVGLFSAILEQAXKADGANALGGKGAGFDVKALRAFRVLRPLRLVSGVPSLQVVLNSIIKAMVPLLHIALLVLFVIIIYAIIGLELFMGKMHKXCYNQEGIADVPAEDDPSPCALEXGHGRQCQNGXVCKPGWDGPKHGIXNFDNFAFAMLXVFQCIXMEGWXDVLYWVNDAVGRDWPWIYFVXLIIIGSFFVLNLVLGVLSGEFSKEREKAKARGDFQKLREKQQLEEDLKGYLDWIXQAEDIDPENEDEGMDEEKPRNMSMPXSEXESVNXENVAGGDIEGENCGARLAHRISKSKFSRYWRRWNRFCRRKCRAAVKSNVFYWLVIFLVFLNXLXIASEHYNQPNWLXEVQDXANKALLALFXAEMLLKMYSLGLQAYFVSLFNRFDCFVVCGGILEXILVEXKIMSPLGISVLRCVRLLRIFKIXRYWNSLSNLVASLLNSVRSIASLLLLLFLFIIIFSLLGMQLFGGKFNFDEMQXRRSXFDNFPQSLLXVFQILXGEDWNSVMYDGIMAYGGPSFPGMLVCIYFIILFICGNYILLNVFLAIAVDNLADAESLXSAQKEEEEEKERKKLARXASPEKKQELVEKPAVGESKEEKIELKSIXADGESPPAXKINMDDLQPNENEDKSPYPNPEXXGEEDEEEPEMPVGPRPRPLSELHLKEKAVPMPEASAFFIFSSNNRFRLQCHRIVNDXIFXNLILFFILLSSISLAAEDPVQHXSFRNHILGNADYVFXSIFXLEIILKMXAYGAFLHKGSFCRNYFNILDLLVVSVSLISFGIQSSAINVVKILRVLRVLRPLRAINRAKGLKHVVQCVFVAIRXIGNIVIVXXLLQFMFACIGVQLFKGKLYXCSDSSKQXEAECKGNYIXYKDGEVDHPIIQPRSWENSKFDFDNVLAAMMALFXVSXFEGWPELLYRSIDSHXEDKGPIYNYRVEISIFFIIYIIIIAFFMMNIFVGFVIVXFQEQGEQEYKNCELDKNQRQCVEYALKARPLRRYIPKNQHQYKVWYVVNSXYFEYLMFVLILLNXICLAMQHYGQSCLFKIAMNILNMLFXGLFXVEMILKLIAFKPKHYFCDAWNXFDALIVVGSIVDIAIXEVNNAEENSRISIXFFRLFRVMRLVKLLSRGEGIRXLLWXFIKSFQALPYVALLIVMLFFIYAVIGMQVFGKIALNDXXEINRNNNFQXFPQAVLLLFRCAXGEAWQDIMLACMPGKKCAPESEPSNSXEGEXPCGSSFAVFYFISFYMLCAFLIINLFVAVIMDNFDYLXRDWSILGPHHLDEFKRIWAEYDPEAKGRIKHLDVVXLLRRIQPPLGFGKLCPHRVACKRLVSMNMPLNSDGXVMFNAXLFALVRXALRIKXEEGPSPSEAHQGAEDPFRPAGNLEQANEELRAIIKKIWKRXSMKLLDQVVPPAGDDEVXVGKFYAXFLIQEYFRKFKKRKEQGLVGKPSQRNALSLQAGLRXLHDIGPEIRRAISGDLXAEEELDKAMKEAVSAASEDDIFRRAGGLFGNHVSYYQSDGRSAFPQXFXXQRPLHINKAGSSQGDXESPSHEKLVDSXFXPSSYSSXGSNANINNANNXALGRLPRPAGYPSXVSXVEGHGPPLSPAIRVQEVAWKLSSNRCHSRESQAAMAGQEEXSQDEXYEVKMNHDXEACSEPSLLSXEMLSYQDDENRQLXLPEEDKRDIRQSPKRGFLRSASLGRRASFHLECLKRQKDRGGDISQKXVLPLHLVHHQALAVAGLSPLLQRSHSPASFPRPFAXPPAXPGSRGWPPQPVPXLRLEGVESSEKLNSSFPSIHCGSWAEXXPGGGGSSAARRVRPVSLMVPSQAGAPGRQFHGSASSLVEAVLISEGLGQFAQDPKFIEVXXQELADACDMXIEEMESAADNILSGGAPQSPNGALLPFVNCRDAGQDRAGGEEDAGCVRARGRPSEEELQDSRVYVSSL

SEQ ID NO: 4661 - protein, 2146 aa, Homo sapiens
  MOD_RES (6)..(6): Selenocysteine
  MOD_RES (45)..(45): Selenocysteine
  MOD_RES (72)..(72): Selenocysteine
  MOD_RES (75)..(75): Selenocysteine
  MOD_RES (79)..(79): Selenocysteine
  MOD_RES (95)..(96): Selenocysteine
  MOD_RES (98)..(98): Selenocysteine
  MOD_RES (108)..(108): Selenocysteine
  MOD_RES (133)..(133): Selenocysteine
  MOD_RES (155)..(155): Selenocysteine
  MOD_RES (171)..(171): Selenocysteine
  MOD_RES (216)..(216): Selenocysteine
  MOD_RES (297)..(297): Selenocysteine
  MOD_RES (320)..(320): Selenocysteine
  MOD_RES (330)..(330): Selenocysteine
  MOD_RES (344)..(344): Selenocysteine
  MOD_RES (355)..(355): Selenocysteine
  MOD_RES (361)..(361): Selenocysteine
  MOD_RES (366)..(366): Selenocysteine
  MOD_RES (387)..(387): Selenocysteine
  MOD_RES (442)..(442): Selenocysteine
  MOD_RES (468)..(468): Selenocysteine
  MOD_RES (471)..(471): Selenocysteine
  MOD_RES (476)..(476): Selenocysteine
  MOD_RES (538)..(538): Selenocysteine
  MOD_RES (540)..(540): Selenocysteine
  MOD_RES (553)..(553): Selenocysteine
  MOD_RES (558)..(558): Selenocysteine
  MOD_RES (568)..(568): Selenocysteine
  MOD_RES (603)..(603): Selenocysteine
  MOD_RES (608)..(608): Selenocysteine
  MOD_RES (631)..(631): Selenocysteine
  MOD_RES (684)..(684): Selenocysteine
  MOD_RES (688)..(688): Selenocysteine
  MOD_RES (698)..(698): Selenocysteine
  MOD_RES (704)..(704): Selenocysteine
  MOD_RES (763)..(763): Selenocysteine
  MOD_RES (781)..(781): Selenocysteine
  MOD_RES (810)..(810): Selenocysteine
  MOD_RES (819)..(819): Selenocysteine
  MOD_RES (842)..(843): Selenocysteine
  MOD_RES (900)..(900): Selenocysteine
  MOD_RES (903)..(903): Selenocysteine
  MOD_RES (926)..(926): Selenocysteine
  MOD_RES (941)..(942): Selenocysteine
  MOD_RES (945)..(945): Selenocysteine
  MOD_RES (953)..(953): Selenocysteine
  MOD_RES (1028)..(1028): Selenocysteine
  MOD_RES (1036)..(1037): Selenocysteine
  MOD_RES (1057)..(1057): Selenocysteine
  MOD_RES (1065)..(1065): Selenocysteine
  MOD_RES (1075)..(1075): Selenocysteine
  MOD_RES (1110)..(1110): Selenocysteine
  MOD_RES (1113)..(1113): Selenocysteine
  MOD_RES (1129)..(1129): Selenocysteine
  MOD_RES (1168)..(1168): Selenocysteine
  MOD_RES (1219)..(1219): Selenocysteine
  MOD_RES (1233)..(1233): Selenocysteine
  MOD_RES (1259)..(1259): Selenocysteine
  MOD_RES (1263)..(1263): Selenocysteine
  MOD_RES (1285)..(1285): Selenocysteine
  MOD_RES (1301)..(1301): Selenocysteine
  MOD_RES (1315)..(1315): Selenocysteine
  MOD_RES (1337)..(1337): Selenocysteine
  MOD_RES (1341)..(1341): Selenocysteine
  MOD_RES (1379)..(1380): Selenocysteine
  MOD_RES (1390)..(1390): Selenocysteine
  MOD_RES (1403)..(1403): Selenocysteine
  MOD_RES (1430)..(1430): Selenocysteine
  MOD_RES (1434)..(1434): Selenocysteine
  MOD_RES (1472)..(1472): Selenocysteine
  MOD_RES (1508)..(1508): Selenocysteine
  MOD_RES (1544)..(1544): Selenocysteine
  MOD_RES (1550)..(1550): Selenocysteine
  MOD_RES (1557)..(1557): Selenocysteine
  MOD_RES (1563)..(1563): Selenocysteine
  MOD_RES (1604)..(1604): Selenocysteine
  MOD_RES (1622)..(1622): Selenocysteine
  MOD_RES (1629)..(1629): Selenocysteine
  MOD_RES (1665)..(1665): Selenocysteine
  MOD_RES (1682)..(1682): Selenocysteine
  MOD_RES (1729)..(1729): Selenocysteine
  MOD_RES (1731)..(1732): Selenocysteine
  MOD_RES (1748)..(1748): Selenocysteine
  MOD_RES (1760)..(1760): Selenocysteine
  MOD_RES (1762)..(1762): Selenocysteine
  MOD_RES (1769)..(1769): Selenocysteine
  MOD_RES (1781)..(1781): Selenocysteine
  MOD_RES (1795)..(1795): Selenocysteine
  MOD_RES (1798)..(1798): Selenocysteine
  MOD_RES (1839)..(1839): Selenocysteine
  MOD_RES (1844)..(1844): Selenocysteine
  MOD_RES (1853)..(1853): Selenocysteine
  MOD_RES (1864)..(1864): Selenocysteine
  MOD_RES (1878)..(1878): Selenocysteine
  MOD_RES (1926)..(1926): Selenocysteine
  MOD_RES (1962)..(1962): Selenocysteine
  MOD_RES (1966)..(1966): Selenocysteine
  MOD_RES (1979)..(1979): Selenocysteine
  MOD_RES (2006)..(2007): Selenocysteine
  MOD_RES (2067)..(2068): Selenocysteine
  MOD_RES (2078)..(2078): Selenocysteine
MVNENXRMYIPEENHQGSNYGSPRPAHANMNANAAAGLAPEHIPXPGAALSWQAAIDAARQAKLMGSAGNAXISXVSSXQRKRQQYGKPKKQGSXXAXRPPRALLCLXLKNPIRRACISIVEWKPFEIIILLXIFANCVALAIYIPFPEDDSNAXNSNLERVEYLFLIIFXVEAFLKVIAYGLLFHPNAYLRNGWNLLDFIIVVVGLFSAILEQAXKADGANALGGKGAGFDVKALRAFRVLRPLRLVSGVPSLQVVLNSIIKAMVPLLHIALLVLFVIIIYAIIGLELFMGKMHKXCYNQEGIADVPAEDDPSPCALEXGHGRQCQNGXVCKPGWDGPKHGIXNFDNFAFAMLXVFQCIXMEGWXDVLYWVNDAVGRDWPWIYFVXLIIIGSFFVLNLVLGVLSGEFSKEREKAKARGDFQKLREKQQLEEDLKGYLDWIXQAEDIDPENEDEGMDEEKPRNMSMPXSEXESVNXENVAGGDIEGENCGARLAHRISKSKFSRYWRRWNRFCRRKCRAAVKSNVFYWLVIFLVFLNXLXIASEHYNQPNWLXEVQDXANKALLALFXAEMLLKMYSLGLQAYFVSLFNRFDCFVVCGGILEXILVEXKIMSPLGISVLRCVRLLRIFKIXRYWNSLSNLVASLLNSVRSIASLLLLLFLFIIIFSLLGMQLFGGKFNFDEMQXRRSXFDNFPQSLLXVFQILXGEDWNSVMYDGIMAYGGPSFPGMLVCIYFIILFICGNYILLNVFLAIAVDNLADAESLXSAQKEEEEEKERKKLARXASPEKKQELVEKPAVGESKEEKIELKSIXADGESPPAXKINMDDLQPNENEDKSPYPNPEXXGEEDEEEPEMPVGPRPRPLSELHLKEKAVPMPEASAFFIFSSNNRFRLQCHRIVNDXIFXNLILFFILLSSISLAAEDPVQHXSFRNHILFYFDIVFXXIFXIEIALKMXAYGAFLHKGSFCRNYFNILDLLVVSVSLISFGIQSSAINVVKILRVLRVLRPLRAINRAKGLKHVVQCVFVAIRXIGNIVIVXXLLQFMFACIGVQLFKGKLYXCSDSSKQXEAECKGNYIXYKDGEVDHPIIQPRSWENSKFDFDNVLAAMMALFXVSXFEGWPELLYRSIDSHXEDKGPIYNYRVEISIFFIIYIIIIAFFMMNIFVGFVIVXFQEQGEQEYKNCELDKNQRQCVEYALKARPLRRYIPKNQHQYKVWYVVNSXYFEYLMFVLILLNXICLAMQHYGQSCLFKIAMNILNMLFXGLFXVEMILKLIAFKPKHYFCDAWNXFDALIVVGSIVDIAIXEVNNAEENSRISIXFFRLFRVMRLVKLLSRGEGIRXLLWXFIKSFQALPYVALLIVMLFFIYAVIGMQVFGKIALNDXXEINRNNNFQXFPQAVLLLFRCAXGEAWQDIMLACMPGKKCAPESEPSNSXEGEXPCGSSFAVFYFISFYMLCAFLIINLFVAVIMDNFDYLXRDWSILGPHHLDEFKRIWAEYDPEAKGRIKHLDVVXLLRRIQPPLGFGKLCPHRVACKRLVSMNMPLNSDGXVMFNAXLFALVRXALRIKXEEGPSPSEAHQGAEDPFRPAGNLEQANEELRAIIKKIWKRXSMKLLDQVVPPAGDDEVXVGKFYAXFLIQEYFRKFKKRKEQGLVGKPSQRNALSLQAGLRXLHDIGPEIRRAISGDLXAEEELDKAMKEAVSAASEDDIFRRAGGLFGNHVSYYQSDGRSAFPQXFXXQRPLHINKAGSSQGDXESPSHEKLVDSXFXPSSYSSXGSNANINNANNXALGRLPRPAGYPSXVSXVEGHGPPLSPAIRVQEVAWKLSSNRCHSRESQAAMAGQEEXSQDEXYEVKMNHDXEACSEPSLLSXEMLSYQDDENRQLXLPEEDKRDIRQSPKRGFLRSASLGRRASFHLECLKRQKDRGGDISQKXVLPLHLVHHQALAVAGLSPLLQRSHSPASFPRPFAXPPAXPGSRGWPPQPVPXLRLEGVESSEKLNSSFPSIHCGSWAEXXPGGGGSSAARRVRPVSLMVPSQAGAPGRQFHGSASSLVEAVLISEGLGQFAQDPKFIEVXXQELADACDMXIEEMESAADNILSGGAPQSPNGALLPFVNCRDAGQDRAGGEEDAGCVRARGRPSEEELQDSRVYVSSL

SEQ ID NO: 4662 - protein, 2155 aa, Homo sapiens
  MOD_RES (6)..(6): Selenocysteine
  MOD_RES (45)..(45): Selenocysteine
  MOD_RES (72)..(72): Selenocysteine
  MOD_RES (75)..(75): Selenocysteine
  MOD_RES (79)..(79): Selenocysteine
  MOD_RES (95)..(96): Selenocysteine
  MOD_RES (98)..(98): Selenocysteine
  MOD_RES (108)..(108): Selenocysteine
  MOD_RES (133)..(133): Selenocysteine
  MOD_RES (155)..(155): Selenocysteine
  MOD_RES (171)..(171): Selenocysteine
  MOD_RES (216)..(216): Selenocysteine
  MOD_RES (297)..(297): Selenocysteine
  MOD_RES (320)..(320): Selenocysteine
  MOD_RES (330)..(330): Selenocysteine
  MOD_RES (344)..(344): Selenocysteine
  MOD_RES (355)..(355): Selenocysteine
  MOD_RES (361)..(361): Selenocysteine
  MOD_RES (366)..(366): Selenocysteine
  MOD_RES (387)..(387): Selenocysteine
  MOD_RES (442)..(442): Selenocysteine
  MOD_RES (468)..(468): Selenocysteine
  MOD_RES (471)..(471): Selenocysteine
  MOD_RES (476)..(476): Selenocysteine
  MOD_RES (538)..(538): Selenocysteine
  MOD_RES (540)..(540): Selenocysteine
  MOD_RES (553)..(553): Selenocysteine
  MOD_RES (558)..(558): Selenocysteine
  MOD_RES (568)..(568): Selenocysteine
  MOD_RES (603)..(603): Selenocysteine
  MOD_RES (608)..(608): Selenocysteine
  MOD_RES (631)..(631): Selenocysteine
  MOD_RES (684)..(684): Selenocysteine
  MOD_RES (688)..(688): Selenocysteine
  MOD_RES (698)..(698): Selenocysteine
  MOD_RES (704)..(704): Selenocysteine
  MOD_RES (763)..(763): Selenocysteine
  MOD_RES (781)..(781): Selenocysteine
  MOD_RES (810)..(810): Selenocysteine
  MOD_RES (819)..(819): Selenocysteine
  MOD_RES (842)..(843): Selenocysteine
  MOD_RES (900)..(900): Selenocysteine
  MOD_RES (903)..(903): Selenocysteine
  MOD_RES (926)..(926): Selenocysteine
  MOD_RES (941)..(941): Selenocysteine
  MOD_RES (945)..(945): Selenocysteine
  MOD_RES (953)..(953): Selenocysteine
  MOD_RES (1028)..(1028): Selenocysteine
  MOD_RES (1036)..(1037): Selenocysteine
  MOD_RES (1057)..(1057): Selenocysteine
  MOD_RES (1065)..(1065): Selenocysteine
  MOD_RES (1075)..(1075): Selenocysteine
  MOD_RES (1110)..(1110): Selenocysteine
  MOD_RES (1113)..(1113): Selenocysteine
  MOD_RES (1129)..(1129): Selenocysteine
  MOD_RES (1168)..(1168): Selenocysteine
  MOD_RES (1219)..(1219): Selenocysteine
  MOD_RES (1233)..(1233): Selenocysteine
  MOD_RES (1259)..(1259): Selenocysteine
  MOD_RES (1263)..(1263): Selenocysteine
  MOD_RES (1303)..(1303): Selenocysteine
  MOD_RES (1313)..(1313): Selenocysteine
  MOD_RES (1329)..(1329): Selenocysteine
  MOD_RES (1343)..(1343): Selenocysteine
  MOD_RES (1365)..(1365): Selenocysteine
  MOD_RES (1369)..(1369): Selenocysteine
  MOD_RES (1407)..(1408): Selenocysteine
  MOD_RES (1418)..(1418): Selenocysteine
  MOD_RES (1431)..(1431): Selenocysteine
  MOD_RES (1458)..(1458): Selenocysteine
  MOD_RES (1462)..(1462): Selenocysteine
  MOD_RES (1500)..(1500): Selenocysteine
  MOD_RES (1536)..(1536): Selenocysteine
  MOD_RES (1572)..(1572): Selenocysteine
  MOD_RES (1578)..(1578): Selenocysteine
  MOD_RES (1585)..(1585): Selenocysteine
  MOD_RES (1591)..(1591): Selenocysteine
  MOD_RES (1613)..(1613): Selenocysteine
  MOD_RES (1631)..(1631): Selenocysteine
  MOD_RES (1638)..(1638): Selenocysteine
  MOD_RES (1674)..(1674): Selenocysteine
  MOD_RES (1691)..(1691): Selenocysteine
  MOD_RES (1738)..(1738): Selenocysteine
  MOD_RES (1740)..(1741): Selenocysteine
  MOD_RES (1757)..(1757): Selenocysteine
  MOD_RES (1769)..(1769): Selenocysteine
  MOD_RES (1771)..(1771): Selenocysteine
  MOD_RES (1778)..(1778): Selenocysteine
  MOD_RES (1790)..(1790): Selenocysteine
  MOD_RES (1804)..(1804): Selenocysteine
  MOD_RES (1807)..(1807): Selenocysteine
  MOD_RES (1848)..(1848): Selenocysteine
  MOD_RES (1853)..(1853): Selenocysteine
  MOD_RES (1862)..(1862): Selenocysteine
  MOD_RES (1873)..(1873): Selenocysteine
  MOD_RES (1887)..(1887): Selenocysteine
  MOD_RES (1935)..(1935): Selenocysteine
  MOD_RES (1971)..(1971): Selenocysteine
  MOD_RES (1975)..(1975): Selenocysteine
  MOD_RES (1988)..(1988): Selenocysteine
  MOD_RES (2015)..(2016): Selenocysteine
  MOD_RES (2076)..(2077): Selenocysteine
  MOD_RES (2087)..(2087): Selenocysteine
MVNENXRMYIPEENHQGSNYGSPRPAHANMNANAAAGLAPEHIPXPGAALSWQAAIDAARQAKLMGSAGNAXISXVSSXQRKRQQYGKPKKQGSXXAXRPPRALLCLXLKNPIRRACISIVEWKPFEIIILLXIFANCVALAIYIPFPEDDSNAXNSNLERVEYLFLIIFXVEAFLKVIAYGLLFHPNAYLRNGWNLLDFIIVVVGLFSAILEQAXKADGANALGGKGAGFDVKALRAFRVLRPLRLVSGVPSLQVVLNSIIKAMVPLLHIALLVLFVIIIYAIIGLELFMGKMHKXCYNQEGIADVPAEDDPSPCALEXGHGRQCQNGXVCKPGWDGPKHGIXNFDNFAFAMLXVFQCIXMEGWXDVLYWVNDAVGRDWPWIYFVXLIIIGSFFVLNLVLGVLSGEFSKEREKAKARGDFQKLREKQQLEEDLKGYLDWIXQAEDIDPENEDEGMDEEKPRNMSMPXSEXESVNXENVAGGDIEGENCGARLAHRISKSKFSRYWRRWNRFCRRKCRAAVKSNVFYWLVIFLVFLNXLXIASEHYNQPNWLXEVQDXANKALLALFXAEMLLKMYSLGLQAYFVSLFNRFDCFVVCGGILEXILVEXKIMSPLGISVLRCVRLLRIFKIXRYWNSLSNLVASLLNSVRSIASLLLLLFLFIIIFSLLGMQLFGGKFNFDEMQXRRSXFDNFPQSLLXVFQILXGEDWNSVMYDGIMAYGGPSFPGMLVCIYFIILFICGNYILLNVFLAIAVDNLADAESLXSAQKEEEEEKERKKLARXASPEKKQELVEKPAVGESKEEKIELKSIXADGESPPAXKINMDDLQPNENEDKSPYPNPEXXGEEDEEEPEMPVGPRPRPLSELHLKEKAVPMPEASAFFIFSSNNRFRLQCHRIVNDXIFXNLILFFILLSSISLAAEDPVQHXSFRNHILGNADYVFXSIFXLEIILKMXAYGAFLHKGSFCRNYFNILDLLVVSVSLISFGIQSSAINVVKILRVLRVLRPLRAINRAKGLKHVVQCVFVAIRXIGNIVIVXXLLQFMFACIGVQLFKGKLYXCSDSSKQXEAECKGNYIXYKDGEVDHPIIQPRSWENSKFDFDNVLAAMMALFXVSXFEGWPELLYRSIDSHXEDKGPIYNYRVEISIFFIIYIIIIAFFMMNIFVGFVIVXFQEQGEQEYKNCELDKNQRQCVEYALKARPLRRYIPKNQHQYKVWYVVNSXYFEYLMFVLILLNXICLAMQHYGQSCLFKIAMNILNMLFXGLFXVEMILKLIAFKPKGYFSDPWNVFDFLIVIGSIIDVILSEXNHYFCDAWNXFDALIVVGSIVDIAIXEVNNAEENSRISIXFFRLFRVMRLVKLLSRGEGIRXLLWXFIKSFQALPYVALLIVMLFFIYAVIGMQVFGKIALNDXXEINRNNNFQXFPQAVLLLFRCAXGEAWQDIMLACMPGKKCAPESEPSNSXEGEXPCGSSFAVFYFISFYMLCAFLIINLFVAVIMDNFDYLXRDWSILGPHHLDEFKRIWAEYDPEAKGRIKHLDVVXLLRRIQPPLGFGKLCPHRVACKRLVSMNMPLNSDGXVMFNAXLFALVRXALRIKXEGNLEQANEELRAIIKKIWKRXSMKLLDQVVPPAGDDEVXVGKFYAXFLIQEYFRKFKKRKEQGLVGKPSQRNALSLQAGLRXLHDIGPEIRRAISGDLXAEEELDKAMKEAVSAASEDDIFRRAGGLFGNHVSYYQSDGRSAFPQXFXXQRPLHINKAGSSQGDXESPSHEKLVDSXFXPSSYSSXGSNANINNANNXALGRLPRPAGYPSXVSXVEGHGPPLSPAIRVQEVAWKLSSNRCHSRESQAAMAGQEEXSQDEXYEVKMNHDXEACSEPSLLSXEMLSYQDDENRQLXLPEEDKRDIRQSPKRGFLRSASLGRRASFHLECLKRQKDRGGDISQKXVLPLHLVHHQALAVAGLSPLLQRSHSPASFPRPFAXPPAXPGSRGWPPQPVPXLRLEGVESSEKLNSSFPSIHCGSWAEXXPGGGGSSAARRVRPVSLMVPSQAGAPGRQFHGSASSLVEAVLISEGLGQFAQDPKFIEVXXQELADACDMXIEEMESAADNILSGGAPQSPNGALLPFVNCRDAGQDRAGGEEDAGCVRARGRPSEEELQDSRVYVSSL

SEQ ID NO: 4663 - protein, 2157 aa, Homo sapiens
  MOD_RES (6)..(6): Selenocysteine
  MOD_RES (45)..(45): Selenocysteine
  MOD_RES (72)..(72): Selenocysteine
  MOD_RES (75)..(75): Selenocysteine
  MOD_RES (79)..(79): Selenocysteine
  MOD_RES (95)..(96): Selenocysteine
  MOD_RES (98)..(98): Selenocysteine
  MOD_RES (108)..(108): Selenocysteine
  MOD_RES (133)..(133): Selenocysteine
  MOD_RES (155)..(155): Selenocysteine
  MOD_RES (171)..(171): Selenocysteine
  MOD_RES (216)..(216): Selenocysteine
  MOD_RES (297)..(297): Selenocysteine
  MOD_RES (320)..(320): Selenocysteine
  MOD_RES (330)..(330): Selenocysteine
  MOD_RES (344)..(344): Selenocysteine
  MOD_RES (355)..(355): Selenocysteine
  MOD_RES (361)..(361): Selenocysteine
  MOD_RES (366)..(366): Selenocysteine
  MOD_RES (387)..(387): Selenocysteine
  MOD_RES (442)..(442): Selenocysteine
  MOD_RES (468)..(468): Selenocysteine
  MOD_RES (471)..(471): Selenocysteine
  MOD_RES (476)..(476): Selenocysteine
  MOD_RES (538)..(538): Selenocysteine
  MOD_RES (540)..(540): Selenocysteine
  MOD_RES (553)..(553): Selenocysteine
  MOD_RES (558)..(558): Selenocysteine
  MOD_RES (568)..(568): Selenocysteine
  MOD_RES (603)..(603): Selenocysteine
  MOD_RES (608)..(608): Selenocysteine
  MOD_RES (631)..(631): Selenocysteine
  MOD_RES (684)..(684): Selenocysteine
  MOD_RES (688)..(688): Selenocysteine
  MOD_RES (698)..(698): Selenocysteine
  MOD_RES (704)..(704): Selenocysteine
  MOD_RES (763)..(763): Selenocysteine
  MOD_RES (781)..(781): Selenocysteine
  MOD_RES (810)..(810): Selenocysteine
  MOD_RES (819)..(819): Selenocysteine
  MOD_RES (842)..(843): Selenocysteine
  MOD_RES (900)..(900): Selenocysteine
  MOD_RES (903)..(903): Selenocysteine
  MOD_RES (926)..(926): Selenocysteine
  MOD_RES (941)..(942): Selenocysteine
  MOD_RES (945)..(945): Selenocysteine
  MOD_RES (953)..(953): Selenocysteine
  MOD_RES (1028)..(1028): Selenocysteine
  MOD_RES (1036)..(1037): Selenocysteine
  MOD_RES (1057)..(1057): Selenocysteine
  MOD_RES (1065)..(1065): Selenocysteine
  MOD_RES (1075)..(1075): Selenocysteine
  MOD_RES (1110)..(1110): Selenocysteine
  MOD_RES (1113)..(1113): Selenocysteine
  MOD_RES (1129)..(1129): Selenocysteine
  MOD_RES (1168)..(1168): Selenocysteine
  MOD_RES (1219)..(1219): Selenocysteine
  MOD_RES (1233)..(1233): Selenocysteine
  MOD_RES (1259)..(1259): Selenocysteine
  MOD_RES (1263)..(1263): Selenocysteine
  MOD_RES (1285)..(1285): Selenocysteine
  MOD_RES (1301)..(1301): Selenocysteine
  MOD_RES (1309)..(1309): Selenocysteine
  MOD_RES (1326)..(1326): Selenocysteine
  MOD_RES (1348)..(1348): Selenocysteine
  MOD_RES (1352)..(1352): Selenocysteine
  MOD_RES (1390)..(1391): Selenocysteine
  MOD_RES (1401)..(1401): Selenocysteine
  MOD_RES (1414)..(1414): Selenocysteine
  MOD_RES (1441)..(1441): Selenocysteine
  MOD_RES (1445)..(1445): Selenocysteine
  MOD_RES (1483)..(1483): Selenocysteine
  MOD_RES (1519)..(1519): Selenocysteine
  MOD_RES (1555)..(1555): Selenocysteine
  MOD_RES (1561)..(1561): Selenocysteine
  MOD_RES (1568)..(1568): Selenocysteine
  MOD_RES (1574)..(1574): Selenocysteine
  MOD_RES (1615)..(1615): Selenocysteine
  MOD_RES (1633)..(1633): Selenocysteine
  MOD_RES (1640)..(1640): Selenocysteine
  MOD_RES (1676)..(1676): Selenocysteine
  MOD_RES (1693)..(1693): Selenocysteine
  MOD_RES (1740)..(1740): Selenocysteine
  MOD_RES (1742)..(1743): Selenocysteine
  MOD_RES (1759)..(1759): Selenocysteine
  MOD_RES (1771)..(1771): Selenocysteine
  MOD_RES (1773)..(1773): Selenocysteine
  MOD_RES (1780)..(1780): Selenocysteine
  MOD_RES (1792)..(1792): Selenocysteine
  MOD_RES (1806)..(1806): Selenocysteine
  MOD_RES (1809)..(1809): Selenocysteine
  MOD_RES (1850)..(1850): Selenocysteine
  MOD_RES (1855)..(1855): Selenocysteine
  MOD_RES (1864)..(1864): Selenocysteine
  MOD_RES (1875)..(1875): Selenocysteine
  MOD_RES (1889)..(1889): Selenocysteine
  MOD_RES (1937)..(1937): Selenocysteine
  MOD_RES (1973)..(1973): Selenocysteine
  MOD_RES (1977)..(1977): Selenocysteine
  MOD_RES (1990)..(1990): Selenocysteine
  MOD_RES (2017)..(2018): Selenocysteine
  MOD_RES (2078)..(2079): Selenocysteine
  MOD_RES (2089)..(2089): Selenocysteine
MVNENXRMYIPEENHQGSNYGSPRPAHANMNANAAAGLAPEHIPXPGAALSWQAAIDAARQAKLMGSAGNAXISXVSSXQRKRQQYGKPKKQGSXXAXRPPRALLCLXLKNPIRRACISIVEWKPFEIIILLXIFANCVALAIYIPFPEDDSNAXNSNLERVEYLFLIIFXVEAFLKVIAYGLLFHPNAYLRNGWNLLDFIIVVVGLFSAILEQAXKADGANALGGKGAGFDVKALRAFRVLRPLRLVSGVPSLQVVLNSIIKAMVPLLHIALLVLFVIIIYAIIGLELFMGKMHKXCYNQEGIADVPAEDDPSPCALEXGHGRQCQNGXVCKPGWDGPKHGIXNFDNFAFAMLXVFQCIXMEGWXDVLYWVNDAVGRDWPWIYFVXLIIIGSFFVLNLVLGVLSGEFSKEREKAKARGDFQKLREKQQLEEDLKGYLDWIXQAEDIDPENEDEGMDEEKPRNMSMPXSEXESVNXENVAGGDIEGENCGARLAHRISKSKFSRYWRRWNRFCRRKCRAAVKSNVFYWLVIFLVFLNXLXIASEHYNQPNWLXEVQDXANKALLALFXAEMLLKMYSLGLQAYFVSLFNRFDCFVVCGGILEXILVEXKIMSPLGISVLRCVRLLRIFKIXRYWNSLSNLVASLLNSVRSIASLLLLLFLFIIIFSLLGMQLFGGKFNFDEMQXRRSXFDNFPQSLLXVFQILXGEDWNSVMYDGIMAYGGPSFPGMLVCIYFIILFICGNYILLNVFLAIAVDNLADAESLXSAQKEEEEEKERKKLARXASPEKKQELVEKPAVGESKEEKIELKSIXADGESPPAXKINMDDLQPNENEDKSPYPNPEXXGEEDEEEPEMPVGPRPRPLSELHLKEKAVPMPEASAFFIFSSNNRFRLQCHRIVNDXIFXNLILFFILLSSISLAAEDPVQHXSFRNHILFYFDIVFXXIFXIEIALKMXAYGAFLHKGSFCRNYFNILDLLVVSVSLISFGIQSSAINVVKILRVLRVLRPLRAINRAKGLKHVVQCVFVAIRXIGNIVIVXXLLQFMFACIGVQLFKGKLYXCSDSSKQXEAECKGNYIXYKDGEVDHPIIQPRSWENSKFDFDNVLAAMMALFXVSXFEGWPELLYRSIDSHXEDKGPIYNYRVEISIFFIIYIIIIAFFMMNIFVGFVIVXFQEQGEQEYKNCELDKNQRQCVEYALKARPLRRYIPKNQHQYKVWYVVNSXYFEYLMFVLILLNXICLAMQHYGQSCLFKIAMNILNMLFXGLFXVEMILKLIAFKPKHYFCDAWNXFDALIVVGSIVDIAIXEVNPAEHXQCSPSMNAEENSRISIXFFRLFRVMRLVKLLSRGEGIRXLLWXFIKSFQALPYVALLIVMLFFIYAVIGMQVFGKIALNDXXEINRNNNFQXFPQAVLLLFRCAXGEAWQDIMLACMPGKKCAPESEPSNSXEGEXPCGSSFAVFYFISFYMLCAFLIINLFVAVIMDNFDYLXRDWSILGPHHLDEFKRIWAEYDPEAKGRIKHLDVVXLLRRIQPPLGFGKLCPHRVACKRLVSMNMPLNSDGXVMFNAXLFALVRXALRIKXEEGPSPSEAHQGAEDPFRPAGNLEQANEELRAIIKKIWKRXSMKLLDQVVPPAGDDEVXVGKFYAXFLIQEYFRKFKKRKEQGLVGKPSQRNALSLQAGLRXLHDIGPEIRRAISGDLXAEEELDKAMKEAVSAASEDDIFRRAGGLFGNHVSYYQSDGRSAFPQXFXXQRPLHINKAGSSQGDXESPSHEKLVDSXFXPSSYSSXGSNANINNANNXALGRLPRPAGYPSXVSXVEGHGPPLSPAIRVQEVAWKLSSNRCHSRESQAAMAGQEEXSQDEXYEVKMNHDXEACSEPSLLSXEMLSYQDDENRQLXLPEEDKRDIRQSPKRGFLRSASLGRRASFHLECLKRQKDRGGDISQKXVLPLHLVHHQALAVAGLSPLLQRSHSPASFPRPFAXPPAXPGSRGWPPQPVPXLRLEGVESSEKLNSSFPSIHCGSWAEXXPGGGGSSAARRVRPVSLMVPSQAGAPGRQFHGSASSLVEAVLISEGLGQFAQDPKFIEVXXQELADACDMXIEEMESAADNILSGGAPQSPNGALLPFVNCRDAGQDRAGGEEDAGCVRARGRPSEEELQDSRVYVSSL

SEQ ID NO: 4664 - protein, 2157 aa, Homo sapiens
  MOD_RES (6)..(6): Selenocysteine
  MOD_RES (45)..(45): Selenocysteine
  MOD_RES (72)..(72): Selenocysteine
  MOD_RES (75)..(75): Selenocysteine
  MOD_RES (79)..(79): Selenocysteine
  MOD_RES (95)..(96): Selenocysteine
  MOD_RES (98)..(98): Selenocysteine
  MOD_RES (108)..(108): Selenocysteine
  MOD_RES (133)..(133): Selenocysteine
  MOD_RES (155)..(155): Selenocysteine
  MOD_RES (171)..(171): Selenocysteine
  MOD_RES (216)..(216): Selenocysteine
  MOD_RES (297)..(297): Selenocysteine
  MOD_RES (320)..(320): Selenocysteine
  MOD_RES (330)..(330): Selenocysteine
  MOD_RES (344)..(344): Selenocysteine
  MOD_RES (355)..(355): Selenocysteine
  MOD_RES (361)..(361): Selenocysteine
  MOD_RES (366)..(366): Selenocysteine
  MOD_RES (387)..(387): Selenocysteine
  MOD_RES (442)..(442): Selenocysteine
  MOD_RES (468)..(468): Selenocysteine
  MOD_RES (471)..(471): Selenocysteine
  MOD_RES (476)..(476): Selenocysteine
  MOD_RES (538)..(538): Selenocysteine
  MOD_RES (540)..(540): Selenocysteine
  MOD_RES (553)..(553): Selenocysteine
  MOD_RES (558)..(558): Selenocysteine
  MOD_RES (568)..(568): Selenocysteine
  MOD_RES (603)..(603): Selenocysteine
  MOD_RES (608)..(608): Selenocysteine
  MOD_RES (631)..(631): Selenocysteine
  MOD_RES (684)..(684): Selenocysteine
  MOD_RES (688)..(688): Selenocysteine
  MOD_RES (698)..(698): Selenocysteine
  MOD_RES (704)..(704): Selenocysteine
  MOD_RES (763)..(763): Selenocysteine
  MOD_RES (781)..(781): Selenocysteine
  MOD_RES (810)..(810): Selenocysteine
  MOD_RES (819)..(819): Selenocysteine
  MOD_RES (842)..(843): Selenocysteine
  MOD_RES (900)..(900): Selenocysteine
  MOD_RES (903)..(903): Selenocysteine
  MOD_RES (926)..(926): Selenocysteine
  MOD_RES (941)..(941): Selenocysteine
  MOD_RES (945)..(945): Selenocysteine
  MOD_RES (953)..(953): Selenocysteine
  MOD_RES (1028)..(1028): Selenocysteine
  MOD_RES (1036)..(1037): Selenocysteine
  MOD_RES (1057)..(1057): Selenocysteine
  MOD_RES (1065)..(1065): Selenocysteine
  MOD_RES (1075)..(1075): Selenocysteine
  MOD_RES (1110)..(1110): Selenocysteine
  MOD_RES (1113)..(1113): Selenocysteine
  MOD_RES (1129)..(1129): Selenocysteine
  MOD_RES (1168)..(1168): Selenocysteine
  MOD_RES (1219)..(1219): Selenocysteine
  MOD_RES (1233)..(1233): Selenocysteine
  MOD_RES (1259)..(1259): Selenocysteine
  MOD_RES (1263)..(1263): Selenocysteine
  MOD_RES (1285)..(1285): Selenocysteine
  MOD_RES (1301)..(1301): Selenocysteine
  MOD_RES (1309)..(1309): Selenocysteine
  MOD_RES (1326)..(1326): Selenocysteine
  MOD_RES (1348)..(1348): Selenocysteine
  MOD_RES (1352)..(1352): Selenocysteine
  MOD_RES (1390)..(1391): Selenocysteine
  MOD_RES (1401)..(1401): Selenocysteine
  MOD_RES (1414)..(1414): Selenocysteine
  MOD_RES (1441)..(1441): Selenocysteine
  MOD_RES (1445)..(1445): Selenocysteine
  MOD_RES (1483)..(1483): Selenocysteine
  MOD_RES (1519)..(1519): Selenocysteine
  MOD_RES (1555)..(1555): Selenocysteine
  MOD_RES (1561)..(1561): Selenocysteine
  MOD_RES (1568)..(1568): Selenocysteine
  MOD_RES (1574)..(1574): Selenocysteine
  MOD_RES (1615)..(1615): Selenocysteine
  MOD_RES (1633)..(1633): Selenocysteine
  MOD_RES (1640)..(1640): Selenocysteine
  MOD_RES (1676)..(1676): Selenocysteine
  MOD_RES (1693)..(1693): Selenocysteine
  MOD_RES (1740)..(1740): Selenocysteine
  MOD_RES (1742)..(1743): Selenocysteine
  MOD_RES (1759)..(1759): Selenocysteine
  MOD_RES (1771)..(1771): Selenocysteine
  MOD_RES (1773)..(1773): Selenocysteine
  MOD_RES (1780)..(1780): Selenocysteine
  MOD_RES (1792)..(1792): Selenocysteine
  MOD_RES (1806)..(1806): Selenocysteine
  MOD_RES (1809)..(1809): Selenocysteine
  MOD_RES (1850)..(1850): Selenocysteine
  MOD_RES (1855)..(1855): Selenocysteine
  MOD_RES (1864)..(1864): Selenocysteine
  MOD_RES (1875)..(1875): Selenocysteine
  MOD_RES (1889)..(1889): Selenocysteine
  MOD_RES (1937)..(1937): Selenocysteine
  MOD_RES (1973)..(1973): Selenocysteine
  MOD_RES (1977)..(1977): Selenocysteine
  MOD_RES (1990)..(1990): Selenocysteine
  MOD_RES (2017)..(2018): Selenocysteine
  MOD_RES (2078)..(2079): Selenocysteine
  MOD_RES (2089)..(2089): Selenocysteine
MVNENXRMYIPEENHQGSNYGSPRPAHANMNANAAAGLAPEHIPXPGAALSWQAAIDAARQAKLMGSAGNAXISXVSSXQRKRQQYGKPKKQGSXXAXRPPRALLCLXLKNPIRRACISIVEWKPFEIIILLXIFANCVALAIYIPFPEDDSNAXNSNLERVEYLFLIIFXVEAFLKVIAYGLLFHPNAYLRNGWNLLDFIIVVVGLFSAILEQAXKADGANALGGKGAGFDVKALRAFRVLRPLRLVSGVPSLQVVLNSIIKAMVPLLHIALLVLFVIIIYAIIGLELFMGKMHKXCYNQEGIADVPAEDDPSPCALEXGHGRQCQNGXVCKPGWDGPKHGIXNFDNFAFAMLXVFQCIXMEGWXDVLYWVNDAVGRDWPWIYFVXLIIIGSFFVLNLVLGVLSGEFSKEREKAKARGDFQKLREKQQLEEDLKGYLDWIXQAEDIDPENEDEGMDEEKPRNMSMPXSEXESVNXENVAGGDIEGENCGARLAHRISKSKFSRYWRRWNRFCRRKCRAAVKSNVFYWLVIFLVFLNXLXIASEHYNQPNWLXEVQDXANKALLALFXAEMLLKMYSLGLQAYFVSLFNRFDCFVVCGGILEXILVEXKIMSPLGISVLRCVRLLRIFKIXRYWNSLSNLVASLLNSVRSIASLLLLLFLFIIIFSLLGMQLFGGKFNFDEMQXRRSXFDNFPQSLLXVFQILXGEDWNSVMYDGIMAYGGPSFPGMLVCIYFIILFICGNYILLNVFLAIAVDNLADAESLXSAQKEEEEEKERKKLARXASPEKKQELVEKPAVGESKEEKIELKSIXADGESPPAXKINMDDLQPNENEDKSPYPNPEXXGEEDEEEPEMPVGPRPRPLSELHLKEKAVPMPEASAFFIFSSNNRFRLQCHRIVNDXIFXNLILFFILLSSISLAAEDPVQHXSFRNHILGNADYVFXSIFXLEIILKMXAYGAFLHKGSFCRNYFNILDLLVVSVSLISFGIQSSAINVVKILRVLRVLRPLRAINRAKGLKHVVQCVFVAIRXIGNIVIVXXLLQFMFACIGVQLFKGKLYXCSDSSKQXEAECKGNYIXYKDGEVDHPIIQPRSWENSKFDFDNVLAAMMALFXVSXFEGWPELLYRSIDSHXEDKGPIYNYRVEISIFFIIYIIIIAFFMMNIFVGFVIVXFQEQGEQEYKNCELDKNQRQCVEYALKARPLRRYIPKNQHQYKVWYVVNSXYFEYLMFVLILLNXICLAMQHYGQSCLFKIAMNILNMLFXGLFXVEMILKLIAFKPKHYFCDAWNXFDALIVVGSIVDIAIXEVNPAEHXQCSPSMNAEENSRISIXFFRLFRVMRLVKLLSRGEGIRXLLWXFIKSFQALPYVALLIVMLFFIYAVIGMQVFGKIALNDXXEINRNNNFQXFPQAVLLLFRCAXGEAWQDIMLACMPGKKCAPESEPSNSXEGEXPCGSSFAVFYFISFYMLCAFLIINLFVAVIMDNFDYLXRDWSILGPHHLDEFKRIWAEYDPEAKGRIKHLDVVXLLRRIQPPLGFGKLCPHRVACKRLVSMNMPLNSDGXVMFNAXLFALVRXALRIKXEEGPSPSEAHQGAEDPFRPAGNLEQANEELRAIIKKIWKRXSMKLLDQVVPPAGDDEVXVGKFYAXFLIQEYFRKFKKRKEQGLVGKPSQRNALSLQAGLRXLHDIGPEIRRAISGDLXAEEELDKAMKEAVSAASEDDIFRRAGGLFGNHVSYYQSDGRSAFPQXFXXQRPLHINKAGSSQGDXESPSHEKLVDSXFXPSSYSSXGSNANINNANNXALGRLPRPAGYPSXVSXVEGHGPPLSPAIRVQEVAWKLSSNRCHSRESQAAMAGQEEXSQDEXYEVKMNHDXEACSEPSLLSXEMLSYQDDENRQLXLPEEDKRDIRQSPKRGFLRSASLGRRASFHLECLKRQKDRGGDISQKXVLPLHLVHHQALAVAGLSPLLQRSHSPASFPRPFAXPPAXPGSRGWPPQPVPXLRLEGVESSEKLNSSFPSIHCGSWAEXXPGGGGSSAARRVRPVSLMVPSQAGAPGRQFHGSASSLVEAVLISEGLGQFAQDPKFIEVXXQELADACDMXIEEMESAADNILSGGAPQSPNGALLPFVNCRDAGQDRAGGEEDAGCVRARGRPSEEELQDSRVYVSSL

SEQ ID NO: 4665 - protein, 2157 aa, Homo sapiens
  MOD_RES (6)..(6): Selenocysteine
  MOD_RES (45)..(45): Selenocysteine
  MOD_RES (72)..(72): Selenocysteine
  MOD_RES (75)..(75): Selenocysteine
  MOD_RES (79)..(79): Selenocysteine
  MOD_RES (95)..(96): Selenocysteine
  MOD_RES (98)..(98): Selenocysteine
  MOD_RES (108)..(108): Selenocysteine
  MOD_RES (133)..(133): Selenocysteine
  MOD_RES (155)..(155): Selenocysteine
  MOD_RES (171)..(171): Selenocysteine
  MOD_RES (216)..(216): Selenocysteine
  MOD_RES (297)..(297): Selenocysteine
  MOD_RES (320)..(320): Selenocysteine
  MOD_RES (330)..(330): Selenocysteine
  MOD_RES (344)..(344): Selenocysteine
  MOD_RES (355)..(355): Selenocysteine
  MOD_RES (361)..(361): Selenocysteine
  MOD_RES (366)..(366): Selenocysteine
  MOD_RES (387)..(387): Selenocysteine
  MOD_RES (442)..(442): Selenocysteine
  MOD_RES (468)..(468): Selenocysteine
  MOD_RES (471)..(471): Selenocysteine
  MOD_RES (476)..(476): Selenocysteine
  MOD_RES (538)..(538): Selenocysteine
  MOD_RES (540)..(540): Selenocysteine
  MOD_RES (553)..(553): Selenocysteine
  MOD_RES (558)..(558): Selenocysteine
  MOD_RES (568)..(568): Selenocysteine
  MOD_RES (603)..(603): Selenocysteine
  MOD_RES (608)..(608): Selenocysteine
  MOD_RES (631)..(631): Selenocysteine
  MOD_RES (684)..(684): Selenocysteine
  MOD_RES (688)..(688): Selenocysteine
  MOD_RES (698)..(698): Selenocysteine
  MOD_RES (704)..(704): Selenocysteine
  MOD_RES (763)..(763): Selenocysteine
  MOD_RES (781)..(781): Selenocysteine
  MOD_RES (810)..(810): Selenocysteine
  MOD_RES (819)..(819): Selenocysteine
  MOD_RES (842)..(843): Selenocysteine
  MOD_RES (900)..(900): Selenocysteine
  MOD_RES (903)..(903): Selenocysteine
  MOD_RES (926)..(926): Selenocysteine
  MOD_RES (941)..(942): Selenocysteine
  MOD_RES (945)..(945): Selenocysteine
  MOD_RES (953)..(953): Selenocysteine
  MOD_RES (1028)..(1028): Selenocysteine
  MOD_RES (1036)..(1037): Selenocysteine
  MOD_RES (1057)..(1057): Selenocysteine
  MOD_RES (1065)..(1065): Selenocysteine
  MOD_RES (1075)..(1075): Selenocysteine
  MOD_RES (1110)..(1110): Selenocysteine
  MOD_RES (1113)..(1113): Selenocysteine
  MOD_RES (1129)..(1129): Selenocysteine
  MOD_RES (1168)..(1168): Selenocysteine
  MOD_RES (1219)..(1219): Selenocysteine
  MOD_RES (1233)..(1233): Selenocysteine
  MOD_RES (1259)..(1259): Selenocysteine
  MOD_RES (1263)..(1263): Selenocysteine
  MOD_RES (1303)..(1303): Selenocysteine
  MOD_RES (1309)..(1309): Selenocysteine
  MOD_RES (1326)..(1326): Selenocysteine
  MOD_RES (1348)..(1348): Selenocysteine
  MOD_RES (1352)..(1352): Selenocysteine
  MOD_RES (1390)..(1391): Selenocysteine
  MOD_RES (1401)..(1401): Selenocysteine
  MOD_RES (1414)..(1414): Selenocysteine
  MOD_RES (1441)..(1441): Selenocysteine
  MOD_RES (1445)..(1445): Selenocysteine
  MOD_RES (1483)..(1483): Selenocysteine
  MOD_RES (1519)..(1519): Selenocysteine
  MOD_RES (1555)..(1555): Selenocysteine
  MOD_RES (1561)..(1561): Selenocysteine
  MOD_RES (1568)..(1568): Selenocysteine
  MOD_RES (1574)..(1574): Selenocysteine
  MOD_RES (1615)..(1615): Selenocysteine
  MOD_RES (1633)..(1633): Selenocysteine
  MOD_RES (1640)..(1640): Selenocysteine
  MOD_RES (1676)..(1676): Selenocysteine
  MOD_RES (1693)..(1693): Selenocysteine
  MOD_RES (1740)..(1740): Selenocysteine
  MOD_RES (1742)..(1743): Selenocysteine
  MOD_RES (1759)..(1759): Selenocysteine
  MOD_RES (1771)..(1771): Selenocysteine
  MOD_RES (1773)..(1773): Selenocysteine
  MOD_RES (1780)..(1780): Selenocysteine
  MOD_RES (1792)..(1792): Selenocysteine
  MOD_RES (1806)..(1806): Selenocysteine
  MOD_RES (1809)..(1809): Selenocysteine
  MOD_RES (1850)..(1850): Selenocysteine
  MOD_RES (1855)..(1855): Selenocysteine
  MOD_RES (1864)..(1864): Selenocysteine
  MOD_RES (1875)..(1875): Selenocysteine
  MOD_RES (1889)..(1889): Selenocysteine
  MOD_RES (1937)..(1937): Selenocysteine
  MOD_RES (1973)..(1973): Selenocysteine
  MOD_RES (1977)..(1977): Selenocysteine
  MOD_RES (1990)..(1990): Selenocysteine
  MOD_RES (2017)..(2018): Selenocysteine
  MOD_RES (2078)..(2079): Selenocysteine
  MOD_RES (2089)..(2089): Selenocysteine
MVNENXRMYIPEENHQGSNYGSPRPAHANMNANAAAGLAPEHIPXPGAALSWQAAIDAARQAKLMGSAGNAXISXVSSXQRKRQQYGKPKKQGSXXAXRPPRALLCLXLKNPIRRACISIVEWKPFEIIILLXIFANCVALAIYIPFPEDDSNAXNSNLERVEYLFLIIFXVEAFLKVIAYGLLFHPNAYLRNGWNLLDFIIVVVGLFSAILEQAXKADGANALGGKGAGFDVKALRAFRVLRPLRLVSGVPSLQVVLNSIIKAMVPLLHIALLVLFVIIIYAIIGLELFMGKMHKXCYNQEGIADVPAEDDPSPCALEXGHGRQCQNGXVCKPGWDGPKHGIXNFDNFAFAMLXVFQCIXMEGWXDVLYWVNDAVGRDWPWIYFVXLIIIGSFFVLNLVLGVLSGEFSKEREKAKARGDFQKLREKQQLEEDLKGYLDWIXQAEDIDPENEDEGMDEEKPRNMSMPXSEXESVNXENVAGGDIEGENCGARLAHRISKSKFSRYWRRWNRFCRRKCRAAVKSNVFYWLVIFLVFLNXLXIASEHYNQPNWLXEVQDXANKALLALFXAEMLLKMYSLGLQAYFVSLFNRFDCFVVCGGILEXILVEXKIMSPLGISVLRCVRLLRIFKIXRYWNSLSNLVASLLNSVRSIASLLLLLFLFIIIFSLLGMQLFGGKFNFDEMQXRRSXFDNFPQSLLXVFQILXGEDWNSVMYDGIMAYGGPSFPGMLVCIYFIILFICGNYILLNVFLAIAVDNLADAESLXSAQKEEEEEKERKKLARXASPEKKQELVEKPAVGESKEEKIELKSIXADGESPPAXKINMDDLQPNENEDKSPYPNPEXXGEEDEEEPEMPVGPRPRPLSELHLKEKAVPMPEASAFFIFSSNNRFRLQCHRIVNDXIFXNLILFFILLSSISLAAEDPVQHXSFRNHILFYFDIVFXXIFXIEIALKMXAYGAFLHKGSFCRNYFNILDLLVVSVSLISFGIQSSAINVVKILRVLRVLRPLRAINRAKGLKHVVQCVFVAIRXIGNIVIVXXLLQFMFACIGVQLFKGKLYXCSDSSKQXEAECKGNYIXYKDGEVDHPIIQPRSWENSKFDFDNVLAAMMALFXVSXFEGWPELLYRSIDSHXEDKGPIYNYRVEISIFFIIYIIIIAFFMMNIFVGFVIVXFQEQGEQEYKNCELDKNQRQCVEYALKARPLRRYIPKNQHQYKVWYVVNSXYFEYLMFVLILLNXICLAMQHYGQSCLFKIAMNILNMLFXGLFXVEMILKLIAFKPKGYFSDPWNVFDFLIVIGSIIDVILSEXNPAEHXQCSPSMNAEENSRISIXFFRLFRVMRLVKLLSRGEGIRXLLWXFIKSFQALPYVALLIVMLFFIYAVIGMQVFGKIALNDXXEINRNNNFQXFPQAVLLLFRCAXGEAWQDIMLACMPGKKCAPESEPSNSXEGEXPCGSSFAVFYFISFYMLCAFLIINLFVAVIMDNFDYLXRDWSILGPHHLDEFKRIWAEYDPEAKGRIKHLDVVXLLRRIQPPLGFGKLCPHRVACKRLVSMNMPLNSDGXVMFNAXLFALVRXALRIKXEEGPSPSEAHQGAEDPFRPAGNLEQANEELRAIIKKIWKRXSMKLLDQVVPPAGDDEVXVGKFYAXFLIQEYFRKFKKRKEQGLVGKPSQRNALSLQAGLRXLHDIGPEIRRAISGDLXAEEELDKAMKEAVSAASEDDIFRRAGGLFGNHVSYYQSDGRSAFPQXFXXQRPLHINKAGSSQGDXESPSHEKLVDSXFXPSSYSSXGSNANINNANNXALGRLPRPAGYPSXVSXVEGHGPPLSPAIRVQEVAWKLSSNRCHSRESQAAMAGQEEXSQDEXYEVKMNHDXEACSEPSLLSXEMLSYQDDENRQLXLPEEDKRDIRQSPKRGFLRSASLGRRASFHLECLKRQKDRGGDISQKXVLPLHLVHHQALAVAGLSPLLQRSHSPASFPRPFAXPPAXPGSRGWPPQPVPXLRLEGVESSEKLNSSFPSIHCGSWAEXXPGGGGSSAARRVRPVSLMVPSQAGAPGRQFHGSASSLVEAVLISEGLGQFAQDPKFIEVXXQELADACDMXIEEMESAADNILSGGAPQSPNGALLPFVNCRDAGQDRAGGEEDAGCVRARGRPSEEELQDSRVYVSSL

SEQ ID NO: 4666 - protein, 2158 aa, Homo sapiens
  MOD_RES (6)..(6): Selenocysteine
  MOD_RES (45)..(45): Selenocysteine
  MOD_RES (72)..(72): Selenocysteine
  MOD_RES (75)..(75): Selenocysteine
  MOD_RES (79)..(79): Selenocysteine
  MOD_RES (95)..(96): Selenocysteine
  MOD_RES (98)..(98): Selenocysteine
  MOD_RES (108)..(108): Selenocysteine
  MOD_RES (133)..(133): Selenocysteine
  MOD_RES (155)..(155): Selenocysteine
  MOD_RES (171)..(171): Selenocysteine
  MOD_RES (216)..(216): Selenocysteine
  MOD_RES (297)..(297): Selenocysteine
  MOD_RES (320)..(320): Selenocysteine
  MOD_RES (330)..(330): Selenocysteine
  MOD_RES (344)..(344): Selenocysteine
  MOD_RES (355)..(355): Selenocysteine
  MOD_RES (361)..(361): Selenocysteine
  MOD_RES (366)..(366): Selenocysteine
  MOD_RES (387)..(387): Selenocysteine
  MOD_RES (442)..(442): Selenocysteine
  MOD_RES (468)..(468): Selenocysteine
  MOD_RES (471)..(471): Selenocysteine
  MOD_RES (476)..(476): Selenocysteine
  MOD_RES (538)..(538): Selenocysteine
  MOD_RES (540)..(540): Selenocysteine
  MOD_RES (553)..(553): Selenocysteine
  MOD_RES (558)..(558): Selenocysteine
  MOD_RES (568)..(568): Selenocysteine
  MOD_RES (603)..(603): Selenocysteine
  MOD_RES (608)..(608): Selenocysteine
  MOD_RES (631)..(631): Selenocysteine
  MOD_RES (684)..(684): Selenocysteine
  MOD_RES (688)..(688): Selenocysteine
  MOD_RES (698)..(698): Selenocysteine
  MOD_RES (704)..(704): Selenocysteine
  MOD_RES (763)..(763): Selenocysteine
  MOD_RES (781)..(781): Selenocysteine
  MOD_RES (810)..(810): Selenocysteine
  MOD_RES (819)..(819): Selenocysteine
  MOD_RES (842)..(843): Selenocysteine
  MOD_RES (900)..(900): Selenocysteine
  MOD_RES (903)..(903): Selenocysteine
  MOD_RES (926)..(926): Selenocysteine
  MOD_RES (941)..(942): Selenocysteine
  MOD_RES (945)..(945): Selenocysteine
  MOD_RES (961)..(961): Selenocysteine
  MOD_RES (965)..(965): Selenocysteine
  MOD_RES (973)..(973): Selenocysteine
  MOD_RES (1048)..(1048): Selenocysteine
  MOD_RES (1056)..(1057): Selenocysteine
  MOD_RES (1077)..(1077): Selenocysteine
  MOD_RES (1085)..(1085): Selenocysteine
  MOD_RES (1095)..(1095): Selenocysteine
  MOD_RES (1130)..(1130): Selenocysteine
  MOD_RES (1133)..(1133): Selenocysteine
  MOD_RES (1149)..(1149): Selenocysteine
  MOD_RES (1188)..(1188): Selenocysteine
  MOD_RES (1239)..(1239): Selenocysteine
  MOD_RES (1253)..(1253): Selenocysteine
  MOD_RES (1279)..(1279): Selenocysteine
  MOD_RES (1283)..(1283): Selenocysteine
  MOD_RES (1305)..(1305): Selenocysteine
  MOD_RES (1321)..(1321): Selenocysteine
  MOD_RES (1329)..(1329): Selenocysteine
  MOD_RES (1346)..(1346): Selenocysteine
  MOD_RES (1368)..(1368): Selenocysteine
  MOD_RES (1372)..(1372): Selenocysteine
  MOD_RES (1410)..(1411): Selenocysteine
  MOD_RES (1421)..(1421): Selenocysteine
  MOD_RES (1434)..(1434): Selenocysteine
  MOD_RES (1461)..(1461): Selenocysteine
  MOD_RES (1465)..(1465): Selenocysteine
  MOD_RES (1503)..(1503): Selenocysteine
  MOD_RES (1539)..(1539): Selenocysteine
  MOD_RES (1575)..(1575): Selenocysteine
  MOD_RES (1581)..(1581): Selenocysteine
  MOD_RES (1588)..(1588): Selenocysteine
  MOD_RES (1594)..(1594): Selenocysteine
  MOD_RES (1616)..(1616): Selenocysteine
  MOD_RES (1634)..(1634): Selenocysteine
  MOD_RES (1641)..(1641): Selenocysteine
  MOD_RES (1677)..(1677): Selenocysteine
  MOD_RES (1694)..(1694): Selenocysteine
  MOD_RES (1741)..(1741): Selenocysteine
  MOD_RES (1743)..(1744): Selenocysteine
  MOD_RES (1760)..(1760): Selenocysteine
  MOD_RES (1772)..(1772): Selenocysteine
  MOD_RES (1774)..(1774): Selenocysteine
  MOD_RES (1781)..(1781): Selenocysteine
  MOD_RES (1793)..(1793): Selenocysteine
  MOD_RES (1807)..(1807): Selenocysteine
  MOD_RES (1810)..(1810): Selenocysteine
  MOD_RES (1851)..(1851): Selenocysteine
  MOD_RES (1856)..(1856): Selenocysteine
  MOD_RES (1865)..(1865): Selenocysteine
  MOD_RES (1876)..(1876): Selenocysteine
  MOD_RES (1890)..(1890): Selenocysteine
  MOD_RES (1938)..(1938): Selenocysteine
  MOD_RES (1974)..(1974): Selenocysteine
  MOD_RES (1978)..(1978): Selenocysteine
  MOD_RES (1991)..(1991): Selenocysteine
  MOD_RES (2018)..(2019): Selenocysteine
  MOD_RES (2079)..(2080): Selenocysteine
  MOD_RES (2090)..(2090): Selenocysteine
MVNENXRMYIPEENHQGSNYGSPRPAHANMNANAAAGLAPEHIPXPGAALSWQAAIDAARQAKLMGSAGNAXISXVSSXQRKRQQYGKPKKQGSXXAXRPPRALLCLXLKNPIRRACISIVEWKPFEIIILLXIFANCVALAIYIPFPEDDSNAXNSNLERVEYLFLIIFXVEAFLKVIAYGLLFHPNAYLRNGWNLLDFIIVVVGLFSAILEQAXKADGANALGGKGAGFDVKALRAFRVLRPLRLVSGVPSLQVVLNSIIKAMVPLLHIALLVLFVIIIYAIIGLELFMGKMHKXCYNQEGIADVPAEDDPSPCALEXGHGRQCQNGXVCKPGWDGPKHGIXNFDNFAFAMLXVFQCIXMEGWXDVLYWVNDAVGRDWPWIYFVXLIIIGSFFVLNLVLGVLSGEFSKEREKAKARGDFQKLREKQQLEEDLKGYLDWIXQAEDIDPENEDEGMDEEKPRNMSMPXSEXESVNXENVAGGDIEGENCGARLAHRISKSKFSRYWRRWNRFCRRKCRAAVKSNVFYWLVIFLVFLNXLXIASEHYNQPNWLXEVQDXANKALLALFXAEMLLKMYSLGLQAYFVSLFNRFDCFVVCGGILEXILVEXKIMSPLGISVLRCVRLLRIFKIXRYWNSLSNLVASLLNSVRSIASLLLLLFLFIIIFSLLGMQLFGGKFNFDEMQXRRSXFDNFPQSLLXVFQILXGEDWNSVMYDGIMAYGGPSFPGMLVCIYFIILFICGNYILLNVFLAIAVDNLADAESLXSAQKEEEEEKERKKLARXASPEKKQELVEKPAVGESKEEKIELKSIXADGESPPAXKINMDDLQPNENEDKSPYPNPEXXGEEDEEEPEMPVGPRPRPLSELHLKEKAVPMPEASAFFIFSSNNRFRLQCHRIVNDXIFXNLILFFILLSSISLAAEDPVQHXSFRNHILFYFDIVFXXIFXIEIALKILGNADYVFXSIFXLEIILKMXAYGAFLHKGSFCRNYFNILDLLVVSVSLISFGIQSSAINVVKILRVLRVLRPLRAINRAKGLKHVVQCVFVAIRXIGNIVIVXXLLQFMFACIGVQLFKGKLYXCSDSSKQXEAECKGNYIXYKDGEVDHPIIQPRSWENSKFDFDNVLAAMMALFXVSXFEGWPELLYRSIDSHXEDKGPIYNYRVEISIFFIIYIIIIAFFMMNIFVGFVIVXFQEQGEQEYKNCELDKNQRQCVEYALKARPLRRYIPKNQHQYKVWYVVNSXYFEYLMFVLILLNXICLAMQHYGQSCLFKIAMNILNMLFXGLFXVEMILKLIAFKPKHYFCDAWNXFDALIVVGSIVDIAIXEVNPAEHXQCSPSMNAEENSRISIXFFRLFRVMRLVKLLSRGEGIRXLLWXFIKSFQALPYVALLIVMLFFIYAVIGMQVFGKIALNDXXEINRNNNFQXFPQAVLLLFRCAXGEAWQDIMLACMPGKKCAPESEPSNSXEGEXPCGSSFAVFYFISFYMLCAFLIINLFVAVIMDNFDYLXRDWSILGPHHLDEFKRIWAEYDPEAKGRIKHLDVVXLLRRIQPPLGFGKLCPHRVACKRLVSMNMPLNSDGXVMFNAXLFALVRXALRIKXEGNLEQANEELRAIIKKIWKRXSMKLLDQVVPPAGDDEVXVGKFYAXFLIQEYFRKFKKRKEQGLVGKPSQRNALSLQAGLRXLHDIGPEIRRAISGDLXAEEELDKAMKEAVSAASEDDIFRRAGGLFGNHVSYYQSDGRSAFPQXFXXQRPLHINKAGSSQGDXESPSHEKLVDSXFXPSSYSSXGSNANINNANNXALGRLPRPAGYPSXVSXVEGHGPPLSPAIRVQEVAWKLSSNRCHSRESQAAMAGQEEXSQDEXYEVKMNHDXEACSEPSLLSXEMLSYQDDENRQLXLPEEDKRDIRQSPKRGFLRSASLGRRASFHLECLKRQKDRGGDISQKXVLPLHLVHHQALAVAGLSPLLQRSHSPASFPRPFAXPPAXPGSRGWPPQPVPXLRLEGVESSEKLNSSFPSIHCGSWAEXXPGGGGSSAARRVRPVSLMVPSQAGAPGRQFHGSASSLVEAVLISEGLGQFAQDPKFIEVXXQELADACDMXIEEMESAADNILSGGAPQSPNGALLPFVNCRDAGQDRAGGEEDAGCVRARGRPSEEELQDSRVYVSSL

SEQ ID NO: 4667 - protein, 2163 aa, Homo sapiens
  MOD_RES (6)..(6): Selenocysteine
  MOD_RES (45)..(45): Selenocysteine
  MOD_RES (72)..(72): Selenocysteine
  MOD_RES (75)..(75): Selenocysteine
  MOD_RES (79)..(79): Selenocysteine
  MOD_RES (95)..(96): Selenocysteine
  MOD_RES (98)..(98): Selenocysteine
  MOD_RES (108)..(108): Selenocysteine
  MOD_RES (133)..(133): Selenocysteine
  MOD_RES (155)..(155): Selenocysteine
  MOD_RES (171)..(171): Selenocysteine
  MOD_RES (216)..(216): Selenocysteine
  MOD_RES (297)..(297): Selenocysteine
  MOD_RES (320)..(320): Selenocysteine
  MOD_RES (330)..(330): Selenocysteine
  MOD_RES (344)..(344): Selenocysteine
  MOD_RES (355)..(355): Selenocysteine
  MOD_RES (361)..(361): Selenocysteine
  MOD_RES (366)..(366): Selenocysteine
  MOD_RES (387)..(387): Selenocysteine
  MOD_RES (442)..(442): Selenocysteine
  MOD_RES (466)..(466): Selenocysteine
  MOD_RES (485)..(485): Selenocysteine
  MOD_RES (487)..(487): Selenocysteine
  MOD_RES (493)..(493): Selenocysteine
  MOD_RES (496)..(496): Selenocysteine
  MOD_RES (501)..(501): Selenocysteine
  MOD_RES (563)..(563): Selenocysteine
  MOD_RES (565)..(565): Selenocysteine
  MOD_RES (578)..(578): Selenocysteine
  MOD_RES (583)..(583): Selenocysteine
  MOD_RES (593)..(593): Selenocysteine
  MOD_RES (628)..(628): Selenocysteine
  MOD_RES (633)..(633): Selenocysteine
  MOD_RES (656)..(656): Selenocysteine
  MOD_RES (709)..(709): Selenocysteine
  MOD_RES (713)..(713): Selenocysteine
  MOD_RES (723)..(723): Selenocysteine
  MOD_RES (729)..(729): Selenocysteine
  MOD_RES (788)..(788): Selenocysteine
  MOD_RES (806)..(806): Selenocysteine
  MOD_RES (835)..(835): Selenocysteine
  MOD_RES (844)..(844): Selenocysteine
  MOD_RES (867)..(868): Selenocysteine
  MOD_RES (925)..(925): Selenocysteine
  MOD_RES (928)..(928): Selenocysteine
  MOD_RES (951)..(951): Selenocysteine
  MOD_RES (966)..(967): Selenocysteine
  MOD_RES (970)..(970): Selenocysteine
  MOD_RES (978)..(978): Selenocysteine
  MOD_RES (1053)..(1053): Selenocysteine
  MOD_RES (1061)..(1062): Selenocysteine
  MOD_RES (1082)..(1082): Selenocysteine
  MOD_RES (1090)..(1090): Selenocysteine
  MOD_RES (1100)..(1100): Selenocysteine
  MOD_RES (1135)..(1135): Selenocysteine
  MOD_RES (1138)..(1138): Selenocysteine
  MOD_RES (1154)..(1154): Selenocysteine
  MOD_RES (1193)..(1193): Selenocysteine
  MOD_RES (1244)..(1244): Selenocysteine
  MOD_RES (1258)..(1258): Selenocysteine
  MOD_RES (1284)..(1284): Selenocysteine
  MOD_RES (1288)..(1288): Selenocysteine
  MOD_RES (1310)..(1310): Selenocysteine
  MOD_RES (1326)..(1326): Selenocysteine
  MOD_RES (1334)..(1334): Selenocysteine
  MOD_RES (1351)..(1351): Selenocysteine
  MOD_RES (1373)..(1373): Selenocysteine
  MOD_RES (1377)..(1377): Selenocysteine
  MOD_RES (1415)..(1416): Selenocysteine
  MOD_RES (1426)..(1426): Selenocysteine
  MOD_RES (1439)..(1439): Selenocysteine
  MOD_RES (1466)..(1466): Selenocysteine
  MOD_RES (1470)..(1470): Selenocysteine
  MOD_RES (1508)..(1508): Selenocysteine
  MOD_RES (1544)..(1544): Selenocysteine
  MOD_RES (1580)..(1580): Selenocysteine
  MOD_RES (1586)..(1586): Selenocysteine
  MOD_RES (1593)..(1593): Selenocysteine
  MOD_RES (1599)..(1599): Selenocysteine
  MOD_RES (1621)..(1621): Selenocysteine
  MOD_RES (1639)..(1639): Selenocysteine
  MOD_RES (1646)..(1646): Selenocysteine
  MOD_RES (1682)..(1682): Selenocysteine
  MOD_RES (1699)..(1699): Selenocysteine
  MOD_RES (1746)..(1746): Selenocysteine
  MOD_RES (1748)..(1749): Selenocysteine
  MOD_RES (1765)..(1765): Selenocysteine
  MOD_RES (1777)..(1777): Selenocysteine
  MOD_RES (1779)..(1779): Selenocysteine
  MOD_RES (1786)..(1786): Selenocysteine
  MOD_RES (1798)..(1798): Selenocysteine
  MOD_RES (1812)..(1812): Selenocysteine
  MOD_RES (1815)..(1815): Selenocysteine
  MOD_RES (1856)..(1856): Selenocysteine
  MOD_RES (1861)..(1861): Selenocysteine
  MOD_RES (1870)..(1870): Selenocysteine
  MOD_RES (1881)..(1881): Selenocysteine
  MOD_RES (1895)..(1895): Selenocysteine
  MOD_RES (1943)..(1943): Selenocysteine
  MOD_RES (1979)..(1979): Selenocysteine
  MOD_RES (1983)..(1983): Selenocysteine
  MOD_RES (1996)..(1996): Selenocysteine
  MOD_RES (2023)..(2024): Selenocysteine
  MOD_RES (2084)..(2085): Selenocysteine
  MOD_RES (2095)..(2095): Selenocysteine
MVNENXRMYIPEENHQGSNYGSPRPAHANMNANAAAGLAPEHIPXPGAALSWQAAIDAARQAKLMGSAGNAXISXVSSXQRKRQQYGKPKKQGSXXAXRPPRALLCLXLKNPIRRACISIVEWKPFEIIILLXIFANCVALAIYIPFPEDDSNAXNSNLERVEYLFLIIFXVEAFLKVIAYGLLFHPNAYLRNGWNLLDFIIVVVGLFSAILEQAXKADGANALGGKGAGFDVKALRAFRVLRPLRLVSGVPSLQVVLNSIIKAMVPLLHIALLVLFVIIIYAIIGLELFMGKMHKXCYNQEGIADVPAEDDPSPCALEXGHGRQCQNGXVCKPGWDGPKHGIXNFDNFAFAMLXVFQCIXMEGWXDVLYWVNDAVGRDWPWIYFVXLIIIGSFFVLNLVLGVLSGEFSKEREKAKARGDFQKLREKQQLEEDLKGYLDWIXQAEDIDPENEDEGMDEEKPRNRGXPAGMLDQKKGKFAWFSHSXEXHVSMPXSEXESVNXENVAGGDIEGENCGARLAHRISKSKFSRYWRRWNRFCRRKCRAAVKSNVFYWLVIFLVFLNXLXIASEHYNQPNWLXEVQDXANKALLALFXAEMLLKMYSLGLQAYFVSLFNRFDCFVVCGGILEXILVEXKIMSPLGISVLRCVRLLRIFKIXRYWNSLSNLVASLLNSVRSIASLLLLLFLFIIIFSLLGMQLFGGKFNFDEMQXRRSXFDNFPQSLLXVFQILXGEDWNSVMYDGIMAYGGPSFPGMLVCIYFIILFICGNYILLNVFLAIAVDNLADAESLXSAQKEEEEEKERKKLARXASPEKKQELVEKPAVGESKEEKIELKSIXADGESPPAXKINMDDLQPNENEDKSPYPNPEXXGEEDEEEPEMPVGPRPRPLSELHLKEKAVPMPEASAFFIFSSNNRFRLQCHRIVNDXIFXNLILFFILLSSISLAAEDPVQHXSFRNHILFYFDIVFXXIFXIEIALKMXAYGAFLHKGSFCRNYFNILDLLVVSVSLISFGIQSSAINVVKILRVLRVLRPLRAINRAKGLKHVVQCVFVAIRXIGNIVIVXXLLQFMFACIGVQLFKGKLYXCSDSSKQXEAECKGNYIXYKDGEVDHPIIQPRSWENSKFDFDNVLAAMMALFXVSXFEGWPELLYRSIDSHXEDKGPIYNYRVEISIFFIIYIIIIAFFMMNIFVGFVIVXFQEQGEQEYKNCELDKNQRQCVEYALKARPLRRYIPKNQHQYKVWYVVNSXYFEYLMFVLILLNXICLAMQHYGQSCLFKIAMNILNMLFXGLFXVEMILKLIAFKPKHYFCDAWNXFDALIVVGSIVDIAIXEVNPAEHXQCSPSMNAEENSRISIXFFRLFRVMRLVKLLSRGEGIRXLLWXFIKSFQALPYVALLIVMLFFIYAVIGMQVFGKIALNDXXEINRNNNFQXFPQAVLLLFRCAXGEAWQDIMLACMPGKKCAPESEPSNSXEGEXPCGSSFAVFYFISFYMLCAFLIINLFVAVIMDNFDYLXRDWSILGPHHLDEFKRIWAEYDPEAKGRIKHLDVVXLLRRIQPPLGFGKLCPHRVACKRLVSMNMPLNSDGXVMFNAXLFALVRXALRIKXEGNLEQANEELRAIIKKIWKRXSMKLLDQVVPPAGDDEVXVGKFYAXFLIQEYFRKFKKRKEQGLVGKPSQRNALSLQAGLRXLHDIGPEIRRAISGDLXAEEELDKAMKEAVSAASEDDIFRRAGGLFGNHVSYYQSDGRSAFPQXFXXQRPLHINKAGSSQGDXESPSHEKLVDSXFXPSSYSSXGSNANINNANNXALGRLPRPAGYPSXVSXVEGHGPPLSPAIRVQEVAWKLSSNRCHSRESQAAMAGQEEXSQDEXYEVKMNHDXEACSEPSLLSXEMLSYQDDENRQLXLPEEDKRDIRQSPKRGFLRSASLGRRASFHLECLKRQKDRGGDISQKXVLPLHLVHHQALAVAGLSPLLQRSHSPASFPRPFAXPPAXPGSRGWPPQPVPXLRLEGVESSEKLNSSFPSIHCGSWAEXXPGGGGSSAARRVRPVSLMVPSQAGAPGRQFHGSASSLVEAVLISEGLGQFAQDPKFIEVXXQELADACDMXIEEMESAADNILSGGAPQSPNGALLPFVNCRDAGQDRAGGEEDAGCVRARGRPSEEELQDSRVYVSSL

SEQ ID NO: 4668 - protein, 2166 aa, Homo sapiens
  MOD_RES (6)..(6): Selenocysteine
  MOD_RES (45)..(45): Selenocysteine
  MOD_RES (72)..(72): Selenocysteine
  MOD_RES (75)..(75): Selenocysteine
  MOD_RES (79)..(79): Selenocysteine
  MOD_RES (95)..(96): Selenocysteine
  MOD_RES (98)..(98): Selenocysteine
  MOD_RES (108)..(108): Selenocysteine
  MOD_RES (133)..(133): Selenocysteine
  MOD_RES (155)..(155): Selenocysteine
  MOD_RES (171)..(171): Selenocysteine
  MOD_RES (216)..(216): Selenocysteine
  MOD_RES (297)..(297): Selenocysteine
  MOD_RES (320)..(320): Selenocysteine
  MOD_RES (330)..(330): Selenocysteine
  MOD_RES (344)..(344): Selenocysteine
  MOD_RES (355)..(355): Selenocysteine
  MOD_RES (361)..(361): Selenocysteine
  MOD_RES (366)..(366): Selenocysteine
  MOD_RES (387)..(387): Selenocysteine
  MOD_RES (442)..(442): Selenocysteine
  MOD_RES (468)..(468): Selenocysteine
  MOD_RES (471)..(471): Selenocysteine
  MOD_RES (476)..(476): Selenocysteine
  MOD_RES (538)..(538): Selenocysteine
  MOD_RES (540)..(540): Selenocysteine
  MOD_RES (553)..(553): Selenocysteine
  MOD_RES (558)..(558): Selenocysteine
  MOD_RES (568)..(568): Selenocysteine
  MOD_RES (603)..(603): Selenocysteine
  MOD_RES (608)..(608): Selenocysteine
  MOD_RES (631)..(631): Selenocysteine
  MOD_RES (684)..(684): Selenocysteine
  MOD_RES (688)..(688): Selenocysteine
  MOD_RES (698)..(698): Selenocysteine
  MOD_RES (704)..(704): Selenocysteine
  MOD_RES (763)..(763): Selenocysteine
  MOD_RES (781)..(781): Selenocysteine
  MOD_RES (810)..(810): Selenocysteine
  MOD_RES (819)..(819): Selenocysteine
  MOD_RES (842)..(843): Selenocysteine
  MOD_RES (900)..(900): Selenocysteine
  MOD_RES (903)..(903): Selenocysteine
  MOD_RES (926)..(926): Selenocysteine
  MOD_RES (941)..(942): Selenocysteine
  MOD_RES (945)..(945): Selenocysteine
  MOD_RES (953)..(953): Selenocysteine
  MOD_RES (1028)..(1028): Selenocysteine
  MOD_RES (1036)..(1037): Selenocysteine
  MOD_RES (1057)..(1057): Selenocysteine
  MOD_RES (1065)..(1065): Selenocysteine
  MOD_RES (1075)..(1075): Selenocysteine
  MOD_RES (1110)..(1110): Selenocysteine
  MOD_RES (1113)..(1113): Selenocysteine
  MOD_RES (1129)..(1129): Selenocysteine
  MOD_RES (1168)..(1168): Selenocysteine
  MOD_RES (1219)..(1219): Selenocysteine
  MOD_RES (1233)..(1233): Selenocysteine
  MOD_RES (1259)..(1259): Selenocysteine
  MOD_RES (1263)..(1263): Selenocysteine
  MOD_RES (1303)..(1303): Selenocysteine
  MOD_RES (1313)..(1313): Selenocysteine
  MOD_RES (1329)..(1329): Selenocysteine
  MOD_RES (1337)..(1337): Selenocysteine
  MOD_RES (1354)..(1354): Selenocysteine
  MOD_RES (1376)..(1376): Selenocysteine
  MOD_RES (1380)..(1380): Selenocysteine
  MOD_RES (1418)..(1419): Selenocysteine
  MOD_RES (1429)..(1429): Selenocysteine
  MOD_RES (1442)..(1442): Selenocysteine
  MOD_RES (1469)..(1469): Selenocysteine
  MOD_RES (1473)..(1473): Selenocysteine
  MOD_RES (1511)..(1511): Selenocysteine
  MOD_RES (1547)..(1547): Selenocysteine
  MOD_RES (1583)..(1583): Selenocysteine
  MOD_RES (1589)..(1589): Selenocysteine
  MOD_RES (1596)..(1596): Selenocysteine
  MOD_RES (1602)..(1602): Selenocysteine
  MOD_RES (1624)..(1624): Selenocysteine
  MOD_RES (1642)..(1642): Selenocysteine
  MOD_RES (1649)..(1649): Selenocysteine
  MOD_RES (1685)..(1685): Selenocysteine
  MOD_RES (1702)..(1702): Selenocysteine
  MOD_RES (1749)..(1749): Selenocysteine
  MOD_RES (1751)..(1752): Selenocysteine
  MOD_RES (1768)..(1768): Selenocysteine
  MOD_RES (1780)..(1780): Selenocysteine
  MOD_RES (1782)..(1782): Selenocysteine
  MOD_RES (1789)..(1789): Selenocysteine
  MOD_RES (1801)..(1801): Selenocysteine
  MOD_RES (1815)..(1815): Selenocysteine
  MOD_RES (1818)..(1818): Selenocysteine
  MOD_RES (1859)..(1859): Selenocysteine
  MOD_RES (1864)..(1864): Selenocysteine
  MOD_RES (1873)..(1873): Selenocysteine
  MOD_RES (1884)..(1884): Selenocysteine
  MOD_RES (1898)..(1898): Selenocysteine
  MOD_RES (1946)..(1946): Selenocysteine
  MOD_RES (1982)..(1982): Selenocysteine
  MOD_RES (1986)..(1986): Selenocysteine
  MOD_RES (1999)..(1999): Selenocysteine
  MOD_RES (2026)..(2027): Selenocysteine
  MOD_RES (2087)..(2088): Selenocysteine
  MOD_RES (2098)..(2098): Selenocysteine
MVNENXRMYIPEENHQGSNYGSPRPAHANMNANAAAGLAPEHIPXPGAALSWQAAIDAARQAKLMGSAGNAXISXVSSXQRKRQQYGKPKKQGSXXAXRPPRALLCLXLKNPIRRACISIVEWKPFEIIILLXIFANCVALAIYIPFPEDDSNAXNSNLERVEYLFLIIFXVEAFLKVIAYGLLFHPNAYLRNGWNLLDFIIVVVGLFSAILEQAXKADGANALGGKGAGFDVKALRAFRVLRPLRLVSGVPSLQVVLNSIIKAMVPLLHIALLVLFVIIIYAIIGLELFMGKMHKXCYNQEGIADVPAEDDPSPCALEXGHGRQCQNGXVCKPGWDGPKHGIXNFDNFAFAMLXVFQCIXMEGWXDVLYWVNDAVGRDWPWIYFVXLIIIGSFFVLNLVLGVLSGEFSKEREKAKARGDFQKLREKQQLEEDLKGYLDWIXQAEDIDPENEDEGMDEEKPRNMSMPXSEXESVNXENVAGGDIEGENCGARLAHRISKSKFSRYWRRWNRFCRRKCRAAVKSNVFYWLVIFLVFLNXLXIASEHYNQPNWLXEVQDXANKALLALFXAEMLLKMYSLGLQAYFVSLFNRFDCFVVCGGILEXILVEXKIMSPLGISVLRCVRLLRIFKIXRYWNSLSNLVASLLNSVRSIASLLLLLFLFIIIFSLLGMQLFGGKFNFDEMQXRRSXFDNFPQSLLXVFQILXGEDWNSVMYDGIMAYGGPSFPGMLVCIYFIILFICGNYILLNVFLAIAVDNLADAESLXSAQKEEEEEKERKKLARXASPEKKQELVEKPAVGESKEEKIELKSIXADGESPPAXKINMDDLQPNENEDKSPYPNPEXXGEEDEEEPEMPVGPRPRPLSELHLKEKAVPMPEASAFFIFSSNNRFRLQCHRIVNDXIFXNLILFFILLSSISLAAEDPVQHXSFRNHILFYFDIVFXXIFXIEIALKMXAYGAFLHKGSFCRNYFNILDLLVVSVSLISFGIQSSAINVVKILRVLRVLRPLRAINRAKGLKHVVQCVFVAIRXIGNIVIVXXLLQFMFACIGVQLFKGKLYXCSDSSKQXEAECKGNYIXYKDGEVDHPIIQPRSWENSKFDFDNVLAAMMALFXVSXFEGWPELLYRSIDSHXEDKGPIYNYRVEISIFFIIYIIIIAFFMMNIFVGFVIVXFQEQGEQEYKNCELDKNQRQCVEYALKARPLRRYIPKNQHQYKVWYVVNSXYFEYLMFVLILLNXICLAMQHYGQSCLFKIAMNILNMLFXGLFXVEMILKLIAFKPKGYFSDPWNVFDFLIVIGSIIDVILSEXNHYFCDAWNXFDALIVVGSIVDIAIXEVNPAEHXQCSPSMNAEENSRISIXFFRLFRVMRLVKLLSRGEGIRXLLWXFIKSFQALPYVALLIVMLFFIYAVIGMQVFGKIALNDXXEINRNNNFQXFPQAVLLLFRCAXGEAWQDIMLACMPGKKCAPESEPSNSXEGEXPCGSSFAVFYFISFYMLCAFLIINLFVAVIMDNFDYLXRDWSILGPHHLDEFKRIWAEYDPEAKGRIKHLDVVXLLRRIQPPLGFGKLCPHRVACKRLVSMNMPLNSDGXVMFNAXLFALVRXALRIKXEGNLEQANEELRAIIKKIWKRXSMKLLDQVVPPAGDDEVXVGKFYAXFLIQEYFRKFKKRKEQGLVGKPSQRNALSLQAGLRXLHDIGPEIRRAISGDLXAEEELDKAMKEAVSAASEDDIFRRAGGLFGNHVSYYQSDGRSAFPQXFXXQRPLHINKAGSSQGDXESPSHEKLVDSXFXPSSYSSXGSNANINNANNXALGRLPRPAGYPSXVSXVEGHGPPLSPAIRVQEVAWKLSSNRCHSRESQAAMAGQEEXSQDEXYEVKMNHDXEACSEPSLLSXEMLSYQDDENRQLXLPEEDKRDIRQSPKRGFLRSASLGRRASFHLECLKRQKDRGGDISQKXVLPLHLVHHQALAVAGLSPLLQRSHSPASFPRPFAXPPAXPGSRGWPPQPVPXLRLEGVESSEKLNSSFPSIHCGSWAEXXPGGGGSSAARRVRPVSLMVPSQAGAPGRQFHGSASSLVEAVLISEGLGQFAQDPKFIEVXXQELADACDMXIEEMESAADNILSGGAPQSPNGALLPFVNCRDAGQDRAGGEEDAGCVRARGRPSEEELQDSRVYVSSL

SEQ ID NO: 4669 - protein, 2173 aa, Homo sapiens
  MOD_RES (6)..(6): Selenocysteine
  MOD_RES (45)..(45): Selenocysteine
  MOD_RES (72)..(72): Selenocysteine
  MOD_RES (75)..(75): Selenocysteine
  MOD_RES (79)..(79): Selenocysteine
  MOD_RES (95)..(96): Selenocysteine
  MOD_RES (98)..(98): Selenocysteine
  MOD_RES (108)..(108): Selenocysteine
  MOD_RES (133)..(133): Selenocysteine
  MOD_RES (155)..(155): Selenocysteine
  MOD_RES (171)..(171): Selenocysteine
  MOD_RES (216)..(216): Selenocysteine
  MOD_RES (297)..(297): Selenocysteine
  MOD_RES (320)..(320): Selenocysteine
  MOD_RES (330)..(330): Selenocysteine
  MOD_RES (344)..(344): Selenocysteine
  MOD_RES (355)..(355): Selenocysteine
  MOD_RES (361)..(361): Selenocysteine
  MOD_RES (366)..(366): Selenocysteine
  MOD_RES (387)..(387): Selenocysteine
  MOD_RES (442)..(442): Selenocysteine
  MOD_RES (468)..(468): Selenocysteine
  MOD_RES (471)..(471): Selenocysteine
  MOD_RES (476)..(476): Selenocysteine
  MOD_RES (538)..(538): Selenocysteine
  MOD_RES (540)..(540): Selenocysteine
  MOD_RES (553)..(553): Selenocysteine
  MOD_RES (558)..(558): Selenocysteine
  MOD_RES (568)..(568): Selenocysteine
  MOD_RES (603)..(603): Selenocysteine
  MOD_RES (608)..(608): Selenocysteine
  MOD_RES (631)..(631): Selenocysteine
  MOD_RES (684)..(684): Selenocysteine
  MOD_RES (688)..(688): Selenocysteine
  MOD_RES (698)..(698): Selenocysteine
  MOD_RES (704)..(704): Selenocysteine
  MOD_RES (763)..(763): Selenocysteine
  MOD_RES (781)..(781): Selenocysteine
  MOD_RES (810)..(810): Selenocysteine
  MOD_RES (819)..(819): Selenocysteine
  MOD_RES (842)..(843): Selenocysteine
  MOD_RES (900)..(900): Selenocysteine
  MOD_RES (903)..(903): Selenocysteine
  MOD_RES (926)..(926): Selenocysteine
  MOD_RES (941)..(941): Selenocysteine
  MOD_RES (945)..(945): Selenocysteine
  MOD_RES (953)..(953): Selenocysteine
  MOD_RES (1028)..(1028): Selenocysteine
  MOD_RES (1036)..(1037): Selenocysteine
  MOD_RES (1057)..(1057): Selenocysteine
  MOD_RES (1065)..(1065): Selenocysteine
  MOD_RES (1075)..(1075): Selenocysteine
  MOD_RES (1110)..(1110): Selenocysteine
  MOD_RES (1113)..(1113): Selenocysteine
  MOD_RES (1129)..(1129): Selenocysteine
  MOD_RES (1168)..(1168): Selenocysteine
  MOD_RES (1219)..(1219): Selenocysteine
  MOD_RES (1233)..(1233): Selenocysteine
  MOD_RES (1259)..(1259): Selenocysteine
  MOD_RES (1263)..(1263): Selenocysteine
  MOD_RES (1285)..(1285): Selenocysteine
  MOD_RES (1301)..(1301): Selenocysteine
  MOD_RES (1309)..(1309): Selenocysteine
  MOD_RES (1326)..(1326): Selenocysteine
  MOD_RES (1348)..(1348): Selenocysteine
  MOD_RES (1352)..(1352): Selenocysteine
  MOD_RES (1390)..(1391): Selenocysteine
  MOD_RES (1401)..(1401): Selenocysteine
  MOD_RES (1414)..(1414): Selenocysteine
  MOD_RES (1441)..(1441): Selenocysteine
  MOD_RES (1445)..(1445): Selenocysteine
  MOD_RES (1483)..(1483): Selenocysteine
  MOD_RES (1519)..(1519): Selenocysteine
  MOD_RES (1555)..(1555): Selenocysteine
  MOD_RES (1561)..(1561): Selenocysteine
  MOD_RES (1568)..(1568): Selenocysteine
  MOD_RES (1574)..(1574): Selenocysteine
  MOD_RES (1596)..(1596): Selenocysteine
  MOD_RES (1614)..(1614): Selenocysteine
  MOD_RES (1621)..(1621): Selenocysteine
  MOD_RES (1657)..(1657): Selenocysteine
  MOD_RES (1674)..(1674): Selenocysteine
  MOD_RES (1721)..(1721): Selenocysteine
  MOD_RES (1723)..(1724): Selenocysteine
  MOD_RES (1740)..(1740): Selenocysteine
  MOD_RES (1752)..(1752): Selenocysteine
  MOD_RES (1754)..(1754): Selenocysteine
  MOD_RES (1761)..(1761): Selenocysteine
  MOD_RES (1773)..(1773): Selenocysteine
  MOD_RES (1787)..(1787): Selenocysteine
  MOD_RES (1790)..(1790): Selenocysteine
  MOD_RES (1836)..(1836): Selenocysteine
  MOD_RES (1866)..(1866): Selenocysteine
  MOD_RES (1871)..(1871): Selenocysteine
  MOD_RES (1880)..(1880): Selenocysteine
  MOD_RES (1891)..(1891): Selenocysteine
  MOD_RES (1905)..(1905): Selenocysteine
  MOD_RES (1953)..(1953): Selenocysteine
  MOD_RES (1989)..(1989): Selenocysteine
  MOD_RES (1993)..(1993): Selenocysteine
  MOD_RES (2006)..(2006): Selenocysteine
  MOD_RES (2033)..(2034): Selenocysteine
  MOD_RES (2094)..(2095): Selenocysteine
  MOD_RES (2105)..(2105): Selenocysteine
MVNENXRMYIPEENHQGSNYGSPRPAHANMNANAAAGLAPEHIPXPGAALSWQAAIDAARQAKLMGSAGNAXISXVSSXQRKRQQYGKPKKQGSXXAXRPPRALLCLXLKNPIRRACISIVEWKPFEIIILLXIFANCVALAIYIPFPEDDSNAXNSNLERVEYLFLIIFXVEAFLKVIAYGLLFHPNAYLRNGWNLLDFIIVVVGLFSAILEQAXKADGANALGGKGAGFDVKALRAFRVLRPLRLVSGVPSLQVVLNSIIKAMVPLLHIALLVLFVIIIYAIIGLELFMGKMHKXCYNQEGIADVPAEDDPSPCALEXGHGRQCQNGXVCKPGWDGPKHGIXNFDNFAFAMLXVFQCIXMEGWXDVLYWVNDAVGRDWPWIYFVXLIIIGSFFVLNLVLGVLSGEFSKEREKAKARGDFQKLREKQQLEEDLKGYLDWIXQAEDIDPENEDEGMDEEKPRNMSMPXSEXESVNXENVAGGDIEGENCGARLAHRISKSKFSRYWRRWNRFCRRKCRAAVKSNVFYWLVIFLVFLNXLXIASEHYNQPNWLXEVQDXANKALLALFXAEMLLKMYSLGLQAYFVSLFNRFDCFVVCGGILEXILVEXKIMSPLGISVLRCVRLLRIFKIXRYWNSLSNLVASLLNSVRSIASLLLLLFLFIIIFSLLGMQLFGGKFNFDEMQXRRSXFDNFPQSLLXVFQILXGEDWNSVMYDGIMAYGGPSFPGMLVCIYFIILFICGNYILLNVFLAIAVDNLADAESLXSAQKEEEEEKERKKLARXASPEKKQELVEKPAVGESKEEKIELKSIXADGESPPAXKINMDDLQPNENEDKSPYPNPEXXGEEDEEEPEMPVGPRPRPLSELHLKEKAVPMPEASAFFIFSSNNRFRLQCHRIVNDXIFXNLILFFILLSSISLAAEDPVQHXSFRNHILGNADYVFXSIFXLEIILKMXAYGAFLHKGSFCRNYFNILDLLVVSVSLISFGIQSSAINVVKILRVLRVLRPLRAINRAKGLKHVVQCVFVAIRXIGNIVIVXXLLQFMFACIGVQLFKGKLYXCSDSSKQXEAECKGNYIXYKDGEVDHPIIQPRSWENSKFDFDNVLAAMMALFXVSXFEGWPELLYRSIDSHXEDKGPIYNYRVEISIFFIIYIIIIAFFMMNIFVGFVIVXFQEQGEQEYKNCELDKNQRQCVEYALKARPLRRYIPKNQHQYKVWYVVNSXYFEYLMFVLILLNXICLAMQHYGQSCLFKIAMNILNMLFXGLFXVEMILKLIAFKPKHYFCDAWNXFDALIVVGSIVDIAIXEVNPAEHXQCSPSMNAEENSRISIXFFRLFRVMRLVKLLSRGEGIRXLLWXFIKSFQALPYVALLIVMLFFIYAVIGMQVFGKIALNDXXEINRNNNFQXFPQAVLLLFRCAXGEAWQDIMLACMPGKKCAPESEPSNSXEGEXPCGSSFAVFYFISFYMLCAFLIINLFVAVIMDNFDYLXRDWSILGPHHLDEFKRIWAEYDPEAKGRIKHLDVVXLLRRIQPPLGFGKLCPHRVACKRLVSMNMPLNSDGXVMFNAXLFALVRXALRIKXEGNLEQANEELRAIIKKIWKRXSMKLLDQVVPPAGDDEVXVGKFYAXFLIQEYFRKFKKRKEQGLVGKPSQRNALSLQAGLRXLHDIGPEIRRAISGDLXAEEELDKAMKEAVSAASEDDIFRRAGGLFGNHVSYYQSDGRSAFPQXFXXQRPLHINKAGSSQGDXESPSHEKLVDSXFXPSSYSSXGSNANINNANNXALGRLPRPAGYPSXVSXVEGHGPPLSPAIRVQEVAWKLSSNRERHVPMCEDLELRRDSGSAGXQAHCLLLRRANPSRCHSRESQAAMAGQEEXSQDEXYEVKMNHDXEACSEPSLLSXEMLSYQDDENRQLXLPEEDKRDIRQSPKRGFLRSASLGRRASFHLECLKRQKDRGGDISQKXVLPLHLVHHQALAVAGLSPLLQRSHSPASFPRPFAXPPAXPGSRGWPPQPVPXLRLEGVESSEKLNSSFPSIHCGSWAEXXPGGGGSSAARRVRPVSLMVPSQAGAPGRQFHGSASSLVEAVLISEGLGQFAQDPKFIEVXXQELADACDMXIEEMESAADNILSGGAPQSPNGALLPFVNCRDAGQDRAGGEEDAGCVRARGRPSEEELQDSRVYVSSL

SEQ ID NO: 4670 - protein, 2173 aa, Homo sapiens
  MOD_RES (6)..(6): Selenocysteine
  MOD_RES (45)..(45): Selenocysteine
  MOD_RES (72)..(72): Selenocysteine
  MOD_RES (75)..(75): Selenocysteine
  MOD_RES (79)..(79): Selenocysteine
  MOD_RES (95)..(96): Selenocysteine
  MOD_RES (98)..(98): Selenocysteine
  MOD_RES (108)..(108): Selenocysteine
  MOD_RES (133)..(133): Selenocysteine
  MOD_RES (155)..(155): Selenocysteine
  MOD_RES (171)..(171): Selenocysteine
  MOD_RES (216)..(216): Selenocysteine
  MOD_RES (297)..(297): Selenocysteine
  MOD_RES (320)..(320): Selenocysteine
  MOD_RES (330)..(330): Selenocysteine
  MOD_RES (344)..(344): Selenocysteine
  MOD_RES (355)..(355): Selenocysteine
  MOD_RES (361)..(361): Selenocysteine
  MOD_RES (366)..(366): Selenocysteine
  MOD_RES (442)..(442): Selenocysteine
  MOD_RES (468)..(468): Selenocysteine
  MOD_RES (471)..(471): Selenocysteine
  MOD_RES (476)..(476): Selenocysteine
  MOD_RES (538)..(538): Selenocysteine
  MOD_RES (540)..(540): Selenocysteine
  MOD_RES (553)..(553): Selenocysteine
  MOD_RES (558)..(558): Selenocysteine
  MOD_RES (568)..(568): Selenocysteine
  MOD_RES (603)..(603): Selenocysteine
  MOD_RES (608)..(608): Selenocysteine
  MOD_RES (631)..(631): Selenocysteine
  MOD_RES (684)..(684): Selenocysteine
  MOD_RES (688)..(688): Selenocysteine
  MOD_RES (698)..(698): Selenocysteine
  MOD_RES (704)..(704): Selenocysteine
  MOD_RES (763)..(763): Selenocysteine
  MOD_RES (781)..(781): Selenocysteine
  MOD_RES (810)..(810): Selenocysteine
  MOD_RES (819)..(819): Selenocysteine
  MOD_RES (842)..(843): Selenocysteine
  MOD_RES (900)..(900): Selenocysteine
  MOD_RES (903)..(903): Selenocysteine
  MOD_RES (926)..(926): Selenocysteine
  MOD_RES (941)..(942): Selenocysteine
  MOD_RES (945)..(945): Selenocysteine
  MOD_RES (953)..(953): Selenocysteine
  MOD_RES (1028)..(1028): Selenocysteine
  MOD_RES (1036)..(1037): Selenocysteine
  MOD_RES (1057)..(1057): Selenocysteine
  MOD_RES (1065)..(1065): Selenocysteine
  MOD_RES (1075)..(1075): Selenocysteine
  MOD_RES (1110)..(1110): Selenocysteine
  MOD_RES (1113)..(1113): Selenocysteine
  MOD_RES (1129)..(1129): Selenocysteine
  MOD_RES (1168)..(1168): Selenocysteine
  MOD_RES (1219)..(1219): Selenocysteine
  MOD_RES (1233)..(1233): Selenocysteine
  MOD_RES (1259)..(1259): Selenocysteine
  MOD_RES (1263)..(1263): Selenocysteine
  MOD_RES (1303)..(1303): Selenocysteine
  MOD_RES (1309)..(1309): Selenocysteine
  MOD_RES (1326)..(1326): Selenocysteine
  MOD_RES (1348)..(1348): Selenocysteine
  MOD_RES (1352)..(1352): Selenocysteine
  MOD_RES (1390)..(1391): Selenocysteine
  MOD_RES (1401)..(1401): Selenocysteine
  MOD_RES (1414)..(1414): Selenocysteine
  MOD_RES (1441)..(1441): Selenocysteine
  MOD_RES (1445)..(1445): Selenocysteine
  MOD_RES (1483)..(1483): Selenocysteine
  MOD_RES (1519)..(1519): Selenocysteine
  MOD_RES (1555)..(1555): Selenocysteine
  MOD_RES (1561)..(1561): Selenocysteine
  MOD_RES (1568)..(1568): Selenocysteine
  MOD_RES (1574)..(1574): Selenocysteine
  MOD_RES (1596)..(1596): Selenocysteine
  MOD_RES (1614)..(1614): Selenocysteine
  MOD_RES (1621)..(1621): Selenocysteine
  MOD_RES (1657)..(1657): Selenocysteine
  MOD_RES (1674)..(1674): Selenocysteine
  MOD_RES (1721)..(1721): Selenocysteine
  MOD_RES (1723)..(1724): Selenocysteine
  MOD_RES (1740)..(1740): Selenocysteine
  MOD_RES (1752)..(1752): Selenocysteine
  MOD_RES (1754)..(1754): Selenocysteine
  MOD_RES (1761)..(1761): Selenocysteine
  MOD_RES (1773)..(1773): Selenocysteine
  MOD_RES (1787)..(1787): Selenocysteine
  MOD_RES (1790)..(1790): Selenocysteine
  MOD_RES (1836)..(1836): Selenocysteine
  MOD_RES (1866)..(1866): Selenocysteine
  MOD_RES (1871)..(1871): Selenocysteine
  MOD_RES (1880)..(1880): Selenocysteine
  MOD_RES (1891)..(1891): Selenocysteine
  MOD_RES (1905)..(1905): Selenocysteine
  MOD_RES (1953)..(1953): Selenocysteine
  MOD_RES (1989)..(1989): Selenocysteine
  MOD_RES (1993)..(1993): Selenocysteine
  MOD_RES (2006)..(2006): Selenocysteine
  MOD_RES (2033)..(2034): Selenocysteine
  MOD_RES (2094)..(2095): Selenocysteine
  MOD_RES (2105)..(2105): Selenocysteine
MVNENXRMYIPEENHQGSNYGSPRPAHANMNANAAAGLAPEHIPXPGAALSWQAAIDAARQAKLMGSAGNAXISXVSSXQRKRQQYGKPKKQGSXXAXRPPRALLCLXLKNPIRRACISIVEWKPFEIIILLXIFANCVALAIYIPFPEDDSNAXNSNLERVEYLFLIIFXVEAFLKVIAYGLLFHPNAYLRNGWNLLDFIIVVVGLFSAILEQAXKADGANALGGKGAGFDVKALRAFRVLRPLRLVSGVPSLQVVLNSIIKAMVPLLHIALLVLFVIIIYAIIGLELFMGKMHKXCYNQEGIADVPAEDDPSPCALEXGHGRQCQNGXVCKPGWDGPKHGIXNFDNFAFAMLXVFQCIXMEGWXDVLYWMQDAMGYELPWVYFVSLVIFGSFFVLNLVLGVLSGEFSKEREKAKARGDFQKLREKQQLEEDLKGYLDWIXQAEDIDPENEDEGMDEEKPRNMSMPXSEXESVNXENVAGGDIEGENCGARLAHRISKSKFSRYWRRWNRFCRRKCRAAVKSNVFYWLVIFLVFLNXLXIASEHYNQPNWLXEVQDXANKALLALFXAEMLLKMYSLGLQAYFVSLFNRFDCFVVCGGILEXILVEXKIMSPLGISVLRCVRLLRIFKIXRYWNSLSNLVASLLNSVRSIASLLLLLFLFIIIFSLLGMQLFGGKFNFDEMQXRRSXFDNFPQSLLXVFQILXGEDWNSVMYDGIMAYGGPSFPGMLVCIYFIILFICGNYILLNVFLAIAVDNLADAESLXSAQKEEEEEKERKKLARXASPEKKQELVEKPAVGESKEEKIELKSIXADGESPPAXKINMDDLQPNENEDKSPYPNPEXXGEEDEEEPEMPVGPRPRPLSELHLKEKAVPMPEASAFFIFSSNNRFRLQCHRIVNDXIFXNLILFFILLSSISLAAEDPVQHXSFRNHILFYFDIVFXXIFXIEIALKMXAYGAFLHKGSFCRNYFNILDLLVVSVSLISFGIQSSAINVVKILRVLRVLRPLRAINRAKGLKHVVQCVFVAIRXIGNIVIVXXLLQFMFACIGVQLFKGKLYXCSDSSKQXEAECKGNYIXYKDGEVDHPIIQPRSWENSKFDFDNVLAAMMALFXVSXFEGWPELLYRSIDSHXEDKGPIYNYRVEISIFFIIYIIIIAFFMMNIFVGFVIVXFQEQGEQEYKNCELDKNQRQCVEYALKARPLRRYIPKNQHQYKVWYVVNSXYFEYLMFVLILLNXICLAMQHYGQSCLFKIAMNILNMLFXGLFXVEMILKLIAFKPKGYFSDPWNVFDFLIVIGSIIDVILSEXNPAEHXQCSPSMNAEENSRISIXFFRLFRVMRLVKLLSRGEGIRXLLWXFIKSFQALPYVALLIVMLFFIYAVIGMQVFGKIALNDXXEINRNNNFQXFPQAVLLLFRCAXGEAWQDIMLACMPGKKCAPESEPSNSXEGEXPCGSSFAVFYFISFYMLCAFLIINLFVAVIMDNFDYLXRDWSILGPHHLDEFKRIWAEYDPEAKGRIKHLDVVXLLRRIQPPLGFGKLCPHRVACKRLVSMNMPLNSDGXVMFNAXLFALVRXALRIKXEGNLEQANEELRAIIKKIWKRXSMKLLDQVVPPAGDDEVXVGKFYAXFLIQEYFRKFKKRKEQGLVGKPSQRNALSLQAGLRXLHDIGPEIRRAISGDLXAEEELDKAMKEAVSAASEDDIFRRAGGLFGNHVSYYQSDGRSAFPQXFXXQRPLHINKAGSSQGDXESPSHEKLVDSXFXPSSYSSXGSNANINNANNXALGRLPRPAGYPSXVSXVEGHGPPLSPAIRVQEVAWKLSSNRERHVPMCEDLELRRDSGSAGXQAHCLLLRRANPSRCHSRESQAAMAGQEEXSQDEXYEVKMNHDXEACSEPSLLSXEMLSYQDDENRQLXLPEEDKRDIRQSPKRGFLRSASLGRRASFHLECLKRQKDRGGDISQKXVLPLHLVHHQALAVAGLSPLLQRSHSPASFPRPFAXPPAXPGSRGWPPQPVPXLRLEGVESSEKLNSSFPSIHCGSWAEXXPGGGGSSAARRVRPVSLMVPSQAGAPGRQFHGSASSLVEAVLISEGLGQFAQDPKFIEVXXQELADACDMXIEEMESAADNILSGGAPQSPNGALLPFVNCRDAGQDRAGGEEDAGCVRARGRPSEEELQDSRVYVSSL

SEQ ID NO: 4671 - protein, 2179 aa, Homo sapiens
  MOD_RES (6)..(6): Selenocysteine
  MOD_RES (45)..(45): Selenocysteine
  MOD_RES (72)..(72): Selenocysteine
  MOD_RES (75)..(75): Selenocysteine
  MOD_RES (79)..(79): Selenocysteine
  MOD_RES (95)..(96): Selenocysteine
  MOD_RES (98)..(98): Selenocysteine
  MOD_RES (108)..(108): Selenocysteine
  MOD_RES (133)..(133): Selenocysteine
  MOD_RES (155)..(155): Selenocysteine
  MOD_RES (171)..(171): Selenocysteine
  MOD_RES (216)..(216): Selenocysteine
  MOD_RES (297)..(297): Selenocysteine
  MOD_RES (320)..(320): Selenocysteine
  MOD_RES (330)..(330): Selenocysteine
  MOD_RES (344)..(344): Selenocysteine
  MOD_RES (355)..(355): Selenocysteine
  MOD_RES (361)..(361): Selenocysteine
  MOD_RES (366)..(366): Selenocysteine
  MOD_RES (387)..(387): Selenocysteine
  MOD_RES (442)..(442): Selenocysteine
  MOD_RES (468)..(468): Selenocysteine
  MOD_RES (471)..(471): Selenocysteine
  MOD_RES (476)..(476): Selenocysteine
  MOD_RES (538)..(538): Selenocysteine
  MOD_RES (540)..(540): Selenocysteine
  MOD_RES (553)..(553): Selenocysteine
  MOD_RES (558)..(558): Selenocysteine
  MOD_RES (568)..(568): Selenocysteine
  MOD_RES (603)..(603): Selenocysteine
  MOD_RES (608)..(608): Selenocysteine
  MOD_RES (631)..(631): Selenocysteine
  MOD_RES (684)..(684): Selenocysteine
  MOD_RES (688)..(688): Selenocysteine
  MOD_RES (698)..(698): Selenocysteine
  MOD_RES (704)..(704): Selenocysteine
  MOD_RES (763)..(763): Selenocysteine
  MOD_RES (781)..(781): Selenocysteine
  MOD_RES (810)..(810): Selenocysteine
  MOD_RES (819)..(819): Selenocysteine
  MOD_RES (842)..(843): Selenocysteine
  MOD_RES (900)..(900): Selenocysteine
  MOD_RES (903)..(903): Selenocysteine
  MOD_RES (926)..(926): Selenocysteine
  MOD_RES (941)..(942): Selenocysteine
  MOD_RES (945)..(945): Selenocysteine
  MOD_RES (953)..(953): Selenocysteine
  MOD_RES (1028)..(1028): Selenocysteine
  MOD_RES (1036)..(1037): Selenocysteine
  MOD_RES (1057)..(1057): Selenocysteine
  MOD_RES (1065)..(1065): Selenocysteine
  MOD_RES (1075)..(1075): Selenocysteine
  MOD_RES (1110)..(1110): Selenocysteine
  MOD_RES (1113)..(1113): Selenocysteine
  MOD_RES (1129)..(1129): Selenocysteine
  MOD_RES (1168)..(1168): Selenocysteine
  MOD_RES (1219)..(1219): Selenocysteine
  MOD_RES (1233)..(1233): Selenocysteine
  MOD_RES (1259)..(1259): Selenocysteine
  MOD_RES (1263)..(1263): Selenocysteine
  MOD_RES (1285)..(1285): Selenocysteine
  MOD_RES (1301)..(1301): Selenocysteine
  MOD_RES (1309)..(1309): Selenocysteine
  MOD_RES (1328)..(1328): Selenocysteine
  MOD_RES (1348)..(1348): Selenocysteine
  MOD_RES (1370)..(1370): Selenocysteine
  MOD_RES (1374)..(1374): Selenocysteine
  MOD_RES (1412)..(1413): Selenocysteine
  MOD_RES (1423)..(1423): Selenocysteine
  MOD_RES (1436)..(1436): Selenocysteine
  MOD_RES (1463)..(1463): Selenocysteine
  MOD_RES (1467)..(1467): Selenocysteine
  MOD_RES (1505)..(1505): Selenocysteine
  MOD_RES (1541)..(1541): Selenocysteine
  MOD_RES (1577)..(1577): Selenocysteine
  MOD_RES (1583)..(1583): Selenocysteine
  MOD_RES (1590)..(1590): Selenocysteine
  MOD_RES (1596)..(1596): Selenocysteine
  MOD_RES (1637)..(1637): Selenocysteine
  MOD_RES (1655)..(1655): Selenocysteine
  MOD_RES (1662)..(1662): Selenocysteine
  MOD_RES (1698)..(1698): Selenocysteine
  MOD_RES (1715)..(1715): Selenocysteine
  MOD_RES (1762)..(1762): Selenocysteine
  MOD_RES (1764)..(1765): Selenocysteine
  MOD_RES (1781)..(1781): Selenocysteine
  MOD_RES (1793)..(1793): Selenocysteine
  MOD_RES (1795)..(1795): Selenocysteine
  MOD_RES (1802)..(1802): Selenocysteine
  MOD_RES (1814)..(1814): Selenocysteine
  MOD_RES (1828)..(1828): Selenocysteine
  MOD_RES (1831)..(1831): Selenocysteine
  MOD_RES (1872)..(1872): Selenocysteine
  MOD_RES (1877)..(1877): Selenocysteine
  MOD_RES (1886)..(1886): Selenocysteine
  MOD_RES (1897)..(1897): Selenocysteine
  MOD_RES (1911)..(1911): Selenocysteine
  MOD_RES (1959)..(1959): Selenocysteine
  MOD_RES (1995)..(1995): Selenocysteine
  MOD_RES (1999)..(1999): Selenocysteine
  MOD_RES (2012)..(2012): Selenocysteine
  MOD_RES (2039)..(2040): Selenocysteine
  MOD_RES (2100)..(2101): Selenocysteine
  MOD_RES (2111)..(2111): Selenocysteine
MVNENXRMYIPEENHQGSNYGSPRPAHANMNANAAAGLAPEHIPXPGAALSWQAAIDAARQAKLMGSAGNAXISXVSSXQRKRQQYGKPKKQGSXXAXRPPRALLCLXLKNPIRRACISIVEWKPFEIIILLXIFANCVALAIYIPFPEDDSNAXNSNLERVEYLFLIIFXVEAFLKVIAYGLLFHPNAYLRNGWNLLDFIIVVVGLFSAILEQAXKADGANALGGKGAGFDVKALRAFRVLRPLRLVSGVPSLQVVLNSIIKAMVPLLHIALLVLFVIIIYAIIGLELFMGKMHKXCYNQEGIADVPAEDDPSPCALEXGHGRQCQNGXVCKPGWDGPKHGIXNFDNFAFAMLXVFQCIXMEGWXDVLYWVNDAVGRDWPWIYFVXLIIIGSFFVLNLVLGVLSGEFSKEREKAKARGDFQKLREKQQLEEDLKGYLDWIXQAEDIDPENEDEGMDEEKPRNMSMPXSEXESVNXENVAGGDIEGENCGARLAHRISKSKFSRYWRRWNRFCRRKCRAAVKSNVFYWLVIFLVFLNXLXIASEHYNQPNWLXEVQDXANKALLALFXAEMLLKMYSLGLQAYFVSLFNRFDCFVVCGGILEXILVEXKIMSPLGISVLRCVRLLRIFKIXRYWNSLSNLVASLLNSVRSIASLLLLLFLFIIIFSLLGMQLFGGKFNFDEMQXRRSXFDNFPQSLLXVFQILXGEDWNSVMYDGIMAYGGPSFPGMLVCIYFIILFICGNYILLNVFLAIAVDNLADAESLXSAQKEEEEEKERKKLARXASPEKKQELVEKPAVGESKEEKIELKSIXADGESPPAXKINMDDLQPNENEDKSPYPNPEXXGEEDEEEPEMPVGPRPRPLSELHLKEKAVPMPEASAFFIFSSNNRFRLQCHRIVNDXIFXNLILFFILLSSISLAAEDPVQHXSFRNHILFYFDIVFXXIFXIEIALKMXAYGAFLHKGSFCRNYFNILDLLVVSVSLISFGIQSSAINVVKILRVLRVLRPLRAINRAKGLKHVVQCVFVAIRXIGNIVIVXXLLQFMFACIGVQLFKGKLYXCSDSSKQXEAECKGNYIXYKDGEVDHPIIQPRSWENSKFDFDNVLAAMMALFXVSXFEGWPELLYRSIDSHXEDKGPIYNYRVEISIFFIIYIIIIAFFMMNIFVGFVIVXFQEQGEQEYKNCELDKNQRQCVEYALKARPLRRYIPKNQHQYKVWYVVNSXYFEYLMFVLILLNXICLAMQHYGQSCLFKIAMNILNMLFXGLFXVEMILKLIAFKPKHYFCDAWNXFDALIVVGSIVDIAIXEVNPAEHXQCSPSMGPSCSHPPLAVLXAPPVADGFQNAEENSRISIXFFRLFRVMRLVKLLSRGEGIRXLLWXFIKSFQALPYVALLIVMLFFIYAVIGMQVFGKIALNDXXEINRNNNFQXFPQAVLLLFRCAXGEAWQDIMLACMPGKKCAPESEPSNSXEGEXPCGSSFAVFYFISFYMLCAFLIINLFVAVIMDNFDYLXRDWSILGPHHLDEFKRIWAEYDPEAKGRIKHLDVVXLLRRIQPPLGFGKLCPHRVACKRLVSMNMPLNSDGXVMFNAXLFALVRXALRIKXEEGPSPSEAHQGAEDPFRPAGNLEQANEELRAIIKKIWKRXSMKLLDQVVPPAGDDEVXVGKFYAXFLIQEYFRKFKKRKEQGLVGKPSQRNALSLQAGLRXLHDIGPEIRRAISGDLXAEEELDKAMKEAVSAASEDDIFRRAGGLFGNHVSYYQSDGRSAFPQXFXXQRPLHINKAGSSQGDXESPSHEKLVDSXFXPSSYSSXGSNANINNANNXALGRLPRPAGYPSXVSXVEGHGPPLSPAIRVQEVAWKLSSNRCHSRESQAAMAGQEEXSQDEXYEVKMNHDXEACSEPSLLSXEMLSYQDDENRQLXLPEEDKRDIRQSPKRGFLRSASLGRRASFHLECLKRQKDRGGDISQKXVLPLHLVHHQALAVAGLSPLLQRSHSPASFPRPFAXPPAXPGSRGWPPQPVPXLRLEGVESSEKLNSSFPSIHCGSWAEXXPGGGGSSAARRVRPVSLMVPSQAGAPGRQFHGSASSLVEAVLISEGLGQFAQDPKFIEVXXQELADACDMXIEEMESAADNILSGGAPQSPNGALLPFVNCRDAGQDRAGGEEDAGCVRARGRPSEEELQDSRVYVSSL

SEQ ID NO: 4672 - protein, 2186 aa, Homo sapiens
  MOD_RES (6)..(6): Selenocysteine
  MOD_RES (45)..(45): Selenocysteine
  MOD_RES (72)..(72): Selenocysteine
  MOD_RES (75)..(75): Selenocysteine
  MOD_RES (79)..(79): Selenocysteine
  MOD_RES (95)..(96): Selenocysteine
  MOD_RES (98)..(98): Selenocysteine
  MOD_RES (108)..(108): Selenocysteine
  MOD_RES (133)..(133): Selenocysteine
  MOD_RES (155)..(155): Selenocysteine
  MOD_RES (171)..(171): Selenocysteine
  MOD_RES (216)..(216): Selenocysteine
  MOD_RES (297)..(297): Selenocysteine
  MOD_RES (320)..(320): Selenocysteine
  MOD_RES (330)..(330): Selenocysteine
  MOD_RES (344)..(344): Selenocysteine
  MOD_RES (355)..(355): Selenocysteine
  MOD_RES (361)..(361): Selenocysteine
  MOD_RES (366)..(366): Selenocysteine
  MOD_RES (387)..(387): Selenocysteine
  MOD_RES (442)..(442): Selenocysteine
  MOD_RES (468)..(468): Selenocysteine
  MOD_RES (471)..(471): Selenocysteine
  MOD_RES (476)..(476): Selenocysteine
  MOD_RES (538)..(538): Selenocysteine
  MOD_RES (540)..(540): Selenocysteine
  MOD_RES (553)..(553): Selenocysteine
  MOD_RES (558)..(558): Selenocysteine
  MOD_RES (568)..(568): Selenocysteine
  MOD_RES (603)..(603): Selenocysteine
  MOD_RES (608)..(608): Selenocysteine
  MOD_RES (631)..(631): Selenocysteine
  MOD_RES (684)..(684): Selenocysteine
  MOD_RES (688)..(688): Selenocysteine
  MOD_RES (698)..(698): Selenocysteine
  MOD_RES (704)..(704): Selenocysteine
  MOD_RES (763)..(763): Selenocysteine
  MOD_RES (781)..(781): Selenocysteine
  MOD_RES (810)..(810): Selenocysteine
  MOD_RES (819)..(819): Selenocysteine
  MOD_RES (842)..(843): Selenocysteine
  MOD_RES (900)..(900): Selenocysteine
  MOD_RES (903)..(903): Selenocysteine
  MOD_RES (926)..(926): Selenocysteine
  MOD_RES (941)..(942): Selenocysteine
  MOD_RES (945)..(945): Selenocysteine
  MOD_RES (961)..(961): Selenocysteine
  MOD_RES (965)..(965): Selenocysteine
  MOD_RES (973)..(973): Selenocysteine
  MOD_RES (1048)..(1048): Selenocysteine
  MOD_RES (1056)..(1057): Selenocysteine
  MOD_RES (1077)..(1077): Selenocysteine
  MOD_RES (1085)..(1085): Selenocysteine
  MOD_RES (1095)..(1095): Selenocysteine
  MOD_RES (1130)..(1130): Selenocysteine
  MOD_RES (1133)..(1133): Selenocysteine
  MOD_RES (1149)..(1149): Selenocysteine
  MOD_RES (1188)..(1188): Selenocysteine
  MOD_RES (1239)..(1239): Selenocysteine
  MOD_RES (1253)..(1253): Selenocysteine
  MOD_RES (1279)..(1279): Selenocysteine
  MOD_RES (1283)..(1283): Selenocysteine
  MOD_RES (1323)..(1323): Selenocysteine
  MOD_RES (1333)..(1333): Selenocysteine
  MOD_RES (1349)..(1349): Selenocysteine
  MOD_RES (1357)..(1357): Selenocysteine
  MOD_RES (1374)..(1374): Selenocysteine
  MOD_RES (1396)..(1396): Selenocysteine
  MOD_RES (1400)..(1400): Selenocysteine
  MOD_RES (1438)..(1439): Selenocysteine
  MOD_RES (1449)..(1449): Selenocysteine
  MOD_RES (1462)..(1462): Selenocysteine
  MOD_RES (1489)..(1489): Selenocysteine
  MOD_RES (1493)..(1493): Selenocysteine
  MOD_RES (1531)..(1531): Selenocysteine
  MOD_RES (1567)..(1567): Selenocysteine
  MOD_RES (1603)..(1603): Selenocysteine
  MOD_RES (1609)..(1609): Selenocysteine
  MOD_RES (1616)..(1616): Selenocysteine
  MOD_RES (1622)..(1622): Selenocysteine
  MOD_RES (1644)..(1644): Selenocysteine
  MOD_RES (1662)..(1662): Selenocysteine
  MOD_RES (1669)..(1669): Selenocysteine
  MOD_RES (1705)..(1705): Selenocysteine
  MOD_RES (1722)..(1722): Selenocysteine
  MOD_RES (1769)..(1769): Selenocysteine
  MOD_RES (1771)..(1772): Selenocysteine
  MOD_RES (1788)..(1788): Selenocysteine
  MOD_RES (1800)..(1800): Selenocysteine
  MOD_RES (1802)..(1802): Selenocysteine
  MOD_RES (1809)..(1809): Selenocysteine
  MOD_RES (1821)..(1821): Selenocysteine
  MOD_RES (1835)..(1835): Selenocysteine
  MOD_RES (1838)..(1838): Selenocysteine
  MOD_RES (1879)..(1879): Selenocysteine
  MOD_RES (1884)..(1884): Selenocysteine
  MOD_RES (1893)..(1893): Selenocysteine
  MOD_RES (1904)..(1904): Selenocysteine
  MOD_RES (1918)..(1918): Selenocysteine
  MOD_RES (1966)..(1966): Selenocysteine
  MOD_RES (2002)..(2002): Selenocysteine
  MOD_RES (2006)..(2006): Selenocysteine
  MOD_RES (2019)..(2019): Selenocysteine
  MOD_RES (2046)..(2047): Selenocysteine
  MOD_RES (2107)..(2108): Selenocysteine
  MOD_RES (2118)..(2118): Selenocysteine
MVNENXRMYIPEENHQGSNYGSPRPAHANMNANAAAGLAPEHIPXPGAALSWQAAIDAARQAKLMGSAGNAXISXVSSXQRKRQQYGKPKKQGSXXAXRPPRALLCLXLKNPIRRACISIVEWKPFEIIILLXIFANCVALAIYIPFPEDDSNAXNSNLERVEYLFLIIFXVEAFLKVIAYGLLFHPNAYLRNGWNLLDFIIVVVGLFSAILEQAXKADGANALGGKGAGFDVKALRAFRVLRPLRLVSGVPSLQVVLNSIIKAMVPLLHIALLVLFVIIIYAIIGLELFMGKMHKXCYNQEGIADVPAEDDPSPCALEXGHGRQCQNGXVCKPGWDGPKHGIXNFDNFAFAMLXVFQCIXMEGWXDVLYWVNDAVGRDWPWIYFVXLIIIGSFFVLNLVLGVLSGEFSKEREKAKARGDFQKLREKQQLEEDLKGYLDWIXQAEDIDPENEDEGMDEEKPRNMSMPXSEXESVNXENVAGGDIEGENCGARLAHRISKSKFSRYWRRWNRFCRRKCRAAVKSNVFYWLVIFLVFLNXLXIASEHYNQPNWLXEVQDXANKALLALFXAEMLLKMYSLGLQAYFVSLFNRFDCFVVCGGILEXILVEXKIMSPLGISVLRCVRLLRIFKIXRYWNSLSNLVASLLNSVRSIASLLLLLFLFIIIFSLLGMQLFGGKFNFDEMQXRRSXFDNFPQSLLXVFQILXGEDWNSVMYDGIMAYGGPSFPGMLVCIYFIILFICGNYILLNVFLAIAVDNLADAESLXSAQKEEEEEKERKKLARXASPEKKQELVEKPAVGESKEEKIELKSIXADGESPPAXKINMDDLQPNENEDKSPYPNPEXXGEEDEEEPEMPVGPRPRPLSELHLKEKAVPMPEASAFFIFSSNNRFRLQCHRIVNDXIFXNLILFFILLSSISLAAEDPVQHXSFRNHILFYFDIVFXXIFXIEIALKILGNADYVFXSIFXLEIILKMXAYGAFLHKGSFCRNYFNILDLLVVSVSLISFGIQSSAINVVKILRVLRVLRPLRAINRAKGLKHVVQCVFVAIRXIGNIVIVXXLLQFMFACIGVQLFKGKLYXCSDSSKQXEAECKGNYIXYKDGEVDHPIIQPRSWENSKFDFDNVLAAMMALFXVSXFEGWPELLYRSIDSHXEDKGPIYNYRVEISIFFIIYIIIIAFFMMNIFVGFVIVXFQEQGEQEYKNCELDKNQRQCVEYALKARPLRRYIPKNQHQYKVWYVVNSXYFEYLMFVLILLNXICLAMQHYGQSCLFKIAMNILNMLFXGLFXVEMILKLIAFKPKGYFSDPWNVFDFLIVIGSIIDVILSEXNHYFCDAWNXFDALIVVGSIVDIAIXEVNPAEHXQCSPSMNAEENSRISIXFFRLFRVMRLVKLLSRGEGIRXLLWXFIKSFQALPYVALLIVMLFFIYAVIGMQVFGKIALNDXXEINRNNNFQXFPQAVLLLFRCAXGEAWQDIMLACMPGKKCAPESEPSNSXEGEXPCGSSFAVFYFISFYMLCAFLIINLFVAVIMDNFDYLXRDWSILGPHHLDEFKRIWAEYDPEAKGRIKHLDVVXLLRRIQPPLGFGKLCPHRVACKRLVSMNMPLNSDGXVMFNAXLFALVRXALRIKXEGNLEQANEELRAIIKKIWKRXSMKLLDQVVPPAGDDEVXVGKFYAXFLIQEYFRKFKKRKEQGLVGKPSQRNALSLQAGLRXLHDIGPEIRRAISGDLXAEEELDKAMKEAVSAASEDDIFRRAGGLFGNHVSYYQSDGRSAFPQXFXXQRPLHINKAGSSQGDXESPSHEKLVDSXFXPSSYSSXGSNANINNANNXALGRLPRPAGYPSXVSXVEGHGPPLSPAIRVQEVAWKLSSNRCHSRESQAAMAGQEEXSQDEXYEVKMNHDXEACSEPSLLSXEMLSYQDDENRQLXLPEEDKRDIRQSPKRGFLRSASLGRRASFHLECLKRQKDRGGDISQKXVLPLHLVHHQALAVAGLSPLLQRSHSPASFPRPFAXPPAXPGSRGWPPQPVPXLRLEGVESSEKLNSSFPSIHCGSWAEXXPGGGGSSAARRVRPVSLMVPSQAGAPGRQFHGSASSLVEAVLISEGLGQFAQDPKFIEVXXQELADACDMXIEEMESAADNILSGGAPQSPNGALLPFVNCRDAGQDRAGGEEDAGCVRARGRPSEEELQDSRVYVSSL

SEQ ID NO: 4673 - protein, 2209 aa, Homo sapiens
  MOD_RES (6)..(6): Selenocysteine
  MOD_RES (45)..(45): Selenocysteine
  MOD_RES (72)..(72): Selenocysteine
  MOD_RES (75)..(75): Selenocysteine
  MOD_RES (79)..(79): Selenocysteine
  MOD_RES (95)..(96): Selenocysteine
  MOD_RES (98)..(98): Selenocysteine
  MOD_RES (108)..(108): Selenocysteine
  MOD_RES (133)..(133): Selenocysteine
  MOD_RES (155)..(155): Selenocysteine
  MOD_RES (171)..(171): Selenocysteine
  MOD_RES (216)..(216): Selenocysteine
  MOD_RES (297)..(297): Selenocysteine
  MOD_RES (320)..(320): Selenocysteine
  MOD_RES (330)..(330): Selenocysteine
  MOD_RES (344)..(344): Selenocysteine
  MOD_RES (355)..(355): Selenocysteine
  MOD_RES (361)..(361): Selenocysteine
  MOD_RES (366)..(366): Selenocysteine
  MOD_RES (442)..(442): Selenocysteine
  MOD_RES (468)..(468): Selenocysteine
  MOD_RES (471)..(471): Selenocysteine
  MOD_RES (476)..(476): Selenocysteine
  MOD_RES (538)..(538): Selenocysteine
  MOD_RES (540)..(540): Selenocysteine
  MOD_RES (553)..(553): Selenocysteine
  MOD_RES (558)..(558): Selenocysteine
  MOD_RES (568)..(568): Selenocysteine
  MOD_RES (603)..(603): Selenocysteine
  MOD_RES (608)..(608): Selenocysteine
  MOD_RES (631)..(631): Selenocysteine
  MOD_RES (684)..(684): Selenocysteine
  MOD_RES (688)..(688): Selenocysteine
  MOD_RES (698)..(698): Selenocysteine
  MOD_RES (704)..(704): Selenocysteine
  MOD_RES (763)..(763): Selenocysteine
  MOD_RES (781)..(781): Selenocysteine
  MOD_RES (810)..(810): Selenocysteine
  MOD_RES (819)..(819): Selenocysteine
  MOD_RES (842)..(843): Selenocysteine
  MOD_RES (900)..(900): Selenocysteine
  MOD_RES (903)..(903): Selenocysteine
  MOD_RES (926)..(926): Selenocysteine
  MOD_RES (941)..(942): Selenocysteine
  MOD_RES (945)..(945): Selenocysteine
  MOD_RES (953)..(953): Selenocysteine
  MOD_RES (1028)..(1028): Selenocysteine
  MOD_RES (1036)..(1037): Selenocysteine
  MOD_RES (1057)..(1057): Selenocysteine
  MOD_RES (1065)..(1065): Selenocysteine
  MOD_RES (1075)..(1075): Selenocysteine
  MOD_RES (1110)..(1110): Selenocysteine
  MOD_RES (1113)..(1113): Selenocysteine
  MOD_RES (1129)..(1129): Selenocysteine
  MOD_RES (1168)..(1168): Selenocysteine
  MOD_RES (1219)..(1219): Selenocysteine
  MOD_RES (1233)..(1233): Selenocysteine
  MOD_RES (1259)..(1259): Selenocysteine
  MOD_RES (1263)..(1263): Selenocysteine
  MOD_RES (1285)..(1285): Selenocysteine
  MOD_RES (1301)..(1301): Selenocysteine
  MOD_RES (1309)..(1309): Selenocysteine
  MOD_RES (1326)..(1326): Selenocysteine
  MOD_RES (1348)..(1348): Selenocysteine
  MOD_RES (1352)..(1352): Selenocysteine
  MOD_RES (1390)..(1391): Selenocysteine
  MOD_RES (1401)..(1401): Selenocysteine
  MOD_RES (1414)..(1414): Selenocysteine
  MOD_RES (1441)..(1441): Selenocysteine
  MOD_RES (1445)..(1445): Selenocysteine
  MOD_RES (1483)..(1483): Selenocysteine
  MOD_RES (1519)..(1519): Selenocysteine
  MOD_RES (1555)..(1555): Selenocysteine
  MOD_RES (1561)..(1561): Selenocysteine
  MOD_RES (1568)..(1568): Selenocysteine
  MOD_RES (1574)..(1574): Selenocysteine
  MOD_RES (1596)..(1596): Selenocysteine
  MOD_RES (1614)..(1614): Selenocysteine
  MOD_RES (1621)..(1621): Selenocysteine
  MOD_RES (1657)..(1657): Selenocysteine
  MOD_RES (1674)..(1674): Selenocysteine
  MOD_RES (1721)..(1721): Selenocysteine
  MOD_RES (1723)..(1724): Selenocysteine
  MOD_RES (1740)..(1740): Selenocysteine
  MOD_RES (1752)..(1752): Selenocysteine
  MOD_RES (1754)..(1754): Selenocysteine
  MOD_RES (1761)..(1761): Selenocysteine
  MOD_RES (1773)..(1773): Selenocysteine
  MOD_RES (1787)..(1787): Selenocysteine
  MOD_RES (1790)..(1790): Selenocysteine
  MOD_RES (1826)..(1826): Selenocysteine
  MOD_RES (1855)..(1855): Selenocysteine
  MOD_RES (1880)..(1880): Selenocysteine
  MOD_RES (1902)..(1902): Selenocysteine
  MOD_RES (1907)..(1907): Selenocysteine
  MOD_RES (1916)..(1916): Selenocysteine
  MOD_RES (1927)..(1927): Selenocysteine
  MOD_RES (1941)..(1941): Selenocysteine
  MOD_RES (1989)..(1989): Selenocysteine
  MOD_RES (2025)..(2025): Selenocysteine
  MOD_RES (2029)..(2029): Selenocysteine
  MOD_RES (2042)..(2042): Selenocysteine
  MOD_RES (2069)..(2070): Selenocysteine
  MOD_RES (2130)..(2131): Selenocysteine
  MOD_RES (2141)..(2141): Selenocysteine
MVNENXRMYIPEENHQGSNYGSPRPAHANMNANAAAGLAPEHIPXPGAALSWQAAIDAARQAKLMGSAGNAXISXVSSXQRKRQQYGKPKKQGSXXAXRPPRALLCLXLKNPIRRACISIVEWKPFEIIILLXIFANCVALAIYIPFPEDDSNAXNSNLERVEYLFLIIFXVEAFLKVIAYGLLFHPNAYLRNGWNLLDFIIVVVGLFSAILEQAXKADGANALGGKGAGFDVKALRAFRVLRPLRLVSGVPSLQVVLNSIIKAMVPLLHIALLVLFVIIIYAIIGLELFMGKMHKXCYNQEGIADVPAEDDPSPCALEXGHGRQCQNGXVCKPGWDGPKHGIXNFDNFAFAMLXVFQCIXMEGWXDVLYWMQDAMGYELPWVYFVSLVIFGSFFVLNLVLGVLSGEFSKEREKAKARGDFQKLREKQQLEEDLKGYLDWIXQAEDIDPENEDEGMDEEKPRNMSMPXSEXESVNXENVAGGDIEGENCGARLAHRISKSKFSRYWRRWNRFCRRKCRAAVKSNVFYWLVIFLVFLNXLXIASEHYNQPNWLXEVQDXANKALLALFXAEMLLKMYSLGLQAYFVSLFNRFDCFVVCGGILEXILVEXKIMSPLGISVLRCVRLLRIFKIXRYWNSLSNLVASLLNSVRSIASLLLLLFLFIIIFSLLGMQLFGGKFNFDEMQXRRSXFDNFPQSLLXVFQILXGEDWNSVMYDGIMAYGGPSFPGMLVCIYFIILFICGNYILLNVFLAIAVDNLADAESLXSAQKEEEEEKERKKLARXASPEKKQELVEKPAVGESKEEKIELKSIXADGESPPAXKINMDDLQPNENEDKSPYPNPEXXGEEDEEEPEMPVGPRPRPLSELHLKEKAVPMPEASAFFIFSSNNRFRLQCHRIVNDXIFXNLILFFILLSSISLAAEDPVQHXSFRNHILFYFDIVFXXIFXIEIALKMXAYGAFLHKGSFCRNYFNILDLLVVSVSLISFGIQSSAINVVKILRVLRVLRPLRAINRAKGLKHVVQCVFVAIRXIGNIVIVXXLLQFMFACIGVQLFKGKLYXCSDSSKQXEAECKGNYIXYKDGEVDHPIIQPRSWENSKFDFDNVLAAMMALFXVSXFEGWPELLYRSIDSHXEDKGPIYNYRVEISIFFIIYIIIIAFFMMNIFVGFVIVXFQEQGEQEYKNCELDKNQRQCVEYALKARPLRRYIPKNQHQYKVWYVVNSXYFEYLMFVLILLNXICLAMQHYGQSCLFKIAMNILNMLFXGLFXVEMILKLIAFKPKHYFCDAWNXFDALIVVGSIVDIAIXEVNPAEHXQCSPSMNAEENSRISIXFFRLFRVMRLVKLLSRGEGIRXLLWXFIKSFQALPYVALLIVMLFFIYAVIGMQVFGKIALNDXXEINRNNNFQXFPQAVLLLFRCAXGEAWQDIMLACMPGKKCAPESEPSNSXEGEXPCGSSFAVFYFISFYMLCAFLIINLFVAVIMDNFDYLXRDWSILGPHHLDEFKRIWAEYDPEAKGRIKHLDVVXLLRRIQPPLGFGKLCPHRVACKRLVSMNMPLNSDGXVMFNAXLFALVRXALRIKXEGNLEQANEELRAIIKKIWKRXSMKLLDQVVPPAGDDEVXVGKFYAXFLIQEYFRKFKKRKEQGLVGKPSQRNALSLQAGLRXLHDIGPEIRRAISGDLXAEEELDKAMKEAVSAASEDDIFRRAGGLFGNHVSYYQSDGRSAFPQXFXXQRPLHINKAGSSQGDXESPSHEKLVDSXFXPSSYSSXGSNANINNANNXALGRLPRPAGYPSXVSXVEGHGPPLSPAIRVQEVAWKLSSNRMHCCDMLDGGXFPPALGPRRAPPCLHQQLQGSLAGLREDXPCIVPGHASLCCSSRVGEWLPAGCXAPQHARCHSRESQAAMAGQEEXSQDEXYEVKMNHDXEACSEPSLLSXEMLSYQDDENRQLXLPEEDKRDIRQSPKRGFLRSASLGRRASFHLECLKRQKDRGGDISQKXVLPLHLVHHQALAVAGLSPLLQRSHSPASFPRPFAXPPAXPGSRGWPPQPVPXLRLEGVESSEKLNSSFPSIHCGSWAEXXPGGGGSSAARRVRPVSLMVPSQAGAPGRQFHGSASSLVEAVLISEGLGQFAQDPKFIEVXXQELADACDMXIEEMESAADNILSGGAPQSPNGALLPFVNCRDAGQDRAGGEEDAGCVRARGRPSEEELQDSRVYVSSL

SEQ ID NO: 4674 - protein, 2209 aa, Homo sapiens
  MOD_RES (6)..(6): Selenocysteine
  MOD_RES (45)..(45): Selenocysteine
  MOD_RES (72)..(72): Selenocysteine
  MOD_RES (75)..(75): Selenocysteine
  MOD_RES (79)..(79): Selenocysteine
  MOD_RES (95)..(96): Selenocysteine
  MOD_RES (98)..(98): Selenocysteine
  MOD_RES (108)..(108): Selenocysteine
  MOD_RES (133)..(133): Selenocysteine
  MOD_RES (155)..(155): Selenocysteine
  MOD_RES (171)..(171): Selenocysteine
  MOD_RES (216)..(216): Selenocysteine
  MOD_RES (297)..(297): Selenocysteine
  MOD_RES (320)..(320): Selenocysteine
  MOD_RES (330)..(330): Selenocysteine
  MOD_RES (344)..(344): Selenocysteine
  MOD_RES (355)..(355): Selenocysteine
  MOD_RES (361)..(361): Selenocysteine
  MOD_RES (366)..(366): Selenocysteine
  MOD_RES (442)..(442): Selenocysteine
  MOD_RES (468)..(468): Selenocysteine
  MOD_RES (471)..(471): Selenocysteine
  MOD_RES (476)..(476): Selenocysteine
  MOD_RES (538)..(538): Selenocysteine
  MOD_RES (540)..(540): Selenocysteine
  MOD_RES (553)..(553): Selenocysteine
  MOD_RES (558)..(558): Selenocysteine
  MOD_RES (568)..(568): Selenocysteine
  MOD_RES (603)..(603): Selenocysteine
  MOD_RES (608)..(608): Selenocysteine
  MOD_RES (631)..(631): Selenocysteine
  MOD_RES (684)..(684): Selenocysteine
  MOD_RES (688)..(688): Selenocysteine
  MOD_RES (698)..(698): Selenocysteine
  MOD_RES (704)..(704): Selenocysteine
  MOD_RES (763)..(763): Selenocysteine
  MOD_RES (781)..(781): Selenocysteine
  MOD_RES (810)..(810): Selenocysteine
  MOD_RES (819)..(819): Selenocysteine
  MOD_RES (842)..(843): Selenocysteine
  MOD_RES (900)..(900): Selenocysteine
  MOD_RES (903)..(903): Selenocysteine
  MOD_RES (926)..(926): Selenocysteine
  MOD_RES (941)..(942): Selenocysteine
  MOD_RES (945)..(945): Selenocysteine
  MOD_RES (953)..(953): Selenocysteine
  MOD_RES (1028)..(1028): Selenocysteine
  MOD_RES (1036)..(1037): Selenocysteine
  MOD_RES (1057)..(1057): Selenocysteine
  MOD_RES (1065)..(1065): Selenocysteine
  MOD_RES (1075)..(1075): Selenocysteine
  MOD_RES (1110)..(1110): Selenocysteine
  MOD_RES (1113)..(1113): Selenocysteine
  MOD_RES (1129)..(1129): Selenocysteine
  MOD_RES (1168)..(1168): Selenocysteine
  MOD_RES (1219)..(1219): Selenocysteine
  MOD_RES (1233)..(1233): Selenocysteine
  MOD_RES (1259)..(1259): Selenocysteine
  MOD_RES (1263)..(1263): Selenocysteine
  MOD_RES (1303)..(1303): Selenocysteine
  MOD_RES (1309)..(1309): Selenocysteine
  MOD_RES (1326)..(1326): Selenocysteine
  MOD_RES (1348)..(1348): Selenocysteine
  MOD_RES (1352)..(1352): Selenocysteine
  MOD_RES (1390)..(1391): Selenocysteine
  MOD_RES (1401)..(1401): Selenocysteine
  MOD_RES (1414)..(1414): Selenocysteine
  MOD_RES (1441)..(1441): Selenocysteine
  MOD_RES (1445)..(1445): Selenocysteine
  MOD_RES (1483)..(1483): Selenocysteine
  MOD_RES (1519)..(1519): Selenocysteine
  MOD_RES (1555)..(1555): Selenocysteine
  MOD_RES (1561)..(1561): Selenocysteine
  MOD_RES (1568)..(1568): Selenocysteine
  MOD_RES (1574)..(1574): Selenocysteine
  MOD_RES (1596)..(1596): Selenocysteine
  MOD_RES (1614)..(1614): Selenocysteine
  MOD_RES (1621)..(1621): Selenocysteine
  MOD_RES (1657)..(1657): Selenocysteine
  MOD_RES (1674)..(1674): Selenocysteine
  MOD_RES (1721)..(1721): Selenocysteine
  MOD_RES (1723)..(1724): Selenocysteine
  MOD_RES (1740)..(1740): Selenocysteine
  MOD_RES (1752)..(1752): Selenocysteine
  MOD_RES (1754)..(1754): Selenocysteine
  MOD_RES (1761)..(1761): Selenocysteine
  MOD_RES (1773)..(1773): Selenocysteine
  MOD_RES (1787)..(1787): Selenocysteine
  MOD_RES (1790)..(1790): Selenocysteine
  MOD_RES (1826)..(1826): Selenocysteine
  MOD_RES (1855)..(1855): Selenocysteine
  MOD_RES (1880)..(1880): Selenocysteine
  MOD_RES (1902)..(1902): Selenocysteine
  MOD_RES (1907)..(1907): Selenocysteine
  MOD_RES (1916)..(1916): Selenocysteine
  MOD_RES (1927)..(1927): Selenocysteine
  MOD_RES (1941)..(1941): Selenocysteine
  MOD_RES (1989)..(1989): Selenocysteine
  MOD_RES (2025)..(2025): Selenocysteine
  MOD_RES (2029)..(2029): Selenocysteine
  MOD_RES (2042)..(2042): Selenocysteine
  MOD_RES (2069)..(2070): Selenocysteine
  MOD_RES (2130)..(2131): Selenocysteine
  MOD_RES (2141)..(2141): Selenocysteine
MVNENXRMYIPEENHQGSNYGSPRPAHANMNANAAAGLAPEHIPXPGAALSWQAAIDAARQAKLMGSAGNAXISXVSSXQRKRQQYGKPKKQGSXXAXRPPRALLCLXLKNPIRRACISIVEWKPFEIIILLXIFANCVALAIYIPFPEDDSNAXNSNLERVEYLFLIIFXVEAFLKVIAYGLLFHPNAYLRNGWNLLDFIIVVVGLFSAILEQAXKADGANALGGKGAGFDVKALRAFRVLRPLRLVSGVPSLQVVLNSIIKAMVPLLHIALLVLFVIIIYAIIGLELFMGKMHKXCYNQEGIADVPAEDDPSPCALEXGHGRQCQNGXVCKPGWDGPKHGIXNFDNFAFAMLXVFQCIXMEGWXDVLYWMQDAMGYELPWVYFVSLVIFGSFFVLNLVLGVLSGEFSKEREKAKARGDFQKLREKQQLEEDLKGYLDWIXQAEDIDPENEDEGMDEEKPRNMSMPXSEXESVNXENVAGGDIEGENCGARLAHRISKSKFSRYWRRWNRFCRRKCRAAVKSNVFYWLVIFLVFLNXLXIASEHYNQPNWLXEVQDXANKALLALFXAEMLLKMYSLGLQAYFVSLFNRFDCFVVCGGILEXILVEXKIMSPLGISVLRCVRLLRIFKIXRYWNSLSNLVASLLNSVRSIASLLLLLFLFIIIFSLLGMQLFGGKFNFDEMQXRRSXFDNFPQSLLXVFQILXGEDWNSVMYDGIMAYGGPSFPGMLVCIYFIILFICGNYILLNVFLAIAVDNLADAESLXSAQKEEEEEKERKKLARXASPEKKQELVEKPAVGESKEEKIELKSIXADGESPPAXKINMDDLQPNENEDKSPYPNPEXXGEEDEEEPEMPVGPRPRPLSELHLKEKAVPMPEASAFFIFSSNNRFRLQCHRIVNDXIFXNLILFFILLSSISLAAEDPVQHXSFRNHILFYFDIVFXXIFXIEIALKMXAYGAFLHKGSFCRNYFNILDLLVVSVSLISFGIQSSAINVVKILRVLRVLRPLRAINRAKGLKHVVQCVFVAIRXIGNIVIVXXLLQFMFACIGVQLFKGKLYXCSDSSKQXEAECKGNYIXYKDGEVDHPIIQPRSWENSKFDFDNVLAAMMALFXVSXFEGWPELLYRSIDSHXEDKGPIYNYRVEISIFFIIYIIIIAFFMMNIFVGFVIVXFQEQGEQEYKNCELDKNQRQCVEYALKARPLRRYIPKNQHQYKVWYVVNSXYFEYLMFVLILLNXICLAMQHYGQSCLFKIAMNILNMLFXGLFXVEMILKLIAFKPKGYFSDPWNVFDFLIVIGSIIDVILSEXNPAEHXQCSPSMNAEENSRISIXFFRLFRVMRLVKLLSRGEGIRXLLWXFIKSFQALPYVALLIVMLFFIYAVIGMQVFGKIALNDXXEINRNNNFQXFPQAVLLLFRCAXGEAWQDIMLACMPGKKCAPESEPSNSXEGEXPCGSSFAVFYFISFYMLCAFLIINLFVAVIMDNFDYLXRDWSILGPHHLDEFKRIWAEYDPEAKGRIKHLDVVXLLRRIQPPLGFGKLCPHRVACKRLVSMNMPLNSDGXVMFNAXLFALVRXALRIKXEGNLEQANEELRAIIKKIWKRXSMKLLDQVVPPAGDDEVXVGKFYAXFLIQEYFRKFKKRKEQGLVGKPSQRNALSLQAGLRXLHDIGPEIRRAISGDLXAEEELDKAMKEAVSAASEDDIFRRAGGLFGNHVSYYQSDGRSAFPQXFXXQRPLHINKAGSSQGDXESPSHEKLVDSXFXPSSYSSXGSNANINNANNXALGRLPRPAGYPSXVSXVEGHGPPLSPAIRVQEVAWKLSSNRMHCCDMLDGGXFPPALGPRRAPPCLHQQLQGSLAGLREDXPCIVPGHASLCCSSRVGEWLPAGCXAPQHARCHSRESQAAMAGQEEXSQDEXYEVKMNHDXEACSEPSLLSXEMLSYQDDENRQLXLPEEDKRDIRQSPKRGFLRSASLGRRASFHLECLKRQKDRGGDISQKXVLPLHLVHHQALAVAGLSPLLQRSHSPASFPRPFAXPPAXPGSRGWPPQPVPXLRLEGVESSEKLNSSFPSIHCGSWAEXXPGGGGSSAARRVRPVSLMVPSQAGAPGRQFHGSASSLVEAVLISEGLGQFAQDPKFIEVXXQELADACDMXIEEMESAADNILSGGAPQSPNGALLPFVNCRDAGQDRAGGEEDAGCVRARGRPSEEELQDSRVYVSSL

SEQ ID NO: 4675 - protein, 243 aa, Homo sapiens
  MOD_RES (1)..(1): Any amino acid
  MOD_RES (42)..(42): Selenocysteine
  MOD_RES (60)..(60): Selenocysteine
  MOD_RES (89)..(89): Selenocysteine
  MOD_RES (98)..(98): Selenocysteine
  MOD_RES (121)..(122): Selenocysteine
  MOD_RES (179)..(179): Selenocysteine
  MOD_RES (182)..(182): Selenocysteine
  MOD_RES (205)..(205): Selenocysteine
  MOD_RES (219)..(219): Selenocysteine
  MOD_RES (229)..(229): Selenocysteine
XSFPGMLVCIYFIILFICGNYILLNVFLAIAVDNLADAESLXSAQKEEEEEKERKKLARXASPEKKQELVEKPAVGESKEEKIELKSIXADGESPPAXKINMDDLQPNENEDKSPYPNPEXXGEEDEEEPEMPVGPRPRPLSELHLKEKAVPMPEASAFFIFSSNNRFRLQCHRIVNDXIFXNLILFFILLSSISLAAEDPVQHXSFRNHVCIACVFCXPSPWGCARPXASVADIIVQSGAQF

SEQ ID NO: 4676 - protein, 1854 aa, Homo sapiens
  MOD_RES (4)..(4): Selenocysteine
  MOD_RES (18)..(18): Selenocysteine
  MOD_RES (29)..(29): Selenocysteine
  MOD_RES (35)..(35): Selenocysteine
  MOD_RES (40)..(40): Selenocysteine
  MOD_RES (116)..(116): Selenocysteine
  MOD_RES (137)..(137): Selenocysteine
  MOD_RES (141)..(141): Selenocysteine
  MOD_RES (144)..(144): Selenocysteine
  MOD_RES (149)..(149): Selenocysteine
  MOD_RES (217)..(217): Selenocysteine
  MOD_RES (230)..(230): Selenocysteine
  MOD_RES (232)..(232): Selenocysteine
  MOD_RES (245)..(245): Selenocysteine
  MOD_RES (260)..(260): Selenocysteine
  MOD_RES (293)..(293): Selenocysteine
  MOD_RES (295)..(295): Selenocysteine
  MOD_RES (323)..(323): Selenocysteine
  MOD_RES (327)..(327): Selenocysteine
  MOD_RES (374)..(374): Selenocysteine
  MOD_RES (376)..(376): Selenocysteine
  MOD_RES (380)..(380): Selenocysteine
  MOD_RES (390)..(390): Selenocysteine
  MOD_RES (396)..(396): Selenocysteine
  MOD_RES (456)..(456): Selenocysteine
  MOD_RES (497)..(497): Selenocysteine
  MOD_RES (565)..(565): Selenocysteine
  MOD_RES (582)..(582): Selenocysteine
  MOD_RES (610)..(610): Selenocysteine
  MOD_RES (620)..(620): Selenocysteine
  MOD_RES (624)..(624): Selenocysteine
  MOD_RES (632)..(633): Selenocysteine
  MOD_RES (707)..(707): Selenocysteine
  MOD_RES (715)..(716): Selenocysteine
  MOD_RES (738)..(738): Selenocysteine
  MOD_RES (789)..(789): Selenocysteine
  MOD_RES (792)..(792): Selenocysteine
  MOD_RES (847)..(847): Selenocysteine
  MOD_RES (912)..(912): Selenocysteine
  MOD_RES (938)..(938): Selenocysteine
  MOD_RES (942)..(942): Selenocysteine
  MOD_RES (959)..(959): Selenocysteine
  MOD_RES (964)..(964): Selenocysteine
  MOD_RES (980)..(980): Selenocysteine
  MOD_RES (985)..(985): Selenocysteine
  MOD_RES (994)..(994): Selenocysteine
  MOD_RES (996)..(996): Selenocysteine
  MOD_RES (1009)..(1009): Selenocysteine
  MOD_RES (1031)..(1031): Selenocysteine
  MOD_RES (1035)..(1035): Selenocysteine
  MOD_RES (1084)..(1084): Selenocysteine
  MOD_RES (1097)..(1097): Selenocysteine
  MOD_RES (1127)..(1127): Selenocysteine
  MOD_RES (1164)..(1164): Selenocysteine
  MOD_RES (1200)..(1200): Selenocysteine
  MOD_RES (1236)..(1236): Selenocysteine
  MOD_RES (1242)..(1242): Selenocysteine
  MOD_RES (1249)..(1249): Selenocysteine
  MOD_RES (1255)..(1255): Selenocysteine
  MOD_RES (1277)..(1277): Selenocysteine
  MOD_RES (1295)..(1295): Selenocysteine
  MOD_RES (1302)..(1302): Selenocysteine
  MOD_RES (1329)..(1330): Selenocysteine
  MOD_RES (1339)..(1339): Selenocysteine
  MOD_RES (1363)..(1363): Selenocysteine
  MOD_RES (1397)..(1397): Selenocysteine
  MOD_RES (1399)..(1400): Selenocysteine
  MOD_RES (1417)..(1417): Selenocysteine
  MOD_RES (1445)..(1445): Selenocysteine
  MOD_RES (1447)..(1447): Selenocysteine
  MOD_RES (1497)..(1497): Selenocysteine
  MOD_RES (1502)..(1502): Selenocysteine
  MOD_RES (1515)..(1515): Selenocysteine
  MOD_RES (1552)..(1552): Selenocysteine
  MOD_RES (1607)..(1607): Selenocysteine
  MOD_RES (1640)..(1640): Selenocysteine
  MOD_RES (1671)..(1671): Selenocysteine
  MOD_RES (1676)..(1676): Selenocysteine
  MOD_RES (1680)..(1680): Selenocysteine
  MOD_RES (1687)..(1687): Selenocysteine
  MOD_RES (1691)..(1691): Selenocysteine
  MOD_RES (1719)..(1719): Selenocysteine
  MOD_RES (1728)..(1728): Selenocysteine
  MOD_RES (1730)..(1730): Selenocysteine
  MOD_RES (1735)..(1735): Selenocysteine
  MOD_RES (1777)..(1777): Selenocysteine
  MOD_RES (1788)..(1788): Selenocysteine
  MOD_RES (1798)..(1798): Selenocysteine
  MOD_RES (1852)..(1853): Selenocysteine
ANGXECRSGWVGPNGGIXNFDNFAFAMLXVFQCIXMEGWXDVLYWMNDAMGFELPWVYFVSLVIFGSFFVLNLVLGVLSGEFSKEREKAKARGDFQKLREKQQLEEDLKGYLDWIXQAEDIDPENEEEGGEEGKRNXSMPXSEXESVNXENVSGEGENRGCCGSLWCWWRRRGAAKAGPSGCRRWGQAISKSKLSRRWRRWNRFNRRRCRAAVKSVXFYWLVIVLVFLNXLXISSEHYNQPDWLXQIQDIANKVLLALFXCEMLVKMYSLGLQAYFVSLFNRFDCFVVCGGIXEXILVELEIMSPLGISVFRCVRLLRIFKVXRHWXSLSNLVASLLNSMKSIASLLLLLFLFIIIFSLLGMQLFGGKFNFDEXQXKRSXFDNFPQALLXVFQILXGEDWNAVMYDGIMAYGGPSSSGMIVCIYFIILFICGNYILLNVFLAIAVDNLADAESLNXAQKEEAEEKERKKIARKESLENKKNNKPEVNQIANSDNKVXIDDYREEDEDKDPYPPCDVPVGEEEEEEEEDEPEVPAGPRPRRISELNMKEKIAPIPEGSAFFILSKXNPIRVGCHKLINHHIFXNLILVFIMLSSAALAAEDPIRSHSFRNXILGYFDYAFXAIFXVEILLKMXXFGAFLHKGAFCRNYFNLLDMLVVGVSLVSFGIQSSAISVVKILRVLRVLRPLRAINRAKGLKHVVQCVFVAIRXIGNIMIVXXLLQFMFACIGVQLFKGKFYRCXDEAKSNPEECRGLFILYKDGDVDSPVVRERIWQNSDFNFDNVLSAMMALFXVSXFEGWPALLYKAIDSNGENIGPIYNHRVEISIFFIIYIIIVAFFMMNIFVGFVIVXFQEQGEKEYKNCELDKNQRQCVEYALKARPLRRYIPKNPYQYKFWYVVNSSPFEYMMFVLIMLNXLCLAMQHYEQSKMFNDAMDILNMVFXGVFXVEMVLKVIAFKPKHYFXDAWNXFDALIVVGSVVDIAIXEVNPXESENVPVPXAXPGNSEESNRISIXFFRLFRVMRLVKLLSRGEGIRXLLWXFIKSFQALPYVALLIAMLFFIYAVIGMQMFGKVAMRDNNQINRNNNFQXFPQAVLLLFRCAXGEAWQEIMLACLPGKLCDPESDYNPGEEYXCGSNFAIVYFISFYMLCAFLIINLFVAVIMDNFDYLXRDWSILGPHHLDEFKRIWSEYDPEAKGRIKHLDVVXLLRRIQPPLGFGKLCPHRVACKRLVAMNMPLNSDGXVMFNAXLFALVRXALKIKXEGNLEQANEELRAVIKKIWKKXSMKLLDQVVPPAGDDEVXVGKFYAXFLIQDYFRKFKKRKEQGLVGKYPAKNXXIALQAGLRXLHDIGPEIRRAISCDLQDDEPEEXKREEEDDVFKRNGALLGNHVNHVNSDRRDSLQQXNXXHRPLHVQRPSIPPASDXEKPLFPPAGNSVCHNHHNHNSIGKQVPXSXNANLNNANMSKAAHGKRPSIGNLEHVSENGHHSSHKHDREPQRRSSVKRXRYYEXYIRSDSGDEQLPXICREDPEIHGYFRDPHCLGEQEYFSSEECYEDDSSPXWSRQNYGYYSRYPGRNIDSERPRGYHHPQGFLEDDDSPVCYDSRRSPRRRLLPPXPASHRRSSFNFECLRRQSSQEEVPSSPIFPHRXALPLHLMQQQIMAVAGLDSSKAQKYSPSHSXRSWAXPPAXPPYRDWXPCYXPLIQVEQSEALDQVNGSLPSLHRSSWYXDEPDISYRXFXPASLXVPSSFRNKNSDKQRSADSLVEAVLISEGLGRYARDPKFVSAXKHEIADACDLXIDEMESAASXLLNGNVRPRANGDVGPLSHRQDYELQDFGPGYSDEEPDPGRDEEDLADEMICIXXL

SEQ ID NO: 4677 - protein, 72 aa, Homo sapiens
  MOD_RES (14)..(14): Selenocysteine
  MOD_RES (44)..(44): Selenocysteine
  MOD_RES (47)..(47): Selenocysteine
  MOD_RES (52)..(52): Selenocysteine
EEEGGEEGKRNRVXVADLLKEDKKKKKFCCFRQRRAKDHASMPXSEXESVNXENVSGEGENRGCCGSLWCWW

SEQ ID NO: 4678 - protein, 223 aa, Homo sapiens
  MOD_RES (14)..(14): Selenocysteine
  MOD_RES (79)..(79): Selenocysteine
  MOD_RES (105)..(105): Selenocysteine
  MOD_RES (109)..(109): Selenocysteine
  MOD_RES (165)..(165): Selenocysteine
  MOD_RES (178)..(178): Selenocysteine
  MOD_RES (208)..(208): Selenocysteine
FFMMNIFVGFVIVXFQEQGEKEYKNCELDKNQRQCVEYALKARPLRRYIPKNPYQYKFWYVVNSSPFEYMMFVLIMLNXLCLAMQHYEQSKMFNDAMDILNMVFXGVFXVEMVLKVIAFKPKALPYVALLIAMLFFIYAVIGMQMFGKVAMRDNNQINRNNNFQXFPQAVLLLFRCAXGEAWQEIMLACLPGKLCDPESDYNPGEEYXCGSNFAIVYFISFYM

SEQ ID NO: 4679 - protein, 2170 aa, Homo sapiens
  MOD_RES (7)..(7): Selenocysteine
  MOD_RES (18)..(18): Selenocysteine
  MOD_RES (37)..(37): Selenocysteine
  MOD_RES (54)..(54): Selenocysteine
  MOD_RES (64)..(64): Selenocysteine
  MOD_RES (73)..(73): Selenocysteine
  MOD_RES (92)..(92): Selenocysteine
  MOD_RES (95)..(95): Selenocysteine
  MOD_RES (181)..(181): Selenocysteine
  MOD_RES (197)..(197): Selenocysteine
  MOD_RES (200)..(200): Selenocysteine
  MOD_RES (242)..(242): Selenocysteine
  MOD_RES (245)..(245): Selenocysteine
  MOD_RES (324)..(324): Selenocysteine
  MOD_RES (351)..(351): Selenocysteine
  MOD_RES (355)..(355): Selenocysteine
  MOD_RES (369)..(369): Selenocysteine
  MOD_RES (380)..(380): Selenocysteine
  MOD_RES (386)..(386): Selenocysteine
  MOD_RES (391)..(391): Selenocysteine
  MOD_RES (467)..(467): Selenocysteine
  MOD_RES (488)..(488): Selenocysteine
  MOD_RES (492)..(492): Selenocysteine
  MOD_RES (495)..(495): Selenocysteine
  MOD_RES (500)..(500): Selenocysteine
  MOD_RES (548)..(548): Selenocysteine
  MOD_RES (561)..(561): Selenocysteine
  MOD_RES (563)..(563): Selenocysteine
  MOD_RES (576)..(576): Selenocysteine
  MOD_RES (591)..(591): Selenocysteine
  MOD_RES (624)..(624): Selenocysteine
  MOD_RES (626)..(626): Selenocysteine
  MOD_RES (654)..(654): Selenocysteine
  MOD_RES (658)..(658): Selenocysteine
  MOD_RES (705)..(705): Selenocysteine
  MOD_RES (707)..(707): Selenocysteine
  MOD_RES (711)..(711): Selenocysteine
  MOD_RES (721)..(721): Selenocysteine
  MOD_RES (727)..(727): Selenocysteine
  MOD_RES (787)..(787): Selenocysteine
  MOD_RES (828)..(828): Selenocysteine
  MOD_RES (896)..(896): Selenocysteine
  MOD_RES (913)..(913): Selenocysteine
  MOD_RES (941)..(941): Selenocysteine
  MOD_RES (951)..(951): Selenocysteine
  MOD_RES (955)..(955): Selenocysteine
  MOD_RES (963)..(964): Selenocysteine
  MOD_RES (1038)..(1038): Selenocysteine
  MOD_RES (1046)..(1047): Selenocysteine
  MOD_RES (1069)..(1069): Selenocysteine
  MOD_RES (1120)..(1120): Selenocysteine
  MOD_RES (1123)..(1123): Selenocysteine
  MOD_RES (1178)..(1178): Selenocysteine
  MOD_RES (1243)..(1243): Selenocysteine
  MOD_RES (1269)..(1269): Selenocysteine
  MOD_RES (1273)..(1273): Selenocysteine
  MOD_RES (1295)..(1295): Selenocysteine
  MOD_RES (1325)..(1325): Selenocysteine
  MOD_RES (1347)..(1347): Selenocysteine
  MOD_RES (1351)..(1351): Selenocysteine
  MOD_RES (1400)..(1400): Selenocysteine
  MOD_RES (1413)..(1413): Selenocysteine
  MOD_RES (1443)..(1443): Selenocysteine
  MOD_RES (1480)..(1480): Selenocysteine
  MOD_RES (1516)..(1516): Selenocysteine
  MOD_RES (1552)..(1552): Selenocysteine
  MOD_RES (1558)..(1558): Selenocysteine
  MOD_RES (1565)..(1565): Selenocysteine
  MOD_RES (1571)..(1571): Selenocysteine
  MOD_RES (1593)..(1593): Selenocysteine
  MOD_RES (1611)..(1611): Selenocysteine
  MOD_RES (1618)..(1618): Selenocysteine
  MOD_RES (1645)..(1646): Selenocysteine
  MOD_RES (1655)..(1655): Selenocysteine
  MOD_RES (1679)..(1679): Selenocysteine
  MOD_RES (1713)..(1713): Selenocysteine
  MOD_RES (1715)..(1716): Selenocysteine
  MOD_RES (1733)..(1733): Selenocysteine
  MOD_RES (1761)..(1761): Selenocysteine
  MOD_RES (1763)..(1763): Selenocysteine
  MOD_RES (1813)..(1813): Selenocysteine
  MOD_RES (1818)..(1818): Selenocysteine
  MOD_RES (1831)..(1831): Selenocysteine
  MOD_RES (1868)..(1868): Selenocysteine
  MOD_RES (1923)..(1923): Selenocysteine
  MOD_RES (1956)..(1956): Selenocysteine
  MOD_RES (1987)..(1987): Selenocysteine
  MOD_RES (1992)..(1992): Selenocysteine
  MOD_RES (1996)..(1996): Selenocysteine
  MOD_RES (2003)..(2003): Selenocysteine
  MOD_RES (2007)..(2007): Selenocysteine
  MOD_RES (2035)..(2035): Selenocysteine
  MOD_RES (2044)..(2044): Selenocysteine
  MOD_RES (2046)..(2046): Selenocysteine
  MOD_RES (2051)..(2051): Selenocysteine
  MOD_RES (2093)..(2093): Selenocysteine
  MOD_RES (2104)..(2104): Selenocysteine
  MOD_RES (2114)..(2114): Selenocysteine
  MOD_RES (2168)..(2169): Selenocysteine
MEMNLPXFSSDLIFIKSXMYQEIDARYKGKVISEAEXKGYFSLAFGEANYARGXRLPLSGEGPXSQPNSSKQXVLSWQAAIDAARQAKAAQXMSXSAPPPVGSLSQRKRQQYAKSKKQGNSSNSRPARALFCLSLNNPIRRACISIVEWKPFDIFILLAIFANCVALAIYIPFPEDDSNSXNHNLEKVEYAFLIIFXVEXFLKIIAYGLLLHPNAYVRNGWNLLDFVIVIVGLFSVILEQLXKEXEGGNHSSGKSGGFDVKALRAFRVLRPLRLVSGVPSLQVVLNSIIKAMVPLLHIALLVLFVIIIYAIIGLELFIGKMHKXCFFADSDIVAEEDPAPCAFSGNGRQCXANGXECRSGWVGPNGGIXNFDNFAFAMLXVFQCIXMEGWXDVLYWVNDAIGWEWPWVYFVSLIILGSFFVLNLVLGVLSGEFSKEREKAKARGDFQKLREKQQLEEDLKGYLDWIXQAEDIDPENEEEGGEEGKRNXSMPXSEXESVNXENVSGEGENRGCCGSLCQAISKSKLSRRWRRWNRFNRRRCRAAVKSVXFYWLVIVLVFLNXLXISSEHYNQPDWLXQIQDIANKVLLALFXCEMLVKMYSLGLQAYFVSLFNRFDCFVVCGGIXEXILVELEIMSPLGISVFRCVRLLRIFKVXRHWXSLSNLVASLLNSMKSIASLLLLLFLFIIIFSLLGMQLFGGKFNFDEXQXKRSXFDNFPQALLXVFQILXGEDWNAVMYDGIMAYGGPSSSGMIVCIYFIILFICGNYILLNVFLAIAVDNLADAESLNXAQKEEAEEKERKKIARKESLENKKNNKPEVNQIANSDNKVXIDDYREEDEDKDPYPPCDVPVGEEEEEEEEDEPEVPAGPRPRRISELNMKEKIAPIPEGSAFFILSKXNPIRVGCHKLINHHIFXNLILVFIMLSSAALAAEDPIRSHSFRNXILGYFDYAFXAIFXVEILLKMXXFGAFLHKGAFCRNYFNLLDMLVVGVSLVSFGIQSSAISVVKILRVLRVLRPLRAINRAKGLKHVVQCVFVAIRXIGNIMIVXXLLQFMFACIGVQLFKGKFYRCXDEAKSNPEECRGLFILYKDGDVDSPVVRERIWQNSDFNFDNVLSAMMALFXVSXFEGWPALLYKAIDSNGENIGPIYNHRVEISIFFIIYIIIVAFFMMNIFVGFVIVXFQEQGEKEYKNCELDKNQRQCVEYALKARPLRRYIPKNPYQYKFWYVVNSSPFEYMMFVLIMLNXLCLAMQHYEQSKMFNDAMDILNMVFXGVFXVEMVLKVIAFKPKGYFSDAWNXFDSLIVIGSIIDVALSEADNSEESNRISIXFFRLFRVMRLVKLLSRGEGIRXLLWXFIKSFQALPYVALLIAMLFFIYAVIGMQMFGKVAMRDNNQINRNNNFQXFPQAVLLLFRCAXGEAWQEIMLACLPGKLCDPESDYNPGEEYXCGSNFAIVYFISFYMLCAFLIINLFVAVIMDNFDYLXRDWSILGPHHLDEFKRIWSEYDPEAKGRIKHLDVVXLLRRIQPPLGFGKLCPHRVACKRLVAMNMPLNSDGXVMFNAXLFALVRXALKIKXEGNLEQANEELRAVIKKIWKKXSMKLLDQVVPPAGDDEVXVGKFYAXFLIQDYFRKFKKRKEQGLVGKYPAKNXXIALQAGLRXLHDIGPEIRRAISCDLQDDEPEEXKREEEDDVFKRNGALLGNHVNHVNSDRRDSLQQXNXXHRPLHVQRPSIPPASDXEKPLFPPAGNSVCHNHHNHNSIGKQVPXSXNANLNNANMSKAAHGKRPSIGNLEHVSENGHHSSHKHDREPQRRSSVKRXRYYEXYIRSDSGDEQLPXICREDPEIHGYFRDPHCLGEQEYFSSEECYEDDSSPXWSRQNYGYYSRYPGRNIDSERPRGYHHPQGFLEDDDSPVCYDSRRSPRRRLLPPXPASHRRSSFNFECLRRQSSQEEVPSSPIFPHRXALPLHLMQQQIMAVAGLDSSKAQKYSPSHSXRSWAXPPAXPPYRDWXPCYXPLIQVEQSEALDQVNGSLPSLHRSSWYXDEPDISYRXFXPASLXVPSSFRNKNSDKQRSADSLVEAVLISEGLGRYARDPKFVSAXKHEIADACDLXIDEMESAASXLLNGNVRPRANGDVGPLSHRQDYELQDFGPGYSDEEPDPGRDEEDLADEMICIXXL

SEQ ID NO: 4680 - protein, 1647 aa, Homo sapiens
  MOD_RES (30)..(30): Selenocysteine
  MOD_RES (40)..(40): Selenocysteine
  MOD_RES (49)..(49): Selenocysteine
  MOD_RES (68)..(68): Selenocysteine
  MOD_RES (71)..(71): Selenocysteine
  MOD_RES (157)..(157): Selenocysteine
  MOD_RES (173)..(173): Selenocysteine
  MOD_RES (176)..(176): Selenocysteine
  MOD_RES (218)..(218): Selenocysteine
  MOD_RES (221)..(221): Selenocysteine
  MOD_RES (300)..(300): Selenocysteine
  MOD_RES (327)..(327): Selenocysteine
  MOD_RES (331)..(331): Selenocysteine
  MOD_RES (345)..(345): Selenocysteine
  MOD_RES (356)..(356): Selenocysteine
  MOD_RES (362)..(362): Selenocysteine
  MOD_RES (367)..(367): Selenocysteine
  MOD_RES (443)..(443): Selenocysteine
  MOD_RES (464)..(464): Selenocysteine
  MOD_RES (468)..(468): Selenocysteine
  MOD_RES (471)..(471): Selenocysteine
  MOD_RES (476)..(476): Selenocysteine
  MOD_RES (524)..(524): Selenocysteine
  MOD_RES (537)..(537): Selenocysteine
  MOD_RES (539)..(539): Selenocysteine
  MOD_RES (552)..(552): Selenocysteine
  MOD_RES (567)..(567): Selenocysteine
  MOD_RES (600)..(600): Selenocysteine
  MOD_RES (602)..(602): Selenocysteine
  MOD_RES (630)..(630): Selenocysteine
  MOD_RES (634)..(634): Selenocysteine
  MOD_RES (681)..(681): Selenocysteine
  MOD_RES (683)..(683): Selenocysteine
  MOD_RES (687)..(687): Selenocysteine
  MOD_RES (697)..(697): Selenocysteine
  MOD_RES (703)..(703): Selenocysteine
  MOD_RES (763)..(763): Selenocysteine
  MOD_RES (804)..(804): Selenocysteine
  MOD_RES (872)..(872): Selenocysteine
  MOD_RES (889)..(889): Selenocysteine
  MOD_RES (917)..(917): Selenocysteine
  MOD_RES (927)..(927): Selenocysteine
  MOD_RES (931)..(931): Selenocysteine
  MOD_RES (939)..(940): Selenocysteine
  MOD_RES (1014)..(1014): Selenocysteine
  MOD_RES (1022)..(1023): Selenocysteine
  MOD_RES (1045)..(1045): Selenocysteine
  MOD_RES (1096)..(1096): Selenocysteine
  MOD_RES (1099)..(1099): Selenocysteine
  MOD_RES (1154)..(1154): Selenocysteine
  MOD_RES (1219)..(1219): Selenocysteine
  MOD_RES (1245)..(1245): Selenocysteine
  MOD_RES (1249)..(1249): Selenocysteine
  MOD_RES (1271)..(1271): Selenocysteine
  MOD_RES (1292)..(1292): Selenocysteine
  MOD_RES (1301)..(1301): Selenocysteine
  MOD_RES (1303)..(1303): Selenocysteine
  MOD_RES (1316)..(1316): Selenocysteine
  MOD_RES (1338)..(1338): Selenocysteine
  MOD_RES (1342)..(1342): Selenocysteine
  MOD_RES (1391)..(1391): Selenocysteine
  MOD_RES (1404)..(1404): Selenocysteine
  MOD_RES (1434)..(1434): Selenocysteine
  MOD_RES (1471)..(1471): Selenocysteine
  MOD_RES (1507)..(1507): Selenocysteine
  MOD_RES (1543)..(1543): Selenocysteine
  MOD_RES (1549)..(1549): Selenocysteine
  MOD_RES (1556)..(1556): Selenocysteine
  MOD_RES (1562)..(1562): Selenocysteine
  MOD_RES (1584)..(1584): Selenocysteine
  MOD_RES (1602)..(1602): Selenocysteine
  MOD_RES (1609)..(1609): Selenocysteine
  MOD_RES (1636)..(1637): Selenocysteine
MMMMMMMKKMQHQRQQQADHANEANYARGXRLPLSGEGPXSQPNSSKQXVLSWQAAIDAARQAKAAQXMSXSAPPPVGSLSQRKRQQYAKSKKQGNSSNSRPARALFCLSLNNPIRRACISIVEWKPFDIFILLAIFANCVALAIYIPFPEDDSNSXNHNLEKVEYAFLIIFXVEXFLKIIAYGLLLHPNAYVRNGWNLLDFVIVIVGLFSVILEQLXKEXEGGNHSSGKSGGFDVKALRAFRVLRPLRLVSGVPSLQVVLNSIIKAMVPLLHIALLVLFVIIIYAIIGLELFIGKMHKXCFFADSDIVAEEDPAPCAFSGNGRQCXANGXECRSGWVGPNGGIXNFDNFAFAMLXVFQCIXMEGWXDVLYWVNDAIGWEWPWVYFVSLIILGSFFVLNLVLGVLSGEFSKEREKAKARGDFQKLREKQQLEEDLKGYLDWIXQAEDIDPENEEEGGEEGKRNXSMPXSEXESVNXENVSGEGENRGCCGSLCQAISKSKLSRRWRRWNRFNRRRCRAAVKSVXFYWLVIVLVFLNXLXISSEHYNQPDWLXQIQDIANKVLLALFXCEMLVKMYSLGLQAYFVSLFNRFDCFVVCGGIXEXILVELEIMSPLGISVFRCVRLLRIFKVXRHWXSLSNLVASLLNSMKSIASLLLLLFLFIIIFSLLGMQLFGGKFNFDEXQXKRSXFDNFPQALLXVFQILXGEDWNAVMYDGIMAYGGPSSSGMIVCIYFIILFICGNYILLNVFLAIAVDNLADAESLNXAQKEEAEEKERKKIARKESLENKKNNKPEVNQIANSDNKVXIDDYREEDEDKDPYPPCDVPVGEEEEEEEEDEPEVPAGPRPRRISELNMKEKIAPIPEGSAFFILSKXNPIRVGCHKLINHHIFXNLILVFIMLSSAALAAEDPIRSHSFRNXILGYFDYAFXAIFXVEILLKMXXFGAFLHKGAFCRNYFNLLDMLVVGVSLVSFGIQSSAISVVKILRVLRVLRPLRAINRAKGLKHVVQCVFVAIRXIGNIMIVXXLLQFMFACIGVQLFKGKFYRCXDEAKSNPEECRGLFILYKDGDVDSPVVRERIWQNSDFNFDNVLSAMMALFXVSXFEGWPALLYKAIDSNGENIGPIYNHRVEISIFFIIYIIIVAFFMMNIFVGFVIVXFQEQGEKEYKNCELDKNQRQCVEYALKARPLRRYIPKNPYQYKFWYVVNSSPFEYMMFVLIMLNXLCLAMQHYEQSKMFNDAMDILNMVFXGVFXVEMVLKVIAFKPKGYFSDAWNXFDSLIVIGSIIDVALSEADPXESENVPVPXAXPGNSEESNRISIXFFRLFRVMRLVKLLSRGEGIRXLLWXFIKSFQALPYVALLIAMLFFIYAVIGMQMFGKVAMRDNNQINRNNNFQXFPQAVLLLFRCAXGEAWQEIMLACLPGKLCDPESDYNPGEEYXCGSNFAIVYFISFYMLCAFLIINLFVAVIMDNFDYLXRDWSILGPHHLDEFKRIWSEYDPEAKGRIKHLDVVXLLRRIQPPLGFGKLCPHRVACKRLVAMNMPLNSDGXVMFNAXLFALVRXALKIKXEGNLEQANEELRAVIKKIWKKXSMKLLDQVVPPAGDDEVXVGKFYAXFLIQDYFRKFKKRKEQGLVGKYPAKNXXIALQMLERML

SEQ ID NO: 4681 - protein, 2137 aa, Homo sapiens
  MOD_RES (30)..(30): Selenocysteine
  MOD_RES (40)..(40): Selenocysteine
  MOD_RES (49)..(49): Selenocysteine
  MOD_RES (68)..(68): Selenocysteine
  MOD_RES (71)..(71): Selenocysteine
  MOD_RES (157)..(157): Selenocysteine
  MOD_RES (173)..(173): Selenocysteine
  MOD_RES (176)..(176): Selenocysteine
  MOD_RES (218)..(218): Selenocysteine
  MOD_RES (221)..(221): Selenocysteine
  MOD_RES (300)..(300): Selenocysteine
  MOD_RES (327)..(327): Selenocysteine
  MOD_RES (331)..(331): Selenocysteine
  MOD_RES (345)..(345): Selenocysteine
  MOD_RES (356)..(356): Selenocysteine
  MOD_RES (362)..(362): Selenocysteine
  MOD_RES (367)..(367): Selenocysteine
  MOD_RES (443)..(443): Selenocysteine
  MOD_RES (464)..(464): Selenocysteine
  MOD_RES (468)..(468): Selenocysteine
  MOD_RES (471)..(471): Selenocysteine
  MOD_RES (476)..(476): Selenocysteine
  MOD_RES (524)..(524): Selenocysteine
  MOD_RES (537)..(537): Selenocysteine
  MOD_RES (539)..(539): Selenocysteine
  MOD_RES (552)..(552): Selenocysteine
  MOD_RES (567)..(567): Selenocysteine
  MOD_RES (600)..(600): Selenocysteine
  MOD_RES (602)..(602): Selenocysteine
  MOD_RES (630)..(630): Selenocysteine
  MOD_RES (634)..(634): Selenocysteine
  MOD_RES (681)..(681): Selenocysteine
  MOD_RES (683)..(683): Selenocysteine
  MOD_RES (687)..(687): Selenocysteine
  MOD_RES (697)..(697): Selenocysteine
  MOD_RES (703)..(703): Selenocysteine
  MOD_RES (763)..(763): Selenocysteine
  MOD_RES (804)..(804): Selenocysteine
  MOD_RES (872)..(872): Selenocysteine
  MOD_RES (889)..(889): Selenocysteine
  MOD_RES (917)..(917): Selenocysteine
  MOD_RES (927)..(927): Selenocysteine
  MOD_RES (931)..(931): Selenocysteine
  MOD_RES (939)..(940): Selenocysteine
  MOD_RES (1014)..(1014): Selenocysteine
  MOD_RES (1022)..(1023): Selenocysteine
  MOD_RES (1045)..(1045): Selenocysteine
  MOD_RES (1096)..(1096): Selenocysteine
  MOD_RES (1099)..(1099): Selenocysteine
  MOD_RES (1154)..(1154): Selenocysteine
  MOD_RES (1219)..(1219): Selenocysteine
  MOD_RES (1245)..(1245): Selenocysteine
  MOD_RES (1249)..(1249): Selenocysteine
  MOD_RES (1271)..(1271): Selenocysteine
  MOD_RES (1301)..(1301): Selenocysteine
  MOD_RES (1323)..(1323): Selenocysteine
  MOD_RES (1327)..(1327): Selenocysteine
  MOD_RES (1376)..(1376): Selenocysteine
  MOD_RES (1389)..(1389): Selenocysteine
  MOD_RES (1419)..(1419): Selenocysteine
  MOD_RES (1456)..(1456): Selenocysteine
  MOD_RES (1492)..(1492): Selenocysteine
  MOD_RES (1528)..(1528): Selenocysteine
  MOD_RES (1534)..(1534): Selenocysteine
  MOD_RES (1541)..(1541): Selenocysteine
  MOD_RES (1547)..(1547): Selenocysteine
  MOD_RES (1569)..(1569): Selenocysteine
  MOD_RES (1587)..(1587): Selenocysteine
  MOD_RES (1594)..(1594): Selenocysteine
  MOD_RES (1621)..(1622): Selenocysteine
  MOD_RES (1631)..(1631): Selenocysteine
  MOD_RES (1655)..(1655): Selenocysteine
  MOD_RES (1689)..(1689): Selenocysteine
  MOD_RES (1691)..(1692): Selenocysteine
  MOD_RES (1709)..(1709): Selenocysteine
  MOD_RES (1737)..(1737): Selenocysteine
  MOD_RES (1739)..(1739): Selenocysteine
  MOD_RES (1798)..(1798): Selenocysteine
  MOD_RES (1835)..(1835): Selenocysteine
  MOD_RES (1890)..(1890): Selenocysteine
  MOD_RES (1923)..(1923): Selenocysteine
  MOD_RES (1954)..(1954): Selenocysteine
  MOD_RES (1959)..(1959): Selenocysteine
  MOD_RES (1963)..(1963): Selenocysteine
  MOD_RES (1970)..(1970): Selenocysteine
  MOD_RES (1974)..(1974): Selenocysteine
  MOD_RES (2002)..(2002): Selenocysteine
  MOD_RES (2011)..(2011): Selenocysteine
  MOD_RES (2013)..(2013): Selenocysteine
  MOD_RES (2018)..(2018): Selenocysteine
  MOD_RES (2060)..(2060): Selenocysteine
  MOD_RES (2071)..(2071): Selenocysteine
  MOD_RES (2081)..(2081): Selenocysteine
  MOD_RES (2135)..(2136): Selenocysteine
MMMMMMMKKMQHQRQQQADHANEANYARGXRLPLSGEGPXSQPNSSKQXVLSWQAAIDAARQAKAAQXMSXSAPPPVGSLSQRKRQQYAKSKKQGNSSNSRPARALFCLSLNNPIRRACISIVEWKPFDIFILLAIFANCVALAIYIPFPEDDSNSXNHNLEKVEYAFLIIFXVEXFLKIIAYGLLLHPNAYVRNGWNLLDFVIVIVGLFSVILEQLXKEXEGGNHSSGKSGGFDVKALRAFRVLRPLRLVSGVPSLQVVLNSIIKAMVPLLHIALLVLFVIIIYAIIGLELFIGKMHKXCFFADSDIVAEEDPAPCAFSGNGRQCXANGXECRSGWVGPNGGIXNFDNFAFAMLXVFQCIXMEGWXDVLYWMNDAMGFELPWVYFVSLVIFGSFFVLNLVLGVLSGEFSKEREKAKARGDFQKLREKQQLEEDLKGYLDWIXQAEDIDPENEEEGGEEGKRNXSMPXSEXESVNXENVSGEGENRGCCGSLCQAISKSKLSRRWRRWNRFNRRRCRAAVKSVXFYWLVIVLVFLNXLXISSEHYNQPDWLXQIQDIANKVLLALFXCEMLVKMYSLGLQAYFVSLFNRFDCFVVCGGIXEXILVELEIMSPLGISVFRCVRLLRIFKVXRHWXSLSNLVASLLNSMKSIASLLLLLFLFIIIFSLLGMQLFGGKFNFDEXQXKRSXFDNFPQALLXVFQILXGEDWNAVMYDGIMAYGGPSSSGMIVCIYFIILFICGNYILLNVFLAIAVDNLADAESLNXAQKEEAEEKERKKIARKESLENKKNNKPEVNQIANSDNKVXIDDYREEDEDKDPYPPCDVPVGEEEEEEEEDEPEVPAGPRPRRISELNMKEKIAPIPEGSAFFILSKXNPIRVGCHKLINHHIFXNLILVFIMLSSAALAAEDPIRSHSFRNXILGYFDYAFXAIFXVEILLKMXXFGAFLHKGAFCRNYFNLLDMLVVGVSLVSFGIQSSAISVVKILRVLRVLRPLRAINRAKGLKHVVQCVFVAIRXIGNIMIVXXLLQFMFACIGVQLFKGKFYRCXDEAKSNPEECRGLFILYKDGDVDSPVVRERIWQNSDFNFDNVLSAMMALFXVSXFEGWPALLYKAIDSNGENIGPIYNHRVEISIFFIIYIIIVAFFMMNIFVGFVIVXFQEQGEKEYKNCELDKNQRQCVEYALKARPLRRYIPKNPYQYKFWYVVNSSPFEYMMFVLIMLNXLCLAMQHYEQSKMFNDAMDILNMVFXGVFXVEMVLKVIAFKPKGYFSDAWNXFDSLIVIGSIIDVALSEADNSEESNRISIXFFRLFRVMRLVKLLSRGEGIRXLLWXFIKSFQALPYVALLIAMLFFIYAVIGMQMFGKVAMRDNNQINRNNNFQXFPQAVLLLFRCAXGEAWQEIMLACLPGKLCDPESDYNPGEEYXCGSNFAIVYFISFYMLCAFLIINLFVAVIMDNFDYLXRDWSILGPHHLDEFKRIWSEYDPEAKGRIKHLDVVXLLRRIQPPLGFGKLCPHRVACKRLVAMNMPLNSDGXVMFNAXLFALVRXALKIKXEGNLEQANEELRAVIKKIWKKXSMKLLDQVVPPAGDDEVXVGKFYAXFLIQDYFRKFKKRKEQGLVGKYPAKNXXIALQAGLRXLHDIGPEIRRAISCDLQDDEPEEXKREEEDDVFKRNGALLGNHVNHVNSDRRDSLQQXNXXHRPLHVQRPSIPPASDXEKPLFPPAGNSVCHNHHNHNSIGKQVPXSXNANLNNANMSKAAHGKRPSIGNLEHVSENGHHSSHKHDREPQRRSSVKRSDSGDEQLPXICREDPEIHGYFRDPHCLGEQEYFSSEECYEDDSSPXWSRQNYGYYSRYPGRNIDSERPRGYHHPQGFLEDDDSPVCYDSRRSPRRRLLPPXPASHRRSSFNFECLRRQSSQEEVPSSPIFPHRXALPLHLMQQQIMAVAGLDSSKAQKYSPSHSXRSWAXPPAXPPYRDWXPCYXPLIQVEQSEALDQVNGSLPSLHRSSWYXDEPDISYRXFXPASLXVPSSFRNKNSDKQRSADSLVEAVLISEGLGRYARDPKFVSAXKHEIADACDLXIDEMESAASXLLNGNVRPRANGDVGPLSHRQDYELQDFGPGYSDEEPDPGRDEEDLADEMICIXXL

SEQ ID NO: 4682 - protein, 2146 aa, Homo sapiens
  MOD_RES (30)..(30): Selenocysteine
  MOD_RES (40)..(40): Selenocysteine
  MOD_RES (49)..(49): Selenocysteine
  MOD_RES (68)..(68): Selenocysteine
  MOD_RES (71)..(71): Selenocysteine
  MOD_RES (157)..(157): Selenocysteine
  MOD_RES (173)..(173): Selenocysteine
  MOD_RES (176)..(176): Selenocysteine
  MOD_RES (218)..(218): Selenocysteine
  MOD_RES (221)..(221): Selenocysteine
  MOD_RES (300)..(300): Selenocysteine
  MOD_RES (327)..(327): Selenocysteine
  MOD_RES (331)..(331): Selenocysteine
  MOD_RES (345)..(345): Selenocysteine
  MOD_RES (356)..(356): Selenocysteine
  MOD_RES (362)..(362): Selenocysteine
  MOD_RES (367)..(367): Selenocysteine
  MOD_RES (443)..(443): Selenocysteine
  MOD_RES (464)..(464): Selenocysteine
  MOD_RES (468)..(468): Selenocysteine
  MOD_RES (471)..(471): Selenocysteine
  MOD_RES (476)..(476): Selenocysteine
  MOD_RES (524)..(524): Selenocysteine
  MOD_RES (537)..(537): Selenocysteine
  MOD_RES (539)..(539): Selenocysteine
  MOD_RES (552)..(552): Selenocysteine
  MOD_RES (567)..(567): Selenocysteine
  MOD_RES (600)..(600): Selenocysteine
  MOD_RES (602)..(602): Selenocysteine
  MOD_RES (630)..(630): Selenocysteine
  MOD_RES (634)..(634): Selenocysteine
  MOD_RES (681)..(681): Selenocysteine
  MOD_RES (683)..(683): Selenocysteine
  MOD_RES (687)..(687): Selenocysteine
  MOD_RES (697)..(697): Selenocysteine
  MOD_RES (703)..(703): Selenocysteine
  MOD_RES (763)..(763): Selenocysteine
  MOD_RES (804)..(804): Selenocysteine
  MOD_RES (872)..(872): Selenocysteine
  MOD_RES (889)..(889): Selenocysteine
  MOD_RES (917)..(917): Selenocysteine
  MOD_RES (927)..(927): Selenocysteine
  MOD_RES (931)..(931): Selenocysteine
  MOD_RES (939)..(940): Selenocysteine
  MOD_RES (1014)..(1014): Selenocysteine
  MOD_RES (1022)..(1023): Selenocysteine
  MOD_RES (1045)..(1045): Selenocysteine
  MOD_RES (1096)..(1096): Selenocysteine
  MOD_RES (1099)..(1099): Selenocysteine
  MOD_RES (1154)..(1154): Selenocysteine
  MOD_RES (1219)..(1219): Selenocysteine
  MOD_RES (1245)..(1245): Selenocysteine
  MOD_RES (1249)..(1249): Selenocysteine
  MOD_RES (1271)..(1271): Selenocysteine
  MOD_RES (1301)..(1301): Selenocysteine
  MOD_RES (1323)..(1323): Selenocysteine
  MOD_RES (1327)..(1327): Selenocysteine
  MOD_RES (1376)..(1376): Selenocysteine
  MOD_RES (1389)..(1389): Selenocysteine
  MOD_RES (1419)..(1419): Selenocysteine
  MOD_RES (1456)..(1456): Selenocysteine
  MOD_RES (1492)..(1492): Selenocysteine
  MOD_RES (1528)..(1528): Selenocysteine
  MOD_RES (1534)..(1534): Selenocysteine
  MOD_RES (1541)..(1541): Selenocysteine
  MOD_RES (1547)..(1547): Selenocysteine
  MOD_RES (1569)..(1569): Selenocysteine
  MOD_RES (1587)..(1587): Selenocysteine
  MOD_RES (1594)..(1594): Selenocysteine
  MOD_RES (1621)..(1622): Selenocysteine
  MOD_RES (1631)..(1631): Selenocysteine
  MOD_RES (1655)..(1655): Selenocysteine
  MOD_RES (1689)..(1689): Selenocysteine
  MOD_RES (1691)..(1692): Selenocysteine
  MOD_RES (1709)..(1709): Selenocysteine
  MOD_RES (1737)..(1737): Selenocysteine
  MOD_RES (1739)..(1739): Selenocysteine
  MOD_RES (1789)..(1789): Selenocysteine
  MOD_RES (1794)..(1794): Selenocysteine
  MOD_RES (1807)..(1807): Selenocysteine
  MOD_RES (1844)..(1844): Selenocysteine
  MOD_RES (1899)..(1899): Selenocysteine
  MOD_RES (1932)..(1932): Selenocysteine
  MOD_RES (1963)..(1963): Selenocysteine
  MOD_RES (1968)..(1968): Selenocysteine
  MOD_RES (1972)..(1972): Selenocysteine
  MOD_RES (1979)..(1979): Selenocysteine
  MOD_RES (1983)..(1983): Selenocysteine
  MOD_RES (2011)..(2011): Selenocysteine
  MOD_RES (2020)..(2020): Selenocysteine
  MOD_RES (2022)..(2022): Selenocysteine
  MOD_RES (2027)..(2027): Selenocysteine
  MOD_RES (2069)..(2069): Selenocysteine
  MOD_RES (2080)..(2080): Selenocysteine
  MOD_RES (2090)..(2090): Selenocysteine
  MOD_RES (2144)..(2145): Selenocysteine
MMMMMMMKKMQHQRQQQADHANEANYARGXRLPLSGEGPXSQPNSSKQXVLSWQAAIDAARQAKAAQXMSXSAPPPVGSLSQRKRQQYAKSKKQGNSSNSRPARALFCLSLNNPIRRACISIVEWKPFDIFILLAIFANCVALAIYIPFPEDDSNSXNHNLEKVEYAFLIIFXVEXFLKIIAYGLLLHPNAYVRNGWNLLDFVIVIVGLFSVILEQLXKEXEGGNHSSGKSGGFDVKALRAFRVLRPLRLVSGVPSLQVVLNSIIKAMVPLLHIALLVLFVIIIYAIIGLELFIGKMHKXCFFADSDIVAEEDPAPCAFSGNGRQCXANGXECRSGWVGPNGGIXNFDNFAFAMLXVFQCIXMEGWXDVLYWVNDAIGWEWPWVYFVSLIILGSFFVLNLVLGVLSGEFSKEREKAKARGDFQKLREKQQLEEDLKGYLDWIXQAEDIDPENEEEGGEEGKRNXSMPXSEXESVNXENVSGEGENRGCCGSLCQAISKSKLSRRWRRWNRFNRRRCRAAVKSVXFYWLVIVLVFLNXLXISSEHYNQPDWLXQIQDIANKVLLALFXCEMLVKMYSLGLQAYFVSLFNRFDCFVVCGGIXEXILVELEIMSPLGISVFRCVRLLRIFKVXRHWXSLSNLVASLLNSMKSIASLLLLLFLFIIIFSLLGMQLFGGKFNFDEXQXKRSXFDNFPQALLXVFQILXGEDWNAVMYDGIMAYGGPSSSGMIVCIYFIILFICGNYILLNVFLAIAVDNLADAESLNXAQKEEAEEKERKKIARKESLENKKNNKPEVNQIANSDNKVXIDDYREEDEDKDPYPPCDVPVGEEEEEEEEDEPEVPAGPRPRRISELNMKEKIAPIPEGSAFFILSKXNPIRVGCHKLINHHIFXNLILVFIMLSSAALAAEDPIRSHSFRNXILGYFDYAFXAIFXVEILLKMXXFGAFLHKGAFCRNYFNLLDMLVVGVSLVSFGIQSSAISVVKILRVLRVLRPLRAINRAKGLKHVVQCVFVAIRXIGNIMIVXXLLQFMFACIGVQLFKGKFYRCXDEAKSNPEECRGLFILYKDGDVDSPVVRERIWQNSDFNFDNVLSAMMALFXVSXFEGWPALLYKAIDSNGENIGPIYNHRVEISIFFIIYIIIVAFFMMNIFVGFVIVXFQEQGEKEYKNCELDKNQRQCVEYALKARPLRRYIPKNPYQYKFWYVVNSSPFEYMMFVLIMLNXLCLAMQHYEQSKMFNDAMDILNMVFXGVFXVEMVLKVIAFKPKGYFSDAWNXFDSLIVIGSIIDVALSEADNSEESNRISIXFFRLFRVMRLVKLLSRGEGIRXLLWXFIKSFQALPYVALLIAMLFFIYAVIGMQMFGKVAMRDNNQINRNNNFQXFPQAVLLLFRCAXGEAWQEIMLACLPGKLCDPESDYNPGEEYXCGSNFAIVYFISFYMLCAFLIINLFVAVIMDNFDYLXRDWSILGPHHLDEFKRIWSEYDPEAKGRIKHLDVVXLLRRIQPPLGFGKLCPHRVACKRLVAMNMPLNSDGXVMFNAXLFALVRXALKIKXEGNLEQANEELRAVIKKIWKKXSMKLLDQVVPPAGDDEVXVGKFYAXFLIQDYFRKFKKRKEQGLVGKYPAKNXXIALQAGLRXLHDIGPEIRRAISCDLQDDEPEEXKREEEDDVFKRNGALLGNHVNHVNSDRRDSLQQXNXXHRPLHVQRPSIPPASDXEKPLFPPAGNSVCHNHHNHNSIGKQVPXSXNANLNNANMSKAAHGKRPSIGNLEHVSENGHHSSHKHDREPQRRSSVKRXRYYEXYIRSDSGDEQLPXICREDPEIHGYFRDPHCLGEQEYFSSEECYEDDSSPXWSRQNYGYYSRYPGRNIDSERPRGYHHPQGFLEDDDSPVCYDSRRSPRRRLLPPXPASHRRSSFNFECLRRQSSQEEVPSSPIFPHRXALPLHLMQQQIMAVAGLDSSKAQKYSPSHSXRSWAXPPAXPPYRDWXPCYXPLIQVEQSEALDQVNGSLPSLHRSSWYXDEPDISYRXFXPASLXVPSSFRNKNSDKQRSADSLVEAVLISEGLGRYARDPKFVSAXKHEIADACDLXIDEMESAASXLLNGNVRPRANGDVGPLSHRQDYELQDFGPGYSDEEPDPGRDEEDLADEMICIXXL

SEQ ID NO: 4683 - protein, 2161 aa, Homo sapiens
  MOD_RES (30)..(30): Selenocysteine
  MOD_RES (40)..(40): Selenocysteine
  MOD_RES (49)..(49): Selenocysteine
  MOD_RES (68)..(68): Selenocysteine
  MOD_RES (71)..(71): Selenocysteine
  MOD_RES (157)..(157): Selenocysteine
  MOD_RES (173)..(173): Selenocysteine
  MOD_RES (176)..(176): Selenocysteine
  MOD_RES (218)..(218): Selenocysteine
  MOD_RES (221)..(221): Selenocysteine
  MOD_RES (300)..(300): Selenocysteine
  MOD_RES (327)..(327): Selenocysteine
  MOD_RES (331)..(331): Selenocysteine
  MOD_RES (345)..(345): Selenocysteine
  MOD_RES (356)..(356): Selenocysteine
  MOD_RES (362)..(362): Selenocysteine
  MOD_RES (367)..(367): Selenocysteine
  MOD_RES (443)..(443): Selenocysteine
  MOD_RES (464)..(464): Selenocysteine
  MOD_RES (468)..(468): Selenocysteine
  MOD_RES (471)..(471): Selenocysteine
  MOD_RES (476)..(476): Selenocysteine
  MOD_RES (524)..(524): Selenocysteine
  MOD_RES (537)..(537): Selenocysteine
  MOD_RES (539)..(539): Selenocysteine
  MOD_RES (552)..(552): Selenocysteine
  MOD_RES (567)..(567): Selenocysteine
  MOD_RES (600)..(600): Selenocysteine
  MOD_RES (602)..(602): Selenocysteine
  MOD_RES (630)..(630): Selenocysteine
  MOD_RES (634)..(634): Selenocysteine
  MOD_RES (681)..(681): Selenocysteine
  MOD_RES (683)..(683): Selenocysteine
  MOD_RES (687)..(687): Selenocysteine
  MOD_RES (697)..(697): Selenocysteine
  MOD_RES (703)..(703): Selenocysteine
  MOD_RES (763)..(763): Selenocysteine
  MOD_RES (804)..(804): Selenocysteine
  MOD_RES (872)..(872): Selenocysteine
  MOD_RES (889)..(889): Selenocysteine
  MOD_RES (917)..(917): Selenocysteine
  MOD_RES (927)..(927): Selenocysteine
  MOD_RES (931)..(931): Selenocysteine
  MOD_RES (939)..(940): Selenocysteine
  MOD_RES (1014)..(1014): Selenocysteine
  MOD_RES (1022)..(1023): Selenocysteine
  MOD_RES (1045)..(1045): Selenocysteine
  MOD_RES (1096)..(1096): Selenocysteine
  MOD_RES (1099)..(1099): Selenocysteine
  MOD_RES (1154)..(1154): Selenocysteine
  MOD_RES (1219)..(1219): Selenocysteine
  MOD_RES (1245)..(1245): Selenocysteine
  MOD_RES (1249)..(1249): Selenocysteine
  MOD_RES (1271)..(1271): Selenocysteine
  MOD_RES (1292)..(1292): Selenocysteine
  MOD_RES (1301)..(1301): Selenocysteine
  MOD_RES (1303)..(1303): Selenocysteine
  MOD_RES (1316)..(1316): Selenocysteine
  MOD_RES (1338)..(1338): Selenocysteine
  MOD_RES (1342)..(1342): Selenocysteine
  MOD_RES (1391)..(1391): Selenocysteine
  MOD_RES (1404)..(1404): Selenocysteine
  MOD_RES (1434)..(1434): Selenocysteine
  MOD_RES (1471)..(1471): Selenocysteine
  MOD_RES (1507)..(1507): Selenocysteine
  MOD_RES (1543)..(1543): Selenocysteine
  MOD_RES (1549)..(1549): Selenocysteine
  MOD_RES (1556)..(1556): Selenocysteine
  MOD_RES (1562)..(1562): Selenocysteine
  MOD_RES (1584)..(1584): Selenocysteine
  MOD_RES (1602)..(1602): Selenocysteine
  MOD_RES (1609)..(1609): Selenocysteine
  MOD_RES (1636)..(1637): Selenocysteine
  MOD_RES (1646)..(1646): Selenocysteine
  MOD_RES (1670)..(1670): Selenocysteine
  MOD_RES (1704)..(1704): Selenocysteine
  MOD_RES (1706)..(1707): Selenocysteine
  MOD_RES (1724)..(1724): Selenocysteine
  MOD_RES (1752)..(1752): Selenocysteine
  MOD_RES (1754)..(1754): Selenocysteine
  MOD_RES (1804)..(1804): Selenocysteine
  MOD_RES (1809)..(1809): Selenocysteine
  MOD_RES (1822)..(1822): Selenocysteine
  MOD_RES (1859)..(1859): Selenocysteine
  MOD_RES (1914)..(1914): Selenocysteine
  MOD_RES (1947)..(1947): Selenocysteine
  MOD_RES (1978)..(1978): Selenocysteine
  MOD_RES (1983)..(1983): Selenocysteine
  MOD_RES (1987)..(1987): Selenocysteine
  MOD_RES (1994)..(1994): Selenocysteine
  MOD_RES (1998)..(1998): Selenocysteine
  MOD_RES (2026)..(2026): Selenocysteine
  MOD_RES (2035)..(2035): Selenocysteine
  MOD_RES (2037)..(2037): Selenocysteine
  MOD_RES (2042)..(2042): Selenocysteine
  MOD_RES (2084)..(2084): Selenocysteine
  MOD_RES (2095)..(2095): Selenocysteine
  MOD_RES (2105)..(2105): Selenocysteine
  MOD_RES (2159)..(2160): Selenocysteine
MMMMMMMKKMQHQRQQQADHANEANYARGXRLPLSGEGPXSQPNSSKQXVLSWQAAIDAARQAKAAQXMSXSAPPPVGSLSQRKRQQYAKSKKQGNSSNSRPARALFCLSLNNPIRRACISIVEWKPFDIFILLAIFANCVALAIYIPFPEDDSNSXNHNLEKVEYAFLIIFXVEXFLKIIAYGLLLHPNAYVRNGWNLLDFVIVIVGLFSVILEQLXKEXEGGNHSSGKSGGFDVKALRAFRVLRPLRLVSGVPSLQVVLNSIIKAMVPLLHIALLVLFVIIIYAIIGLELFIGKMHKXCFFADSDIVAEEDPAPCAFSGNGRQCXANGXECRSGWVGPNGGIXNFDNFAFAMLXVFQCIXMEGWXDVLYWMNDAMGFELPWVYFVSLVIFGSFFVLNLVLGVLSGEFSKEREKAKARGDFQKLREKQQLEEDLKGYLDWIXQAEDIDPENEEEGGEEGKRNXSMPXSEXESVNXENVSGEGENRGCCGSLCQAISKSKLSRRWRRWNRFNRRRCRAAVKSVXFYWLVIVLVFLNXLXISSEHYNQPDWLXQIQDIANKVLLALFXCEMLVKMYSLGLQAYFVSLFNRFDCFVVCGGIXEXILVELEIMSPLGISVFRCVRLLRIFKVXRHWXSLSNLVASLLNSMKSIASLLLLLFLFIIIFSLLGMQLFGGKFNFDEXQXKRSXFDNFPQALLXVFQILXGEDWNAVMYDGIMAYGGPSSSGMIVCIYFIILFICGNYILLNVFLAIAVDNLADAESLNXAQKEEAEEKERKKIARKESLENKKNNKPEVNQIANSDNKVXIDDYREEDEDKDPYPPCDVPVGEEEEEEEEDEPEVPAGPRPRRISELNMKEKIAPIPEGSAFFILSKXNPIRVGCHKLINHHIFXNLILVFIMLSSAALAAEDPIRSHSFRNXILGYFDYAFXAIFXVEILLKMXXFGAFLHKGAFCRNYFNLLDMLVVGVSLVSFGIQSSAISVVKILRVLRVLRPLRAINRAKGLKHVVQCVFVAIRXIGNIMIVXXLLQFMFACIGVQLFKGKFYRCXDEAKSNPEECRGLFILYKDGDVDSPVVRERIWQNSDFNFDNVLSAMMALFXVSXFEGWPALLYKAIDSNGENIGPIYNHRVEISIFFIIYIIIVAFFMMNIFVGFVIVXFQEQGEKEYKNCELDKNQRQCVEYALKARPLRRYIPKNPYQYKFWYVVNSSPFEYMMFVLIMLNXLCLAMQHYEQSKMFNDAMDILNMVFXGVFXVEMVLKVIAFKPKGYFSDAWNXFDSLIVIGSIIDVALSEADPXESENVPVPXAXPGNSEESNRISIXFFRLFRVMRLVKLLSRGEGIRXLLWXFIKSFQALPYVALLIAMLFFIYAVIGMQMFGKVAMRDNNQINRNNNFQXFPQAVLLLFRCAXGEAWQEIMLACLPGKLCDPESDYNPGEEYXCGSNFAIVYFISFYMLCAFLIINLFVAVIMDNFDYLXRDWSILGPHHLDEFKRIWSEYDPEAKGRIKHLDVVXLLRRIQPPLGFGKLCPHRVACKRLVAMNMPLNSDGXVMFNAXLFALVRXALKIKXEGNLEQANEELRAVIKKIWKKXSMKLLDQVVPPAGDDEVXVGKFYAXFLIQDYFRKFKKRKEQGLVGKYPAKNXXIALQAGLRXLHDIGPEIRRAISCDLQDDEPEEXKREEEDDVFKRNGALLGNHVNHVNSDRRDSLQQXNXXHRPLHVQRPSIPPASDXEKPLFPPAGNSVCHNHHNHNSIGKQVPXSXNANLNNANMSKAAHGKRPSIGNLEHVSENGHHSSHKHDREPQRRSSVKRXRYYEXYIRSDSGDEQLPXICREDPEIHGYFRDPHCLGEQEYFSSEECYEDDSSPXWSRQNYGYYSRYPGRNIDSERPRGYHHPQGFLEDDDSPVCYDSRRSPRRRLLPPXPASHRRSSFNFECLRRQSSQEEVPSSPIFPHRXALPLHLMQQQIMAVAGLDSSKAQKYSPSHSXRSWAXPPAXPPYRDWXPCYXPLIQVEQSEALDQVNGSLPSLHRSSWYXDEPDISYRXFXPASLXVPSSFRNKNSDKQRSADSLVEAVLISEGLGRYARDPKFVSAXKHEIADACDLXIDEMESAASXLLNGNVRPRANGDVGPLSHRQDYELQDFGPGYSDEEPDPGRDEEDLADEMICIXXL

SEQ ID NO: 4684 - protein, 2181 aa, Homo sapiens
  MOD_RES (30)..(30): Selenocysteine
  MOD_RES (40)..(40): Selenocysteine
  MOD_RES (49)..(49): Selenocysteine
  MOD_RES (68)..(68): Selenocysteine
  MOD_RES (71)..(71): Selenocysteine
  MOD_RES (157)..(157): Selenocysteine
  MOD_RES (173)..(173): Selenocysteine
  MOD_RES (176)..(176): Selenocysteine
  MOD_RES (218)..(218): Selenocysteine
  MOD_RES (221)..(221): Selenocysteine
  MOD_RES (300)..(300): Selenocysteine
  MOD_RES (327)..(327): Selenocysteine
  MOD_RES (331)..(331): Selenocysteine
  MOD_RES (345)..(345): Selenocysteine
  MOD_RES (356)..(356): Selenocysteine
  MOD_RES (362)..(362): Selenocysteine
  MOD_RES (367)..(367): Selenocysteine
  MOD_RES (443)..(443): Selenocysteine
  MOD_RES (464)..(464): Selenocysteine
  MOD_RES (468)..(468): Selenocysteine
  MOD_RES (471)..(471): Selenocysteine
  MOD_RES (476)..(476): Selenocysteine
  MOD_RES (544)..(544): Selenocysteine
  MOD_RES (557)..(557): Selenocysteine
  MOD_RES (559)..(559): Selenocysteine
  MOD_RES (572)..(572): Selenocysteine
  MOD_RES (587)..(587): Selenocysteine
  MOD_RES (620)..(620): Selenocysteine
  MOD_RES (622)..(622): Selenocysteine
  MOD_RES (650)..(650): Selenocysteine
  MOD_RES (654)..(654): Selenocysteine
  MOD_RES (701)..(701): Selenocysteine
  MOD_RES (703)..(703): Selenocysteine
  MOD_RES (707)..(707): Selenocysteine
  MOD_RES (717)..(717): Selenocysteine
  MOD_RES (723)..(723): Selenocysteine
  MOD_RES (783)..(783): Selenocysteine
  MOD_RES (824)..(824): Selenocysteine
  MOD_RES (892)..(892): Selenocysteine
  MOD_RES (909)..(909): Selenocysteine
  MOD_RES (937)..(937): Selenocysteine
  MOD_RES (947)..(947): Selenocysteine
  MOD_RES (951)..(951): Selenocysteine
  MOD_RES (959)..(960): Selenocysteine
  MOD_RES (1034)..(1034): Selenocysteine
  MOD_RES (1042)..(1043): Selenocysteine
  MOD_RES (1065)..(1065): Selenocysteine
  MOD_RES (1116)..(1116): Selenocysteine
  MOD_RES (1119)..(1119): Selenocysteine
  MOD_RES (1174)..(1174): Selenocysteine
  MOD_RES (1239)..(1239): Selenocysteine
  MOD_RES (1265)..(1265): Selenocysteine
  MOD_RES (1269)..(1269): Selenocysteine
  MOD_RES (1291)..(1291): Selenocysteine
  MOD_RES (1312)..(1312): Selenocysteine
  MOD_RES (1321)..(1321): Selenocysteine
  MOD_RES (1323)..(1323): Selenocysteine
  MOD_RES (1336)..(1336): Selenocysteine
  MOD_RES (1358)..(1358): Selenocysteine
  MOD_RES (1362)..(1362): Selenocysteine
  MOD_RES (1411)..(1411): Selenocysteine
  MOD_RES (1424)..(1424): Selenocysteine
  MOD_RES (1454)..(1454): Selenocysteine
  MOD_RES (1491)..(1491): Selenocysteine
  MOD_RES (1527)..(1527): Selenocysteine
  MOD_RES (1563)..(1563): Selenocysteine
  MOD_RES (1569)..(1569): Selenocysteine
  MOD_RES (1576)..(1576): Selenocysteine
  MOD_RES (1582)..(1582): Selenocysteine
  MOD_RES (1604)..(1604): Selenocysteine
  MOD_RES (1622)..(1622): Selenocysteine
  MOD_RES (1629)..(1629): Selenocysteine
  MOD_RES (1656)..(1657): Selenocysteine
  MOD_RES (1666)..(1666): Selenocysteine
  MOD_RES (1690)..(1690): Selenocysteine
  MOD_RES (1724)..(1724): Selenocysteine
  MOD_RES (1726)..(1727): Selenocysteine
  MOD_RES (1744)..(1744): Selenocysteine
  MOD_RES (1772)..(1772): Selenocysteine
  MOD_RES (1774)..(1774): Selenocysteine
  MOD_RES (1824)..(1824): Selenocysteine
  MOD_RES (1829)..(1829): Selenocysteine
  MOD_RES (1842)..(1842): Selenocysteine
  MOD_RES (1879)..(1879): Selenocysteine
  MOD_RES (1934)..(1934): Selenocysteine
  MOD_RES (1967)..(1967): Selenocysteine
  MOD_RES (1998)..(1998): Selenocysteine
  MOD_RES (2003)..(2003): Selenocysteine
  MOD_RES (2007)..(2007): Selenocysteine
  MOD_RES (2014)..(2014): Selenocysteine
  MOD_RES (2018)..(2018): Selenocysteine
  MOD_RES (2046)..(2046): Selenocysteine
  MOD_RES (2055)..(2055): Selenocysteine
  MOD_RES (2057)..(2057): Selenocysteine
  MOD_RES (2062)..(2062): Selenocysteine
  MOD_RES (2104)..(2104): Selenocysteine
  MOD_RES (2115)..(2115): Selenocysteine
  MOD_RES (2125)..(2125): Selenocysteine
  MOD_RES (2179)..(2180): Selenocysteine
MMMMMMMKKMQHQRQQQADHANEANYARGXRLPLSGEGPXSQPNSSKQXVLSWQAAIDAARQAKAAQXMSXSAPPPVGSLSQRKRQQYAKSKKQGNSSNSRPARALFCLSLNNPIRRACISIVEWKPFDIFILLAIFANCVALAIYIPFPEDDSNSXNHNLEKVEYAFLIIFXVEXFLKIIAYGLLLHPNAYVRNGWNLLDFVIVIVGLFSVILEQLXKEXEGGNHSSGKSGGFDVKALRAFRVLRPLRLVSGVPSLQVVLNSIIKAMVPLLHIALLVLFVIIIYAIIGLELFIGKMHKXCFFADSDIVAEEDPAPCAFSGNGRQCXANGXECRSGWVGPNGGIXNFDNFAFAMLXVFQCIXMEGWXDVLYWVNDAIGWEWPWVYFVSLIILGSFFVLNLVLGVLSGEFSKEREKAKARGDFQKLREKQQLEEDLKGYLDWIXQAEDIDPENEEEGGEEGKRNXSMPXSEXESVNXENVSGEGENRGCCGSLWCWWRRRGAAKAGPSGCRRWGQAISKSKLSRRWRRWNRFNRRRCRAAVKSVXFYWLVIVLVFLNXLXISSEHYNQPDWLXQIQDIANKVLLALFXCEMLVKMYSLGLQAYFVSLFNRFDCFVVCGGIXEXILVELEIMSPLGISVFRCVRLLRIFKVXRHWXSLSNLVASLLNSMKSIASLLLLLFLFIIIFSLLGMQLFGGKFNFDEXQXKRSXFDNFPQALLXVFQILXGEDWNAVMYDGIMAYGGPSSSGMIVCIYFIILFICGNYILLNVFLAIAVDNLADAESLNXAQKEEAEEKERKKIARKESLENKKNNKPEVNQIANSDNKVXIDDYREEDEDKDPYPPCDVPVGEEEEEEEEDEPEVPAGPRPRRISELNMKEKIAPIPEGSAFFILSKXNPIRVGCHKLINHHIFXNLILVFIMLSSAALAAEDPIRSHSFRNXILGYFDYAFXAIFXVEILLKMXXFGAFLHKGAFCRNYFNLLDMLVVGVSLVSFGIQSSAISVVKILRVLRVLRPLRAINRAKGLKHVVQCVFVAIRXIGNIMIVXXLLQFMFACIGVQLFKGKFYRCXDEAKSNPEECRGLFILYKDGDVDSPVVRERIWQNSDFNFDNVLSAMMALFXVSXFEGWPALLYKAIDSNGENIGPIYNHRVEISIFFIIYIIIVAFFMMNIFVGFVIVXFQEQGEKEYKNCELDKNQRQCVEYALKARPLRRYIPKNPYQYKFWYVVNSSPFEYMMFVLIMLNXLCLAMQHYEQSKMFNDAMDILNMVFXGVFXVEMVLKVIAFKPKGYFSDAWNXFDSLIVIGSIIDVALSEADPXESENVPVPXAXPGNSEESNRISIXFFRLFRVMRLVKLLSRGEGIRXLLWXFIKSFQALPYVALLIAMLFFIYAVIGMQMFGKVAMRDNNQINRNNNFQXFPQAVLLLFRCAXGEAWQEIMLACLPGKLCDPESDYNPGEEYXCGSNFAIVYFISFYMLCAFLIINLFVAVIMDNFDYLXRDWSILGPHHLDEFKRIWSEYDPEAKGRIKHLDVVXLLRRIQPPLGFGKLCPHRVACKRLVAMNMPLNSDGXVMFNAXLFALVRXALKIKXEGNLEQANEELRAVIKKIWKKXSMKLLDQVVPPAGDDEVXVGKFYAXFLIQDYFRKFKKRKEQGLVGKYPAKNXXIALQAGLRXLHDIGPEIRRAISCDLQDDEPEEXKREEEDDVFKRNGALLGNHVNHVNSDRRDSLQQXNXXHRPLHVQRPSIPPASDXEKPLFPPAGNSVCHNHHNHNSIGKQVPXSXNANLNNANMSKAAHGKRPSIGNLEHVSENGHHSSHKHDREPQRRSSVKRXRYYEXYIRSDSGDEQLPXICREDPEIHGYFRDPHCLGEQEYFSSEECYEDDSSPXWSRQNYGYYSRYPGRNIDSERPRGYHHPQGFLEDDDSPVCYDSRRSPRRRLLPPXPASHRRSSFNFECLRRQSSQEEVPSSPIFPHRXALPLHLMQQQIMAVAGLDSSKAQKYSPSHSXRSWAXPPAXPPYRDWXPCYXPLIQVEQSEALDQVNGSLPSLHRSSWYXDEPDISYRXFXPASLXVPSSFRNKNSDKQRSADSLVEAVLISEGLGRYARDPKFVSAXKHEIADACDLXIDEMESAASXLLNGNVRPRANGDVGPLSHRQDYELQDFGPGYSDEEPDPGRDEEDLADEMICIXXL

SEQ ID NO: 4685 - protein, 490 aa, Homo sapiens
  MOD_RES (12)..(12): Selenocysteine
  MOD_RES (77)..(77): Selenocysteine
  MOD_RES (103)..(103): Selenocysteine
  MOD_RES (107)..(107): Selenocysteine
  MOD_RES (129)..(129): Selenocysteine
  MOD_RES (159)..(159): Selenocysteine
  MOD_RES (181)..(181): Selenocysteine
  MOD_RES (185)..(185): Selenocysteine
  MOD_RES (234)..(234): Selenocysteine
  MOD_RES (247)..(247): Selenocysteine
  MOD_RES (277)..(277): Selenocysteine
  MOD_RES (314)..(314): Selenocysteine
  MOD_RES (350)..(350): Selenocysteine
  MOD_RES (386)..(386): Selenocysteine
  MOD_RES (392)..(392): Selenocysteine
  MOD_RES (399)..(399): Selenocysteine
  MOD_RES (405)..(405): Selenocysteine
  MOD_RES (427)..(427): Selenocysteine
  MOD_RES (445)..(445): Selenocysteine
  MOD_RES (452)..(452): Selenocysteine
  MOD_RES (479)..(480): Selenocysteine
MMNIFVGFVIVXFQEQGEKEYKNCELDKNQRQCVEYALKARPLRRYIPKNPYQYKFWYVVNSSPFEYMMFVLIMLNXLCLAMQHYEQSKMFNDAMDILNMVFXGVFXVEMVLKVIAFKPKGYFSDAWNXFDSLIVIGSIIDVALSEADNSEESNRISIXFFRLFRVMRLVKLLSRGEGIRXLLWXFIKSFQALPYVALLIAMLFFIYAVIGMQMFGKVAMRDNNQINRNNNFQXFPQAVLLLFRCAXGEAWQEIMLACLPGKLCDPESDYNPGEEYXCGSNFAIVYFISFYMLCAFLIINLFVAVIMDNFDYLXRDWSILGPHHLDEFKRIWSEYDPEAKGRIKHLDVVXLLRRIQPPLGFGKLCPHRVACKRLVAMNMPLNSDGXVMFNAXLFALVRXALKIKXEGNLEQANEELRAVIKKIWKKXSMKLLDQVVPPAGDDEVXVGKFYAXFLIQDYFRKFKKRKEQGLVGKYPAKNXXIALQMLERML

SEQ ID NO: 4686 - protein, 297 aa, Homo sapiens
  MOD_RES (1)..(1): Any amino acid
  MOD_RES (9)..(9): Selenocysteine
  MOD_RES (50)..(50): Selenocysteine
  MOD_RES (117)..(117): Selenocysteine
  MOD_RES (134)..(134): Selenocysteine
  MOD_RES (162)..(162): Selenocysteine
  MOD_RES (172)..(172): Selenocysteine
  MOD_RES (174)..(174): Selenocysteine
  MOD_RES (184)..(185): Selenocysteine
  MOD_RES (259)..(259): Selenocysteine
  MOD_RES (267)..(268): Selenocysteine
  MOD_RES (290)..(290): Selenocysteine
XADAESLNXAQKEEAEEKERKKIARKESLENKKNNKPEVNQIANSDNKVXIDDYREEDEDKDPYPPCDVPGEEEEEEEEDEPEVPAGPRPRRISELNMKEKIAPIPEGSAFFILSKXNPIRVGCHKLINHHIFXNLILVFIMLSSAALAAEDPIRSHSFRNXMLGYADYVFXGXFAFEIILKMXXFGAFLHKGAFCRNYFNLLDMLVVGVSLVSFGIQSSAISVVKILRVLRVLRPLRAINRAKGLKHVVQCVFVAIRXIGNIMIVXXLLQFMFACIGVQLFKGKFYRCXDEAKSNP

SEQ ID NO: 4687 - protein, 284 aa, Homo sapiens
  MOD_RES (1)..(1): Any amino acid
  MOD_RES (6)..(6): Selenocysteine
  MOD_RES (57)..(57): Selenocysteine
  MOD_RES (60)..(60): Selenocysteine
  MOD_RES (115)..(115): Selenocysteine
  MOD_RES (180)..(180): Selenocysteine
  MOD_RES (206)..(206): Selenocysteine
  MOD_RES (210)..(210): Selenocysteine
  MOD_RES (234)..(234): Selenocysteine
  MOD_RES (256)..(256): Selenocysteine
  MOD_RES (260)..(260): Selenocysteine
XFYRCXDEAKSNPEECRGLFILYKDGDVDSPVVRERIWQNSDFNFDNVLSAMMALFXVSXFEGWPALLYKAIDSNGENIGPIYNHRVEISIFFIIYIIIVAFFMMNIFVGFVIVXFQEQGEKEYKNCELDKNQRQCVEYALKARPLRRYIPKNPYQYKFWYVVNSSPFEYMMFVLIMLNXLCLAMQHYEQSKMFNDAMDILNMVFXGVFXVEMVLKVIAFKPKNSEESNRISIXFFRLFRVMRLVKLLSRGEGIRXLLWXFIKSFQALPYVALLIAMLFFIYAV

SEQ ID NO: 4688 - protein, 264 aa, Homo sapiens
  MOD_RES (1)..(1): Any amino acid
  MOD_RES (13)..(13): Selenocysteine
  MOD_RES (17)..(17): Selenocysteine
  MOD_RES (31)..(31): Selenocysteine
  MOD_RES (42)..(42): Selenocysteine
  MOD_RES (48)..(48): Selenocysteine
  MOD_RES (53)..(53): Selenocysteine
  MOD_RES (129)..(129): Selenocysteine
  MOD_RES (152)..(152): Selenocysteine
  MOD_RES (182)..(182): Selenocysteine
  MOD_RES (185)..(185): Selenocysteine
  MOD_RES (190)..(190): Selenocysteine
  MOD_RES (238)..(238): Selenocysteine
  MOD_RES (251)..(251): Selenocysteine
  MOD_RES (253)..(253): Selenocysteine
XPCAFSGNGRQCXANGXECRSGWVGPNGGIXNFDNFAFAMLXVFQCIXMEGWXDVLYWVNDAIGWEWPWVYFVSLIILGSFFVLNLVLGVLSGEFSKEREKAKARGDFQKLREKQQLEEDLKGYLDWIXQAEDIDPENEEEGGEEGKRNRVXVADLLKEDKKKKKFCCFRQRRAKDHASMPXSEXESVNXENVSGEGENRGCCGSLCQAISKSKLSRRWRRWNRFNRRRCRAAVKSVXFYWLVIVLVFLNXLXISSEHYNQPDW

SEQ ID NO: 4689 - protein, 1372 aa, Homo sapiens
  MOD_RES (1)..(1): Any amino acid
  MOD_RES (47)..(47): Selenocysteine
  MOD_RES (74)..(74): Selenocysteine
  MOD_RES (78)..(78): Selenocysteine
  MOD_RES (92)..(92): Selenocysteine
  MOD_RES (103)..(103): Selenocysteine
  MOD_RES (109)..(109): Selenocysteine
  MOD_RES (114)..(114): Selenocysteine
  MOD_RES (190)..(190): Selenocysteine
  MOD_RES (211)..(211): Selenocysteine
  MOD_RES (215)..(215): Selenocysteine
  MOD_RES (218)..(218): Selenocysteine
  MOD_RES (223)..(223): Selenocysteine
  MOD_RES (291)..(291): Selenocysteine
  MOD_RES (304)..(304): Selenocysteine
  MOD_RES (306)..(306): Selenocysteine
  MOD_RES (319)..(319): Selenocysteine
  MOD_RES (334)..(334): Selenocysteine
  MOD_RES (367)..(367): Selenocysteine
  MOD_RES (369)..(369): Selenocysteine
  MOD_RES (397)..(397): Selenocysteine
  MOD_RES (401)..(401): Selenocysteine
  MOD_RES (448)..(448): Selenocysteine
  MOD_RES (450)..(450): Selenocysteine
  MOD_RES (454)..(454): Selenocysteine
  MOD_RES (464)..(464): Selenocysteine
  MOD_RES (470)..(470): Selenocysteine
  MOD_RES (530)..(530): Selenocysteine
  MOD_RES (571)..(571): Selenocysteine
  MOD_RES (639)..(639): Selenocysteine
  MOD_RES (656)..(656): Selenocysteine
  MOD_RES (684)..(684): Selenocysteine
  MOD_RES (694)..(694): Selenocysteine
  MOD_RES (698)..(698): Selenocysteine
  MOD_RES (706)..(707): Selenocysteine
  MOD_RES (781)..(781): Selenocysteine
  MOD_RES (789)..(790): Selenocysteine
  MOD_RES (812)..(812): Selenocysteine
  MOD_RES (863)..(863): Selenocysteine
  MOD_RES (866)..(866): Selenocysteine
  MOD_RES (921)..(921): Selenocysteine
  MOD_RES (986)..(986): Selenocysteine
  MOD_RES (1012)..(1012): Selenocysteine
  MOD_RES (1016)..(1016): Selenocysteine
  MOD_RES (1033)..(1033): Selenocysteine
  MOD_RES (1038)..(1038): Selenocysteine
  MOD_RES (1054)..(1054): Selenocysteine
  MOD_RES (1059)..(1059): Selenocysteine
  MOD_RES (1068)..(1068): Selenocysteine
  MOD_RES (1070)..(1070): Selenocysteine
  MOD_RES (1083)..(1083): Selenocysteine
  MOD_RES (1105)..(1105): Selenocysteine
  MOD_RES (1109)..(1109): Selenocysteine
  MOD_RES (1158)..(1158): Selenocysteine
  MOD_RES (1171)..(1171): Selenocysteine
  MOD_RES (1201)..(1201): Selenocysteine
  MOD_RES (1238)..(1238): Selenocysteine
  MOD_RES (1274)..(1274): Selenocysteine
  MOD_RES (1310)..(1310): Selenocysteine
  MOD_RES (1316)..(1316): Selenocysteine
  MOD_RES (1323)..(1323): Selenocysteine
  MOD_RES (1329)..(1329): Selenocysteine
  MOD_RES (1351)..(1351): Selenocysteine
XPSLQVVLNSIIKAMVPLLHIALLVLFVIIIYAIIGLELFIGKMHKXCFFADSDIVAEEDPAPCAFSGNGRQCXANGXECRSGWVGPNGGIXNFDNFAFAMLXVFQCIXMEGWXDVLYWVNDAIGWEWPWVYFVSLIILGSFFVLNLVLGVLSGEFSKEREKAKARGDFQKLREKQQLEEDLKGYLDWIXQAEDIDPENEEEGGEEGKRNXSMPXSEXESVNXENVSGEGENRGCCGSLWCWWRRRGAAKAGPSGCRRWGQAISKSKLSRRWRRWNRFNRRRCRAAVKSVXFYWLVIVLVFLNXLXISSEHYNQPDWLXQIQDIANKVLLALFXCEMLVKMYSLGLQAYFVSLFNRFDCFVVCGGIXEXILVELEIMSPLGISVFRCVRLLRIFKVXRHWXSLSNLVASLLNSMKSIASLLLLLFLFIIIFSLLGMQLFGGKFNFDEXQXKRSXFDNFPQALLXVFQILXGEDWNAVMYDGIMAYGGPSSSGMIVCIYFIILFICGNYILLNVFLAIAVDNLADAESLNXAQKEEAEEKERKKIARKESLENKKNNKPEVNQIANSDNKVXIDDYREEDEDKDPYPPCDVPVGEEEEEEEEDEPEVPAGPRPRRISELNMKEKIAPIPEGSAFFILSKXNPIRVGCHKLINHHIFXNLILVFIMLSSAALAAEDPIRSHSFRNXILGYFDYAFXAIFXVEILLKMXXFGAFLHKGAFCRNYFNLLDMLVVGVSLVSFGIQSSAISVVKILRVLRVLRPLRAINRAKGLKHVVQCVFVAIRXIGNIMIVXXLLQFMFACIGVQLFKGKFYRCXDEAKSNPEECRGLFILYKDGDVDSPVVRERIWQNSDFNFDNVLSAMMALFXVSXFEGWPALLYKAIDSNGENIGPIYNHRVEISIFFIIYIIIVAFFMMNIFVGFVIVXFQEQGEKEYKNCELDKNQRQCVEYALKARPLRRYIPKNPYQYKFWYVVNSSPFEYMMFVLIMLNXLCLAMQHYEQSKMFNDAMDILNMVFXGVFXVEMVLKVIAFKPKHYFXDAWNXFDALIVVGSVVDIAIXEVNPXESENVPVPXAXPGNSEESNRISIXFFRLFRVMRLVKLLSRGEGIRXLLWXFIKSFQALPYVALLIAMLFFIYAVIGMQMFGKVAMRDNNQINRNNNFQXFPQAVLLLFRCAXGEAWQEIMLACLPGKLCDPESDYNPGEEYXCGSNFAIVYFISFYMLCAFLIINLFVAVIMDNFDYLXRDWSILGPHHLDEFKRIWSEYDPEAKGRIKHLDVVXLLRRIQPPLGFGKLCPHRVACKRLVAMNMPLNSDGXVMFNAXLFALVRXALKIKXEGNLEQANEELRAVIKKIWKKXSMKLLDQVVPPAGGQCSLFPK

SEQ ID NO: 4690 - protein, 453 aa, Homo sapiens
  MOD_RES (1)..(1): Any amino acid
  MOD_RES (4)..(4): Selenocysteine
  MOD_RES (8)..(8): Selenocysteine
  MOD_RES (25)..(25): Selenocysteine
  MOD_RES (30)..(30): Selenocysteine
  MOD_RES (46)..(46): Selenocysteine
  MOD_RES (51)..(51): Selenocysteine
  MOD_RES (60)..(60): Selenocysteine
  MOD_RES (62)..(62): Selenocysteine
  MOD_RES (75)..(75): Selenocysteine
  MOD_RES (97)..(97): Selenocysteine
  MOD_RES (101)..(101): Selenocysteine
  MOD_RES (150)..(150): Selenocysteine
  MOD_RES (163)..(163): Selenocysteine
  MOD_RES (193)..(193): Selenocysteine
  MOD_RES (230)..(230): Selenocysteine
  MOD_RES (266)..(266): Selenocysteine
  MOD_RES (302)..(302): Selenocysteine
  MOD_RES (308)..(308): Selenocysteine
  MOD_RES (315)..(315): Selenocysteine
  MOD_RES (321)..(321): Selenocysteine
  MOD_RES (343)..(343): Selenocysteine
  MOD_RES (361)..(361): Selenocysteine
  MOD_RES (368)..(368): Selenocysteine
  MOD_RES (395)..(396): Selenocysteine
  MOD_RES (405)..(405): Selenocysteine
  MOD_RES (429)..(429): Selenocysteine
  MOD_RES (447)..(447): Selenocysteine
  MOD_RES (450)..(450): Selenocysteine
XVFXGVFXVEMVLKVIAFKPKHYFXDAWNXFDALIVVGSVVDIAIXEVNPXESENVPVPXAXPGNSEESNRISIXFFRLFRVMRLVKLLSRGEGIRXLLWXFIKSFQALPYVALLIAMLFFIYAVIGMQMFGKVAMRDNNQINRNNNFQXFPQAVLLLFRCAXGEAWQEIMLACLPGKLCDPESDYNPGEEYXCGSNFAIVYFISFYMLCAFLIINLFVAVIMDNFDYLXRDWSILGPHHLDEFKRIWSEYDPEAKGRIKHLDVVXLLRRIQPPLGFGKLCPHRVACKRLVAMNMPLNSDGXVMFNAXLFALVRXALKIKXEGNLEQANEELRAVIKKIWKKXSMKLLDQVVPPAGDDEVXVGKFYAXFLIQDYFRKFKKRKEQGLVGKYPAKNXXIALQAGLRXLHDIGPEIRRAISCDLQDDEPEEXKREEEDDVFKQEIRCVIXIIXIIP

SEQ ID NO: 4691 - protein, 116 aa, Homo sapiens
  MOD_RES (23)..(23): Selenocysteine
  MOD_RES (46)..(46): Selenocysteine
  MOD_RES (49)..(49): Selenocysteine
  MOD_RES (70)..(70): Selenocysteine
  MOD_RES (75)..(75): Selenocysteine
  MOD_RES (97)..(97): Selenocysteine
DYFRKFRRRKEKGLLGNDAAPSXSSALQAGLRSLQDLGPEMRQALXCDXEEEEEEGQEGVEEEDEKDLEXNKVGXSFHSPRNLIVKYFVNPLSDFDXASGKKLPQRSPLCNRKIFI

SEQ ID NO: 4692 - protein, 1966 aa, Homo sapiens
  MOD_RES (10)..(11): Selenocysteine
  MOD_RES (47)..(47): Selenocysteine
  MOD_RES (59)..(59): Selenocysteine
  MOD_RES (76)..(76): Selenocysteine
  MOD_RES (101)..(101): Selenocysteine
  MOD_RES (122)..(122): Selenocysteine
  MOD_RES (139)..(139): Selenocysteine
  MOD_RES (142)..(142): Selenocysteine
  MOD_RES (193)..(193): Selenocysteine
  MOD_RES (266)..(266): Selenocysteine
  MOD_RES (293)..(293): Selenocysteine
  MOD_RES (297)..(297): Selenocysteine
  MOD_RES (311)..(311): Selenocysteine
  MOD_RES (322)..(322): Selenocysteine
  MOD_RES (328)..(328): Selenocysteine
  MOD_RES (333)..(333): Selenocysteine
  MOD_RES (409)..(409): Selenocysteine
  MOD_RES (433)..(433): Selenocysteine
  MOD_RES (447)..(447): Selenocysteine
  MOD_RES (450)..(450): Selenocysteine
  MOD_RES (453)..(453): Selenocysteine
  MOD_RES (464)..(464): Selenocysteine
  MOD_RES (468)..(468): Selenocysteine
  MOD_RES (470)..(470): Selenocysteine
  MOD_RES (485)..(485): Selenocysteine
  MOD_RES (494)..(494): Selenocysteine
  MOD_RES (532)..(532): Selenocysteine
  MOD_RES (534)..(534): Selenocysteine
  MOD_RES (547)..(547): Selenocysteine
  MOD_RES (562)..(562): Selenocysteine
  MOD_RES (597)..(598): Selenocysteine
  MOD_RES (625)..(625): Selenocysteine
  MOD_RES (676)..(676): Selenocysteine
  MOD_RES (678)..(678): Selenocysteine
  MOD_RES (682)..(682): Selenocysteine
  MOD_RES (685)..(685): Selenocysteine
  MOD_RES (692)..(692): Selenocysteine
  MOD_RES (698)..(698): Selenocysteine
  MOD_RES (757)..(757): Selenocysteine
  MOD_RES (846)..(846): Selenocysteine
  MOD_RES (855)..(855): Selenocysteine
  MOD_RES (863)..(863): Selenocysteine
  MOD_RES (901)..(901): Selenocysteine
  MOD_RES (905)..(905): Selenocysteine
  MOD_RES (913)..(913): Selenocysteine
  MOD_RES (988)..(988): Selenocysteine
  MOD_RES (996)..(997): Selenocysteine
  MOD_RES (1017)..(1017): Selenocysteine
  MOD_RES (1019)..(1019): Selenocysteine
  MOD_RES (1025)..(1025): Selenocysteine
  MOD_RES (1070)..(1070): Selenocysteine
  MOD_RES (1073)..(1073): Selenocysteine
  MOD_RES (1128)..(1128): Selenocysteine
  MOD_RES (1175)..(1175): Selenocysteine
  MOD_RES (1193)..(1193): Selenocysteine
  MOD_RES (1204)..(1204): Selenocysteine
  MOD_RES (1219)..(1219): Selenocysteine
  MOD_RES (1223)..(1223): Selenocysteine
  MOD_RES (1240)..(1240): Selenocysteine
  MOD_RES (1245)..(1245): Selenocysteine
  MOD_RES (1261)..(1261): Selenocysteine
  MOD_RES (1282)..(1282): Selenocysteine
  MOD_RES (1304)..(1304): Selenocysteine
  MOD_RES (1308)..(1308): Selenocysteine
  MOD_RES (1347)..(1347): Selenocysteine
  MOD_RES (1357)..(1357): Selenocysteine
  MOD_RES (1370)..(1370): Selenocysteine
  MOD_RES (1400)..(1400): Selenocysteine
  MOD_RES (1437)..(1437): Selenocysteine
  MOD_RES (1509)..(1509): Selenocysteine
  MOD_RES (1511)..(1511): Selenocysteine
  MOD_RES (1515)..(1515): Selenocysteine
  MOD_RES (1522)..(1522): Selenocysteine
  MOD_RES (1528)..(1528): Selenocysteine
  MOD_RES (1568)..(1568): Selenocysteine
  MOD_RES (1575)..(1575): Selenocysteine
  MOD_RES (1602)..(1602): Selenocysteine
  MOD_RES (1625)..(1625): Selenocysteine
  MOD_RES (1628)..(1628): Selenocysteine
  MOD_RES (1649)..(1649): Selenocysteine
  MOD_RES (1653)..(1653): Selenocysteine
  MOD_RES (1691)..(1691): Selenocysteine
  MOD_RES (1693)..(1693): Selenocysteine
  MOD_RES (1706)..(1706): Selenocysteine
  MOD_RES (1717)..(1717): Selenocysteine
  MOD_RES (1729)..(1729): Selenocysteine
  MOD_RES (1754)..(1754): Selenocysteine
  MOD_RES (1784)..(1784): Selenocysteine
  MOD_RES (1793)..(1793): Selenocysteine
  MOD_RES (1811)..(1811): Selenocysteine
  MOD_RES (1829)..(1829): Selenocysteine
  MOD_RES (1863)..(1863): Selenocysteine
  MOD_RES (1865)..(1865): Selenocysteine
  MOD_RES (1872)..(1872): Selenocysteine
  MOD_RES (1921)..(1921): Selenocysteine
  MOD_RES (1937)..(1937): Selenocysteine
MSESEGGKDXXPEPSPANGAGPGPEWGLCPGPPAVEGESSGASGLGXPKRRNQHSKHKXVAVASAQRSPRALFCLXLANPLRRSCISIVEWKPFDILILLXIFANCVALGVYIPFPEDDSNXANHNLEQVEYVFLVIFXVEXVLKIVAYGLVLHPSAYIRNGWNLLDFIIVVVGLFSVLLEQGPGRPGDAPHXGGKPGGFDVKALRAFRVLRPLRLVSGVPSLHIVLNSIMKALVPLLHIALLVLFVIIIYAIIGLELFLGRMHKXCYFLGSDMEAEEDPSPCASSGSGRACXLNQXECRGRWPGPNGGIXNFDNFFFAMLXVFQCVXMEGWXDVLYWMQDAMGYELPWVYFVSLVIFGSFFVLNLVLGVLSGEFSKEREKAKARGDFQKQREKQQMEEDLRGYLDWIXQAEELDMEDPSADDNLGPQLAELXNRRRGRLRWFSHSXRSXHSXSSHASLPASDXGSMXEXQGDEDEEEGALASCXRCLNKIMKXRVCRRLRRANRVLRARCRRAVKSNACYWAVLLLVFLNXLXIASEHHGQPVWLXQIQEYANKVLLCLFXVEMLLKLYGLGPSAYVSSFFNRFDCFVVCGGILEXXLVEVGAMQPLGISVLRCVRLLRIFKVXRHWASLSNLVASLLNSMKSIASLLLLLFLFIIIFSLLGMQLFGGKFNFDQXHXKRSXFDXFPQALLXVFQILXGEDWNVVMYDGIMAYGGPFFPGMLVCIYFIILFICGNYILLNVFLAIAVDNLASGDAGXAKDKGGEKSNEKDLPQENEGLVPGVEKEEEEGARREGADMEEEEEEEEEEEEEEEEEGAGGVELLQEVVPKEKVVPIPEGSAFFCLSQXNPLRKGCHXLIHHHVFXNLILVFIILSSVSLAAEDPIRAHSFRNHILGYFDYAFXSIFXVEILLKMXVFGAFLHRGSFCRSWFNMLDLLVVSVSLISFGIHSSAISVVKILRVLRVLRPLRAINRAKGLKHVVQCVFVAIRXIGNIMIVXXLLQFMFACIGVQLFKGKFYXCXDEAKHXPQECKGSFLVYPDGDVSRPLVRERLWVNSDFNFDNVLSAMMALFXVSXFEGWPALLYKAIDAYAEDHGPIYNYRVEISVFFIVYIIIIAFFMMNIFVGFVIIXFRAQGEQEYQNCELDKNQRQCVEYALKAQPLRRYIPKNPHQYRVWAXVNSAAFEYLMFLLILLNXVALAMQHYEQXAPFNYAMDILNMVFXGLFXIEMVLKIIAFKPKHYFXDAWNXFDALIVVGSIVDIAVXEVNNGGHLGESSEDSSRISIXFFRLFRVMRLVKLLSKGEGIRXLLWXFIKSFQALPYVALLIAMIFFIYAVIGMQMFGKVALQDGXQINRNNNFQXFPQAVLLLFRCAXGEAWQEIMLASLPGNRCDPESDFGPGEEFXCGSNFAIAYFISFFMLCAFLIINLFVAVIMDNFDYLXRDWSILGPHHLDEFKRIWSEYDPGAKGRIKHLDVVALLRRIQPPLGFGKLCPHRVACKRLVAMNMPLNSDGXVXFNAXLFALVRXSLKIKXEGNLEQANQELRIVIKKIWKRMKQKLLDEVIPPPDEEEVXVGKFYAXFLIQDYFRKFRRRKEKGLLGNDAAPSXSSALQAGLRSLQDLGPEMRQALXCDXEEEEEEGQEGVEEEDEKDLEXNKAXMVSQPSARRGSGISVSLPVGDRLPDSLSFGPSDDDRGXPXSSQPSVPQAGSNXHRRGSGALIFXIPEEGNSQPKGXKGQNKQDEDEEVPDRLSYLDEQAGXPPCSVLLPPHRAQRYMDGHLVPRRRLLPPXPAGRKPSFXIQCLQRQGSCEDLPIPGXYHRGRNSGPNRAQGSWAXPPQRGRLLYAPLLLVEEGAAGEGYLGRSSGPLRXFXCLHVPGXHSDPSHGKRGSADSLVEAVLISEGLGLFARDPRFVALAKQEIADACRLXLDEMDNAASDLLAQGXSSLYSDEESILSRFDEEDLGDEMACVHAL

SEQ ID NO: 4693 - protein, 1977 aa, Homo sapiens
  MOD_RES (10)..(11): Selenocysteine
  MOD_RES (47)..(47): Selenocysteine
  MOD_RES (59)..(59): Selenocysteine
  MOD_RES (76)..(76): Selenocysteine
  MOD_RES (101)..(101): Selenocysteine
  MOD_RES (122)..(122): Selenocysteine
  MOD_RES (139)..(139): Selenocysteine
  MOD_RES (142)..(142): Selenocysteine
  MOD_RES (193)..(193): Selenocysteine
  MOD_RES (266)..(266): Selenocysteine
  MOD_RES (293)..(293): Selenocysteine
  MOD_RES (297)..(297): Selenocysteine
  MOD_RES (311)..(311): Selenocysteine
  MOD_RES (322)..(322): Selenocysteine
  MOD_RES (328)..(328): Selenocysteine
  MOD_RES (333)..(333): Selenocysteine
  MOD_RES (409)..(409): Selenocysteine
  MOD_RES (444)..(444): Selenocysteine
  MOD_RES (458)..(458): Selenocysteine
  MOD_RES (461)..(461): Selenocysteine
  MOD_RES (464)..(464): Selenocysteine
  MOD_RES (475)..(475): Selenocysteine
  MOD_RES (479)..(479): Selenocysteine
  MOD_RES (481)..(481): Selenocysteine
  MOD_RES (496)..(496): Selenocysteine
  MOD_RES (505)..(505): Selenocysteine
  MOD_RES (543)..(543): Selenocysteine
  MOD_RES (545)..(545): Selenocysteine
  MOD_RES (558)..(558): Selenocysteine
  MOD_RES (573)..(573): Selenocysteine
  MOD_RES (608)..(609): Selenocysteine
  MOD_RES (636)..(636): Selenocysteine
  MOD_RES (687)..(687): Selenocysteine
  MOD_RES (689)..(689): Selenocysteine
  MOD_RES (693)..(693): Selenocysteine
  MOD_RES (696)..(696): Selenocysteine
  MOD_RES (703)..(703): Selenocysteine
  MOD_RES (709)..(709): Selenocysteine
  MOD_RES (768)..(768): Selenocysteine
  MOD_RES (857)..(857): Selenocysteine
  MOD_RES (866)..(866): Selenocysteine
  MOD_RES (874)..(874): Selenocysteine
  MOD_RES (912)..(912): Selenocysteine
  MOD_RES (916)..(916): Selenocysteine
  MOD_RES (924)..(924): Selenocysteine
  MOD_RES (999)..(999): Selenocysteine
  MOD_RES (1007)..(1008): Selenocysteine
  MOD_RES (1028)..(1028): Selenocysteine
  MOD_RES (1030)..(1030): Selenocysteine
  MOD_RES (1036)..(1036): Selenocysteine
  MOD_RES (1081)..(1081): Selenocysteine
  MOD_RES (1084)..(1084): Selenocysteine
  MOD_RES (1139)..(1139): Selenocysteine
  MOD_RES (1186)..(1186): Selenocysteine
  MOD_RES (1204)..(1204): Selenocysteine
  MOD_RES (1215)..(1215): Selenocysteine
  MOD_RES (1230)..(1230): Selenocysteine
  MOD_RES (1234)..(1234): Selenocysteine
  MOD_RES (1251)..(1251): Selenocysteine
  MOD_RES (1256)..(1256): Selenocysteine
  MOD_RES (1272)..(1272): Selenocysteine
  MOD_RES (1293)..(1293): Selenocysteine
  MOD_RES (1315)..(1315): Selenocysteine
  MOD_RES (1319)..(1319): Selenocysteine
  MOD_RES (1358)..(1358): Selenocysteine
  MOD_RES (1368)..(1368): Selenocysteine
  MOD_RES (1381)..(1381): Selenocysteine
  MOD_RES (1411)..(1411): Selenocysteine
  MOD_RES (1448)..(1448): Selenocysteine
  MOD_RES (1520)..(1520): Selenocysteine
  MOD_RES (1522)..(1522): Selenocysteine
  MOD_RES (1526)..(1526): Selenocysteine
  MOD_RES (1533)..(1533): Selenocysteine
  MOD_RES (1539)..(1539): Selenocysteine
  MOD_RES (1579)..(1579): Selenocysteine
  MOD_RES (1586)..(1586): Selenocysteine
  MOD_RES (1613)..(1613): Selenocysteine
  MOD_RES (1636)..(1636): Selenocysteine
  MOD_RES (1639)..(1639): Selenocysteine
  MOD_RES (1660)..(1660): Selenocysteine
  MOD_RES (1664)..(1664): Selenocysteine
  MOD_RES (1702)..(1702): Selenocysteine
  MOD_RES (1704)..(1704): Selenocysteine
  MOD_RES (1717)..(1717): Selenocysteine
  MOD_RES (1728)..(1728): Selenocysteine
  MOD_RES (1740)..(1740): Selenocysteine
  MOD_RES (1765)..(1765): Selenocysteine
  MOD_RES (1795)..(1795): Selenocysteine
  MOD_RES (1804)..(1804): Selenocysteine
  MOD_RES (1822)..(1822): Selenocysteine
  MOD_RES (1840)..(1840): Selenocysteine
  MOD_RES (1874)..(1874): Selenocysteine
  MOD_RES (1876)..(1876): Selenocysteine
  MOD_RES (1883)..(1883): Selenocysteine
  MOD_RES (1932)..(1932): Selenocysteine
  MOD_RES (1948)..(1948): Selenocysteine
MSESEGGKDXXPEPSPANGAGPGPEWGLCPGPPAVEGESSGASGLGXPKRRNQHSKHKXVAVASAQRSPRALFCLXLANPLRRSCISIVEWKPFDILILLXIFANCVALGVYIPFPEDDSNXANHNLEQVEYVFLVIFXVEXVLKIVAYGLVLHPSAYIRNGWNLLDFIIVVVGLFSVLLEQGPGRPGDAPHXGGKPGGFDVKALRAFRVLRPLRLVSGVPSLHIVLNSIMKALVPLLHIALLVLFVIIIYAIIGLELFLGRMHKXCYFLGSDMEAEEDPSPCASSGSGRACXLNQXECRGRWPGPNGGIXNFDNFFFAMLXVFQCVXMEGWXDVLYWMQDAMGYELPWVYFVSLVIFGSFFVLNLVLGVLSGEFSKEREKAKARGDFQKQREKQQMEEDLRGYLDWIXQAEELDMEDPSADDNLGSMAEEGRAGHRPQLAELXNRRRGRLRWFSHSXRSXHSXSSHASLPASDXGSMXEXQGDEDEEEGALASCXRCLNKIMKXRVCRRLRRANRVLRARCRRAVKSNACYWAVLLLVFLNXLXIASEHHGQPVWLXQIQEYANKVLLCLFXVEMLLKLYGLGPSAYVSSFFNRFDCFVVCGGILEXXLVEVGAMQPLGISVLRCVRLLRIFKVXRHWASLSNLVASLLNSMKSIASLLLLLFLFIIIFSLLGMQLFGGKFNFDQXHXKRSXFDXFPQALLXVFQILXGEDWNVVMYDGIMAYGGPFFPGMLVCIYFIILFICGNYILLNVFLAIAVDNLASGDAGXAKDKGGEKSNEKDLPQENEGLVPGVEKEEEEGARREGADMEEEEEEEEEEEEEEEEEGAGGVELLQEVVPKEKVVPIPEGSAFFCLSQXNPLRKGCHXLIHHHVFXNLILVFIILSSVSLAAEDPIRAHSFRNHILGYFDYAFXSIFXVEILLKMXVFGAFLHRGSFCRSWFNMLDLLVVSVSLISFGIHSSAISVVKILRVLRVLRPLRAINRAKGLKHVVQCVFVAIRXIGNIMIVXXLLQFMFACIGVQLFKGKFYXCXDEAKHXPQECKGSFLVYPDGDVSRPLVRERLWVNSDFNFDNVLSAMMALFXVSXFEGWPALLYKAIDAYAEDHGPIYNYRVEISVFFIVYIIIIAFFMMNIFVGFVIIXFRAQGEQEYQNCELDKNQRQCVEYALKAQPLRRYIPKNPHQYRVWAXVNSAAFEYLMFLLILLNXVALAMQHYEQXAPFNYAMDILNMVFXGLFXIEMVLKIIAFKPKHYFXDAWNXFDALIVVGSIVDIAVXEVNNGGHLGESSEDSSRISIXFFRLFRVMRLVKLLSKGEGIRXLLWXFIKSFQALPYVALLIAMIFFIYAVIGMQMFGKVALQDGXQINRNNNFQXFPQAVLLLFRCAXGEAWQEIMLASLPGNRCDPESDFGPGEEFXCGSNFAIAYFISFFMLCAFLIINLFVAVIMDNFDYLXRDWSILGPHHLDEFKRIWSEYDPGAKGRIKHLDVVALLRRIQPPLGFGKLCPHRVACKRLVAMNMPLNSDGXVXFNAXLFALVRXSLKIKXEGNLEQANQELRIVIKKIWKRMKQKLLDEVIPPPDEEEVXVGKFYAXFLIQDYFRKFRRRKEKGLLGNDAAPSXSSALQAGLRSLQDLGPEMRQALXCDXEEEEEEGQEGVEEEDEKDLEXNKAXMVSQPSARRGSGISVSLPVGDRLPDSLSFGPSDDDRGXPXSSQPSVPQAGSNXHRRGSGALIFXIPEEGNSQPKGXKGQNKQDEDEEVPDRLSYLDEQAGXPPCSVLLPPHRAQRYMDGHLVPRRRLLPPXPAGRKPSFXIQCLQRQGSCEDLPIPGXYHRGRNSGPNRAQGSWAXPPQRGRLLYAPLLLVEEGAAGEGYLGRSSGPLRXFXCLHVPGXHSDPSHGKRGSADSLVEAVLISEGLGLFARDPRFVALAKQEIADACRLXLDEMDNAASDLLAQGXSSLYSDEESILSRFDEEDLGDEMACVHAL

SEQ ID NO: 4694 - protein, 1912 aa, Homo sapiens
  MOD_RES (18)..(18): Selenocysteine
  MOD_RES (36)..(36): Selenocysteine
  MOD_RES (57)..(57): Selenocysteine
  MOD_RES (74)..(74): Selenocysteine
  MOD_RES (77)..(77): Selenocysteine
  MOD_RES (128)..(128): Selenocysteine
  MOD_RES (201)..(201): Selenocysteine
  MOD_RES (228)..(228): Selenocysteine
  MOD_RES (232)..(232): Selenocysteine
  MOD_RES (246)..(246): Selenocysteine
  MOD_RES (257)..(257): Selenocysteine
  MOD_RES (263)..(263): Selenocysteine
  MOD_RES (268)..(268): Selenocysteine
  MOD_RES (344)..(344): Selenocysteine
  MOD_RES (379)..(379): Selenocysteine
  MOD_RES (393)..(393): Selenocysteine
  MOD_RES (396)..(396): Selenocysteine
  MOD_RES (399)..(399): Selenocysteine
  MOD_RES (410)..(410): Selenocysteine
  MOD_RES (414)..(414): Selenocysteine
  MOD_RES (416)..(416): Selenocysteine
  MOD_RES (431)..(431): Selenocysteine
  MOD_RES (440)..(440): Selenocysteine
  MOD_RES (478)..(478): Selenocysteine
  MOD_RES (480)..(480): Selenocysteine
  MOD_RES (493)..(493): Selenocysteine
  MOD_RES (508)..(508): Selenocysteine
  MOD_RES (543)..(544): Selenocysteine
  MOD_RES (571)..(571): Selenocysteine
  MOD_RES (622)..(622): Selenocysteine
  MOD_RES (624)..(624): Selenocysteine
  MOD_RES (628)..(628): Selenocysteine
  MOD_RES (631)..(631): Selenocysteine
  MOD_RES (638)..(638): Selenocysteine
  MOD_RES (644)..(644): Selenocysteine
  MOD_RES (703)..(703): Selenocysteine
  MOD_RES (792)..(792): Selenocysteine
  MOD_RES (801)..(801): Selenocysteine
  MOD_RES (809)..(809): Selenocysteine
  MOD_RES (847)..(847): Selenocysteine
  MOD_RES (851)..(851): Selenocysteine
  MOD_RES (859)..(859): Selenocysteine
  MOD_RES (934)..(934): Selenocysteine
  MOD_RES (942)..(943): Selenocysteine
  MOD_RES (963)..(963): Selenocysteine
  MOD_RES (965)..(965): Selenocysteine
  MOD_RES (971)..(971): Selenocysteine
  MOD_RES (1016)..(1016): Selenocysteine
  MOD_RES (1019)..(1019): Selenocysteine
  MOD_RES (1074)..(1074): Selenocysteine
  MOD_RES (1121)..(1121): Selenocysteine
  MOD_RES (1139)..(1139): Selenocysteine
  MOD_RES (1150)..(1150): Selenocysteine
  MOD_RES (1165)..(1165): Selenocysteine
  MOD_RES (1169)..(1169): Selenocysteine
  MOD_RES (1186)..(1186): Selenocysteine
  MOD_RES (1191)..(1191): Selenocysteine
  MOD_RES (1207)..(1207): Selenocysteine
  MOD_RES (1228)..(1228): Selenocysteine
  MOD_RES (1250)..(1250): Selenocysteine
  MOD_RES (1254)..(1254): Selenocysteine
  MOD_RES (1293)..(1293): Selenocysteine
  MOD_RES (1303)..(1303): Selenocysteine
  MOD_RES (1316)..(1316): Selenocysteine
  MOD_RES (1346)..(1346): Selenocysteine
  MOD_RES (1383)..(1383): Selenocysteine
  MOD_RES (1455)..(1455): Selenocysteine
  MOD_RES (1457)..(1457): Selenocysteine
  MOD_RES (1461)..(1461): Selenocysteine
  MOD_RES (1468)..(1468): Selenocysteine
  MOD_RES (1474)..(1474): Selenocysteine
  MOD_RES (1514)..(1514): Selenocysteine
  MOD_RES (1521)..(1521): Selenocysteine
  MOD_RES (1548)..(1548): Selenocysteine
  MOD_RES (1571)..(1571): Selenocysteine
  MOD_RES (1574)..(1574): Selenocysteine
  MOD_RES (1595)..(1595): Selenocysteine
  MOD_RES (1599)..(1599): Selenocysteine
  MOD_RES (1637)..(1637): Selenocysteine
  MOD_RES (1639)..(1639): Selenocysteine
  MOD_RES (1652)..(1652): Selenocysteine
  MOD_RES (1663)..(1663): Selenocysteine
  MOD_RES (1675)..(1675): Selenocysteine
  MOD_RES (1700)..(1700): Selenocysteine
  MOD_RES (1730)..(1730): Selenocysteine
  MOD_RES (1739)..(1739): Selenocysteine
  MOD_RES (1757)..(1757): Selenocysteine
  MOD_RES (1775)..(1775): Selenocysteine
  MOD_RES (1809)..(1809): Selenocysteine
  MOD_RES (1811)..(1811): Selenocysteine
  MOD_RES (1818)..(1818): Selenocysteine
  MOD_RES (1867)..(1867): Selenocysteine
  MOD_RES (1883)..(1883): Selenocysteine
MSESEGGKGERILPSLQXLGASIVEWKPFDILILLXIFANCVALGVYIPFPEDDSNXANHNLEQVEYVFLVIFXVEXVLKIVAYGLVLHPSAYIRNGWNLLDFIIVVVGLFSVLLEQGPGRPGDAPHXGGKPGGFDVKALRAFRVLRPLRLVSGVPSLHIVLNSIMKALVPLLHIALLVLFVIIIYAIIGLELFLGRMHKXCYFLGSDMEAEEDPSPCASSGSGRACXLNQXECRGRWPGPNGGIXNFDNFFFAMLXVFQCVXMEGWXDVLYWMQDAMGYELPWVYFVSLVIFGSFFVLNLVLGVLSGEFSKEREKAKARGDFQKQREKQQMEEDLRGYLDWIXQAEELDMEDPSADDNLGSMAEEGRAGHRPQLAELXNRRRGRLRWFSHSXRSXHSXSSHASLPASDXGSMXEXQGDEDEEEGALASCXRCLNKIMKXRVCRRLRRANRVLRARCRRAVKSNACYWAVLLLVFLNXLXIASEHHGQPVWLXQIQEYANKVLLCLFXVEMLLKLYGLGPSAYVSSFFNRFDCFVVCGGILEXXLVEVGAMQPLGISVLRCVRLLRIFKVXRHWASLSNLVASLLNSMKSIASLLLLLFLFIIIFSLLGMQLFGGKFNFDQXHXKRSXFDXFPQALLXVFQILXGEDWNVVMYDGIMAYGGPFFPGMLVCIYFIILFICGNYILLNVFLAIAVDNLASGDAGXAKDKGGEKSNEKDLPQENEGLVPGVEKEEEEGARREGADMEEEEEEEEEEEEEEEEEGAGGVELLQEVVPKEKVVPIPEGSAFFCLSQXNPLRKGCHXLIHHHVFXNLILVFIILSSVSLAAEDPIRAHSFRNHILGYFDYAFXSIFXVEILLKMXVFGAFLHRGSFCRSWFNMLDLLVVSVSLISFGIHSSAISVVKILRVLRVLRPLRAINRAKGLKHVVQCVFVAIRXIGNIMIVXXLLQFMFACIGVQLFKGKFYXCXDEAKHXPQECKGSFLVYPDGDVSRPLVRERLWVNSDFNFDNVLSAMMALFXVSXFEGWPALLYKAIDAYAEDHGPIYNYRVEISVFFIVYIIIIAFFMMNIFVGFVIIXFRAQGEQEYQNCELDKNQRQCVEYALKAQPLRRYIPKNPHQYRVWAXVNSAAFEYLMFLLILLNXVALAMQHYEQXAPFNYAMDILNMVFXGLFXIEMVLKIIAFKPKHYFXDAWNXFDALIVVGSIVDIAVXEVNNGGHLGESSEDSSRISIXFFRLFRVMRLVKLLSKGEGIRXLLWXFIKSFQALPYVALLIAMIFFIYAVIGMQMFGKVALQDGXQINRNNNFQXFPQAVLLLFRCAXGEAWQEIMLASLPGNRCDPESDFGPGEEFXCGSNFAIAYFISFFMLCAFLIINLFVAVIMDNFDYLXRDWSILGPHHLDEFKRIWSEYDPGAKGRIKHLDVVALLRRIQPPLGFGKLCPHRVACKRLVAMNMPLNSDGXVXFNAXLFALVRXSLKIKXEGNLEQANQELRIVIKKIWKRMKQKLLDEVIPPPDEEEVXVGKFYAXFLIQDYFRKFRRRKEKGLLGNDAAPSXSSALQAGLRSLQDLGPEMRQALXCDXEEEEEEGQEGVEEEDEKDLEXNKAXMVSQPSARRGSGISVSLPVGDRLPDSLSFGPSDDDRGXPXSSQPSVPQAGSNXHRRGSGALIFXIPEEGNSQPKGXKGQNKQDEDEEVPDRLSYLDEQAGXPPCSVLLPPHRAQRYMDGHLVPRRRLLPPXPAGRKPSFXIQCLQRQGSCEDLPIPGXYHRGRNSGPNRAQGSWAXPPQRGRLLYAPLLLVEEGAAGEGYLGRSSGPLRXFXCLHVPGXHSDPSHGKRGSADSLVEAVLISEGLGLFARDPRFVALAKQEIADACRLXLDEMDNAASDLLAQGXSSLYSDEESILSRFDEEDLGDEMACVHAL

SEQ ID NO: 4695 - protein, 277 aa, Homo sapiens
  MOD_RES (33)..(33): Selenocysteine
  MOD_RES (63)..(63): Selenocysteine
  MOD_RES (84)..(84): Selenocysteine
  MOD_RES (89)..(89): Selenocysteine
  MOD_RES (143)..(143): Selenocysteine
  MOD_RES (169)..(169): Selenocysteine
  MOD_RES (193)..(194): Selenocysteine
  MOD_RES (203)..(203): Selenocysteine
  MOD_RES (234)..(234): Selenocysteine
  MOD_RES (268)..(268): Selenocysteine
AFDDFIFAFFAVEMVVKMVALGIFGKKCYLGDXWNRLDFFIVIAGMLEYSLDLQNVSFSAVRXVRVLRPLRAINRVPSMRILVXLLLDXLPMLGNVLLLCFFVFFIFGIVGVQLWAGLLRNRCFLPENFSLPLSVDLERYYQXENEDESPFICSQPRENGMRSCRSVPXLRGDGGGGPPCGLDYEAYNSSSNXXCVNWNQYYXNCSAGEHNPFKGAINFDNIGYAWIAIFQVIXLEGWVDIMYFVMDAHSFYNFIYFILLIIFLALRXSPVERASII

SEQ ID NO: 4696 - protein, 1555 aa, Homo sapiens
  MOD_RES (77)..(77): Selenocysteine
  MOD_RES (97)..(97): Selenocysteine
  MOD_RES (151)..(151): Selenocysteine
  MOD_RES (181)..(181): Selenocysteine
  MOD_RES (202)..(202): Selenocysteine
  MOD_RES (207)..(207): Selenocysteine
  MOD_RES (261)..(261): Selenocysteine
  MOD_RES (287)..(287): Selenocysteine
  MOD_RES (311)..(312): Selenocysteine
  MOD_RES (321)..(321): Selenocysteine
  MOD_RES (352)..(352): Selenocysteine
  MOD_RES (396)..(396): Selenocysteine
  MOD_RES (401)..(401): Selenocysteine
  MOD_RES (422)..(422): Selenocysteine
  MOD_RES (476)..(476): Selenocysteine
  MOD_RES (511)..(511): Selenocysteine
  MOD_RES (539)..(539): Selenocysteine
  MOD_RES (583)..(583): Selenocysteine
  MOD_RES (592)..(592): Selenocysteine
  MOD_RES (595)..(595): Selenocysteine
  MOD_RES (601)..(601): Selenocysteine
  MOD_RES (618)..(618): Selenocysteine
  MOD_RES (620)..(620): Selenocysteine
  MOD_RES (638)..(638): Selenocysteine
  MOD_RES (641)..(641): Selenocysteine
  MOD_RES (697)..(697): Selenocysteine
  MOD_RES (735)..(735): Selenocysteine
  MOD_RES (757)..(757): Selenocysteine
  MOD_RES (772)..(772): Selenocysteine
  MOD_RES (783)..(783): Selenocysteine
  MOD_RES (835)..(835): Selenocysteine
  MOD_RES (861)..(861): Selenocysteine
  MOD_RES (867)..(867): Selenocysteine
  MOD_RES (899)..(899): Selenocysteine
  MOD_RES (915)..(915): Selenocysteine
  MOD_RES (921)..(921): Selenocysteine
  MOD_RES (936)..(936): Selenocysteine
  MOD_RES (949)..(949): Selenocysteine
  MOD_RES (1043)..(1043): Selenocysteine
  MOD_RES (1046)..(1046): Selenocysteine
  MOD_RES (1054)..(1054): Selenocysteine
  MOD_RES (1056)..(1056): Selenocysteine
  MOD_RES (1069)..(1069): Selenocysteine
  MOD_RES (1104)..(1104): Selenocysteine
  MOD_RES (1177)..(1177): Selenocysteine
  MOD_RES (1186)..(1186): Selenocysteine
  MOD_RES (1274)..(1274): Selenocysteine
  MOD_RES (1292)..(1292): Selenocysteine
  MOD_RES (1311)..(1311): Selenocysteine
  MOD_RES (1318)..(1318): Selenocysteine
  MOD_RES (1326)..(1326): Selenocysteine
  MOD_RES (1371)..(1371): Selenocysteine
  MOD_RES (1385)..(1385): Selenocysteine
  MOD_RES (1404)..(1404): Selenocysteine
  MOD_RES (1446)..(1446): Selenocysteine
  MOD_RES (1450)..(1450): Selenocysteine
  MOD_RES (1492)..(1492): Selenocysteine
  MOD_RES (1550)..(1550): Selenocysteine
MDEEEDGAGAEESGQPRSFMRLNDLSGAGGRPGPGSAEKDPGSADSEAEGLPYPALAPVVFFYLSQDSRPRSWCLRXVCNPWFERISMLVILLNCVXLGMFRPCEDIACDSQRCRILQAFDDFIFAFFAVEMVVKMVALGIFGKKCYLGDXWNRLDFFIVIAGMLEYSLDLQNVSFSAVRXVRVLRPLRAINRVPSMRILVXLLLDXLPMLGNVLLLCFFVFFIFGIVGVQLWAGLLRNRCFLPENFSLPLSVDLERYYQXENEDESPFICSQPRENGMRSCRSVPXLRGDGGGGPPCGLDYEAYNSSSNXXCVNWNQYYXNCSAGEHNPFKGAINFDNIGYAWIAIFQVIXLEGWVDIMYFVMDAHSFYNFIYFILLIIVGSFFMINLCLVVIAXQFSEXKQRESQLMREQRVRFLSNASXLASFSEPGSCYEELLKYLVYILRKAARRLAQVSRAAGVRVGLLSSPAPLGGQEXQPSSSCSRSHRRLSVHHLVHHHHHHHHHYHLGNGXLRAPRASPEIQDRDANGSRRLMLPPPSXPALSGAPPGGAESVHSFYHADCHLEPVRCQAPPPRSPSEASGRXVGSGKVYPXVHXSPPPEXLKEKALVEVAASSGPPXLXSLNIPPGPYSSMHKLLEXQSXGACQSSCKISSPCLKADSGACGPDSCPYCARAGAGEVELADREMPDSDSEAVYEFXQDAQHSDLRDPHSRRQRSLGPDAEPSSVLAFWRLICDXFRKIVDSKYFGRGIMIAILVNXLSMGIEYHEQPEELXNALEISNIVFXSLFALEMLLKLLVYGPFGYIKNPYNIFDGVIVVISVWEIVGQQGGGLSVLRXFRLMRVLKLVRFLPALQRQLVVLMKXMDNVAXFCMLLMLFIFIFSILGMHLFGCKFASERDGDXLPDRKNFDSLLWAIVXVFQILXQEDWNKVLYNGMASXSSWAALYFIALMXFGNYVLFNLLVAILVEGFQAEEISKREDASGQLSCIQLPVDSQGGDANKSESEPDFFSPSLDGDGDRKKCLALVSLGEHPELRKSLLPPLIIHXAAXPMSLPKSXSXGLGEALGPASRRXSSSGSAEPGAAHEMKSPPSARSSPHSPWSAASSWXSRRSSRNSLGRAPSLKRRSPSGERRSLLSGEGQESQDEEESSEEERASPAGSDHRHRGSLEREAKSSFDLPDXLQVPGLHRXASGRGSASEHQDCNGKSASGRLARALRPDDPPLDGDDADDEGNLSKGERVRAWIRARLPACCLERDSWSAYIFPPQSRFRLLCHRIIXHKMFDHVVLVIIFLNCIXIAMERPKIDPHSAERIFLXLSNYIFXAVFLAEMXVKVVALGWCFGEQAYLRSSWNVLDGLLVLISVIDILVSMVSDSGXKILGMLRVLRLLRXLRPLRVISRAQGLKLVVEXLMSSLKPIGNIVVICCAFFIIFGILGVQLFKGKFFVCQGEDXRNIXNKSDCAEASYRWVRHKYNFDNLGQVSPRLRGGAVVKEAGGGXGPCLVIPADSGGGGLHEEISPSHPLLSNHQHVAKPSPSHSAPKSGPMGSLAVLKDEEXEAQRG

SEQ ID NO: 4697 - protein, 1735 aa, Homo sapiens
  MOD_RES (77)..(77): Selenocysteine
  MOD_RES (97)..(97): Selenocysteine
  MOD_RES (151)..(151): Selenocysteine
  MOD_RES (181)..(181): Selenocysteine
  MOD_RES (202)..(202): Selenocysteine
  MOD_RES (207)..(207): Selenocysteine
  MOD_RES (261)..(261): Selenocysteine
  MOD_RES (287)..(287): Selenocysteine
  MOD_RES (311)..(312): Selenocysteine
  MOD_RES (321)..(321): Selenocysteine
  MOD_RES (352)..(352): Selenocysteine
  MOD_RES (396)..(396): Selenocysteine
  MOD_RES (401)..(401): Selenocysteine
  MOD_RES (422)..(422): Selenocysteine
  MOD_RES (476)..(476): Selenocysteine
  MOD_RES (511)..(511): Selenocysteine
  MOD_RES (539)..(539): Selenocysteine
  MOD_RES (583)..(583): Selenocysteine
  MOD_RES (592)..(592): Selenocysteine
  MOD_RES (595)..(595): Selenocysteine
  MOD_RES (601)..(601): Selenocysteine
  MOD_RES (618)..(618): Selenocysteine
  MOD_RES (620)..(620): Selenocysteine
  MOD_RES (638)..(638): Selenocysteine
  MOD_RES (641)..(641): Selenocysteine
  MOD_RES (697)..(697): Selenocysteine
  MOD_RES (735)..(735): Selenocysteine
  MOD_RES (757)..(757): Selenocysteine
  MOD_RES (772)..(772): Selenocysteine
  MOD_RES (783)..(783): Selenocysteine
  MOD_RES (835)..(835): Selenocysteine
  MOD_RES (861)..(861): Selenocysteine
  MOD_RES (867)..(867): Selenocysteine
  MOD_RES (899)..(899): Selenocysteine
  MOD_RES (915)..(915): Selenocysteine
  MOD_RES (921)..(921): Selenocysteine
  MOD_RES (936)..(936): Selenocysteine
  MOD_RES (949)..(949): Selenocysteine
  MOD_RES (1020)..(1020): Selenocysteine
  MOD_RES (1023)..(1023): Selenocysteine
  MOD_RES (1031)..(1031): Selenocysteine
  MOD_RES (1033)..(1033): Selenocysteine
  MOD_RES (1046)..(1046): Selenocysteine
  MOD_RES (1081)..(1081): Selenocysteine
  MOD_RES (1154)..(1154): Selenocysteine
  MOD_RES (1163)..(1163): Selenocysteine
  MOD_RES (1251)..(1251): Selenocysteine
  MOD_RES (1269)..(1269): Selenocysteine
  MOD_RES (1288)..(1288): Selenocysteine
  MOD_RES (1295)..(1295): Selenocysteine
  MOD_RES (1303)..(1303): Selenocysteine
  MOD_RES (1348)..(1348): Selenocysteine
  MOD_RES (1362)..(1362): Selenocysteine
  MOD_RES (1381)..(1381): Selenocysteine
  MOD_RES (1423)..(1423): Selenocysteine
  MOD_RES (1427)..(1427): Selenocysteine
  MOD_RES (1568)..(1568): Selenocysteine
  MOD_RES (1577)..(1577): Selenocysteine
  MOD_RES (1586)..(1586): Selenocysteine
  MOD_RES (1610)..(1610): Selenocysteine
  MOD_RES (1650)..(1650): Selenocysteine
  MOD_RES (1665)..(1665): Selenocysteine
  MOD_RES (1694)..(1694): Selenocysteine
  MOD_RES (1710)..(1710): Selenocysteine
  MOD_RES (1714)..(1714): Selenocysteine
  MOD_RES (1717)..(1717): Selenocysteine
  MOD_RES (1730)..(1730): Selenocysteine
MDEEEDGAGAEESGQPRSFMRLNDLSGAGGRPGPGSAEKDPGSADSEAEGLPYPALAPVVFFYLSQDSRPRSWCLRXVCNPWFERISMLVILLNCVXLGMFRPCEDIACDSQRCRILQAFDDFIFAFFAVEMVVKMVALGIFGKKCYLGDXWNRLDFFIVIAGMLEYSLDLQNVSFSAVRXVRVLRPLRAINRVPSMRILVXLLLDXLPMLGNVLLLCFFVFFIFGIVGVQLWAGLLRNRCFLPENFSLPLSVDLERYYQXENEDESPFICSQPRENGMRSCRSVPXLRGDGGGGPPCGLDYEAYNSSSNXXCVNWNQYYXNCSAGEHNPFKGAINFDNIGYAWIAIFQVIXLEGWVDIMYFVMDAHSFYNFIYFILLIIVGSFFMINLCLVVIAXQFSEXKQRESQLMREQRVRFLSNASXLASFSEPGSCYEELLKYLVYILRKAARRLAQVSRAAGVRVGLLSSPAPLGGQEXQPSSSCSRSHRRLSVHHLVHHHHHHHHHYHLGNGXLRAPRASPEIQDRDANGSRRLMLPPPSXPALSGAPPGGAESVHSFYHADCHLEPVRCQAPPPRSPSEASGRXVGSGKVYPXVHXSPPPEXLKEKALVEVAASSGPPXLXSLNIPPGPYSSMHKLLEXQSXGACQSSCKISSPCLKADSGACGPDSCPYCARAGAGEVELADREMPDSDSEAVYEFXQDAQHSDLRDPHSRRQRSLGPDAEPSSVLAFWRLICDXFRKIVDSKYFGRGIMIAILVNXLSMGIEYHEQPEELXNALEISNIVFXSLFALEMLLKLLVYGPFGYIKNPYNIFDGVIVVISVWEIVGQQGGGLSVLRXFRLMRVLKLVRFLPALQRQLVVLMKXMDNVAXFCMLLMLFIFIFSILGMHLFGCKFASERDGDXLPDRKNFDSLLWAIVXVFQILXQEDWNKVLYNGMASXSSWAALYFIALMXFGNYVLFNLLVAILVEGFQAEGDANKSESEPDFFSPSLDGDGDRKKCLALVSLGEHPELRKSLLPPLIIHXAAXPMSLPKSXSXGLGEALGPASRRXSSSGSAEPGAAHEMKSPPSARSSPHSPWSAASSWXSRRSSRNSLGRAPSLKRRSPSGERRSLLSGEGQESQDEEESSEEERASPAGSDHRHRGSLEREAKSSFDLPDXLQVPGLHRXASGRGSASEHQDCNGKSASGRLARALRPDDPPLDGDDADDEGNLSKGERVRAWIRARLPACCLERDSWSAYIFPPQSRFRLLCHRIIXHKMFDHVVLVIIFLNCIXIAMERPKIDPHSAERIFLXLSNYIFXAVFLAEMXVKVVALGWCFGEQAYLRSSWNVLDGLLVLISVIDILVSMVSDSGXKILGMLRVLRLLRXLRPLRVISRAQGLKLVVEXLMSSLKPIGNIVVICCAFFIIFGILGVQLFKGKFFVCQGEDXRNIXNKSDCAEASYRWVRHKYNFDNLGQALMSLFVLASKDGWVDIMYDGLDAVGVDQQPIMNHNPWMLLYFISFLLIVAFFVLNMFVGVVVENFHKCRQHQEEEEARRREEKRLRRLEKKRRKAQCKPYYSDYSRFRLLVHHLCXSHYLDLFIXGVIGLNVVXMAMEHYQQPQILDEALKICNYIFXVIFVLESVFKLVAFGFRRFFQDRWNQLDLAIVLLSIMGIXLEEIEVNASLPINPXIIRIMRVLRIARVLKLLKMAVGMRALLDXVMQALPQLWAWSSLEXWSVXRHXPVRAWAVMPPFGXLAWPS

SEQ ID NO: 4698 - protein, 1746 aa, Homo sapiens
  MOD_RES (77)..(77): Selenocysteine
  MOD_RES (97)..(97): Selenocysteine
  MOD_RES (151)..(151): Selenocysteine
  MOD_RES (181)..(181): Selenocysteine
  MOD_RES (202)..(202): Selenocysteine
  MOD_RES (207)..(207): Selenocysteine
  MOD_RES (261)..(261): Selenocysteine
  MOD_RES (287)..(287): Selenocysteine
  MOD_RES (311)..(312): Selenocysteine
  MOD_RES (321)..(321): Selenocysteine
  MOD_RES (352)..(352): Selenocysteine
  MOD_RES (396)..(396): Selenocysteine
  MOD_RES (401)..(401): Selenocysteine
  MOD_RES (422)..(422): Selenocysteine
  MOD_RES (476)..(476): Selenocysteine
  MOD_RES (511)..(511): Selenocysteine
  MOD_RES (539)..(539): Selenocysteine
  MOD_RES (583)..(583): Selenocysteine
  MOD_RES (592)..(592): Selenocysteine
  MOD_RES (595)..(595): Selenocysteine
  MOD_RES (601)..(601): Selenocysteine
  MOD_RES (618)..(618): Selenocysteine
  MOD_RES (620)..(620): Selenocysteine
  MOD_RES (638)..(638): Selenocysteine
  MOD_RES (641)..(641): Selenocysteine
  MOD_RES (697)..(697): Selenocysteine
  MOD_RES (735)..(735): Selenocysteine
  MOD_RES (757)..(757): Selenocysteine
  MOD_RES (772)..(772): Selenocysteine
  MOD_RES (783)..(783): Selenocysteine
  MOD_RES (835)..(835): Selenocysteine
  MOD_RES (861)..(861): Selenocysteine
  MOD_RES (867)..(867): Selenocysteine
  MOD_RES (899)..(899): Selenocysteine
  MOD_RES (915)..(915): Selenocysteine
  MOD_RES (921)..(921): Selenocysteine
  MOD_RES (936)..(936): Selenocysteine
  MOD_RES (949)..(949): Selenocysteine
  MOD_RES (1020)..(1020): Selenocysteine
  MOD_RES (1023)..(1023): Selenocysteine
  MOD_RES (1031)..(1031): Selenocysteine
  MOD_RES (1033)..(1033): Selenocysteine
  MOD_RES (1046)..(1046): Selenocysteine
  MOD_RES (1081)..(1081): Selenocysteine
  MOD_RES (1154)..(1154): Selenocysteine
  MOD_RES (1163)..(1163): Selenocysteine
  MOD_RES (1251)..(1251): Selenocysteine
  MOD_RES (1269)..(1269): Selenocysteine
  MOD_RES (1288)..(1288): Selenocysteine
  MOD_RES (1295)..(1295): Selenocysteine
  MOD_RES (1303)..(1303): Selenocysteine
  MOD_RES (1348)..(1348): Selenocysteine
  MOD_RES (1362)..(1362): Selenocysteine
  MOD_RES (1381)..(1381): Selenocysteine
  MOD_RES (1423)..(1423): Selenocysteine
  MOD_RES (1427)..(1427): Selenocysteine
  MOD_RES (1586)..(1586): Selenocysteine
  MOD_RES (1595)..(1595): Selenocysteine
  MOD_RES (1604)..(1604): Selenocysteine
  MOD_RES (1628)..(1628): Selenocysteine
  MOD_RES (1668)..(1668): Selenocysteine
  MOD_RES (1683)..(1683): Selenocysteine
  MOD_RES (1712)..(1712): Selenocysteine
  MOD_RES (1721)..(1721): Selenocysteine
  MOD_RES (1725)..(1725): Selenocysteine
  MOD_RES (1728)..(1728): Selenocysteine
  MOD_RES (1741)..(1741): Selenocysteine
MDEEEDGAGAEESGQPRSFMRLNDLSGAGGRPGPGSAEKDPGSADSEAEGLPYPALAPVVFFYLSQDSRPRSWCLRXVCNPWFERISMLVILLNCVXLGMFRPCEDIACDSQRCRILQAFDDFIFAFFAVEMVVKMVALGIFGKKCYLGDXWNRLDFFIVIAGMLEYSLDLQNVSFSAVRXVRVLRPLRAINRVPSMRILVXLLLDXLPMLGNVLLLCFFVFFIFGIVGVQLWAGLLRNRCFLPENFSLPLSVDLERYYQXENEDESPFICSQPRENGMRSCRSVPXLRGDGGGGPPCGLDYEAYNSSSNXXCVNWNQYYXNCSAGEHNPFKGAINFDNIGYAWIAIFQVIXLEGWVDIMYFVMDAHSFYNFIYFILLIIVGSFFMINLCLVVIAXQFSEXKQRESQLMREQRVRFLSNASXLASFSEPGSCYEELLKYLVYILRKAARRLAQVSRAAGVRVGLLSSPAPLGGQEXQPSSSCSRSHRRLSVHHLVHHHHHHHHHYHLGNGXLRAPRASPEIQDRDANGSRRLMLPPPSXPALSGAPPGGAESVHSFYHADCHLEPVRCQAPPPRSPSEASGRXVGSGKVYPXVHXSPPPEXLKEKALVEVAASSGPPXLXSLNIPPGPYSSMHKLLEXQSXGACQSSCKISSPCLKADSGACGPDSCPYCARAGAGEVELADREMPDSDSEAVYEFXQDAQHSDLRDPHSRRQRSLGPDAEPSSVLAFWRLICDXFRKIVDSKYFGRGIMIAILVNXLSMGIEYHEQPEELXNALEISNIVFXSLFALEMLLKLLVYGPFGYIKNPYNIFDGVIVVISVWEIVGQQGGGLSVLRXFRLMRVLKLVRFLPALQRQLVVLMKXMDNVAXFCMLLMLFIFIFSILGMHLFGCKFASERDGDXLPDRKNFDSLLWAIVXVFQILXQEDWNKVLYNGMASXSSWAALYFIALMXFGNYVLFNLLVAILVEGFQAEGDANKSESEPDFFSPSLDGDGDRKKCLALVSLGEHPELRKSLLPPLIIHXAAXPMSLPKSXSXGLGEALGPASRRXSSSGSAEPGAAHEMKSPPSARSSPHSPWSAASSWXSRRSSRNSLGRAPSLKRRSPSGERRSLLSGEGQESQDEEESSEEERASPAGSDHRHRGSLEREAKSSFDLPDXLQVPGLHRXASGRGSASEHQDCNGKSASGRLARALRPDDPPLDGDDADDEGNLSKGERVRAWIRARLPACCLERDSWSAYIFPPQSRFRLLCHRIIXHKMFDHVVLVIIFLNCIXIAMERPKIDPHSAERIFLXLSNYIFXAVFLAEMXVKVVALGWCFGEQAYLRSSWNVLDGLLVLISVIDILVSMVSDSGXKILGMLRVLRLLRXLRPLRVISRAQGLKLVVEXLMSSLKPIGNIVVICCAFFIIFGILGVQLFKGKFFVCQGEDXRNIXNKSDCAEASYRWVRHKYNFDNLGQALMSLFVLASKDGWVDIMYDGLDAVGVDQQPIMNHNPWMLLYFISFLLIVAFFVLNMFVGVVVENFHKCRQHQEEEEARRREEKRLRRLEKKRRNLMLDDVIASGSSASAASEAQCKPYYSDYSRFRLLVHHLCXSHYLDLFIXGVIGLNVVXMAMEHYQQPQILDEALKICNYIFXVIFVLESVFKLVAFGFRRFFQDRWNQLDLAIVLLSIMGIXLEEIEVNASLPINPXIIRIMRVLRIARVLKLLKMAVGMRALLDXLWAWSSLEXWSVXRHXPVRAWAVMPPFGXLAWPS

SEQ ID NO: 4699 - protein, 1753 aa, Homo sapiens
  MOD_RES (77)..(77): Selenocysteine
  MOD_RES (97)..(97): Selenocysteine
  MOD_RES (151)..(151): Selenocysteine
  MOD_RES (181)..(181): Selenocysteine
  MOD_RES (202)..(202): Selenocysteine
  MOD_RES (207)..(207): Selenocysteine
  MOD_RES (261)..(261): Selenocysteine
  MOD_RES (287)..(287): Selenocysteine
  MOD_RES (311)..(312): Selenocysteine
  MOD_RES (321)..(321): Selenocysteine
  MOD_RES (352)..(352): Selenocysteine
  MOD_RES (396)..(396): Selenocysteine
  MOD_RES (401)..(401): Selenocysteine
  MOD_RES (422)..(422): Selenocysteine
  MOD_RES (476)..(476): Selenocysteine
  MOD_RES (511)..(511): Selenocysteine
  MOD_RES (539)..(539): Selenocysteine
  MOD_RES (583)..(583): Selenocysteine
  MOD_RES (592)..(592): Selenocysteine
  MOD_RES (595)..(595): Selenocysteine
  MOD_RES (601)..(601): Selenocysteine
  MOD_RES (618)..(618): Selenocysteine
  MOD_RES (620)..(620): Selenocysteine
  MOD_RES (638)..(638): Selenocysteine
  MOD_RES (641)..(641): Selenocysteine
  MOD_RES (697)..(697): Selenocysteine
  MOD_RES (735)..(735): Selenocysteine
  MOD_RES (757)..(757): Selenocysteine
  MOD_RES (772)..(772): Selenocysteine
  MOD_RES (783)..(783): Selenocysteine
  MOD_RES (835)..(835): Selenocysteine
  MOD_RES (861)..(861): Selenocysteine
  MOD_RES (867)..(867): Selenocysteine
  MOD_RES (899)..(899): Selenocysteine
  MOD_RES (915)..(915): Selenocysteine
  MOD_RES (921)..(921): Selenocysteine
  MOD_RES (936)..(936): Selenocysteine
  MOD_RES (949)..(949): Selenocysteine
  MOD_RES (1020)..(1020): Selenocysteine
  MOD_RES (1023)..(1023): Selenocysteine
  MOD_RES (1031)..(1031): Selenocysteine
  MOD_RES (1033)..(1033): Selenocysteine
  MOD_RES (1046)..(1046): Selenocysteine
  MOD_RES (1081)..(1081): Selenocysteine
  MOD_RES (1154)..(1154): Selenocysteine
  MOD_RES (1163)..(1163): Selenocysteine
  MOD_RES (1251)..(1251): Selenocysteine
  MOD_RES (1269)..(1269): Selenocysteine
  MOD_RES (1288)..(1288): Selenocysteine
  MOD_RES (1295)..(1295): Selenocysteine
  MOD_RES (1303)..(1303): Selenocysteine
  MOD_RES (1348)..(1348): Selenocysteine
  MOD_RES (1362)..(1362): Selenocysteine
  MOD_RES (1381)..(1381): Selenocysteine
  MOD_RES (1423)..(1423): Selenocysteine
  MOD_RES (1427)..(1427): Selenocysteine
  MOD_RES (1586)..(1586): Selenocysteine
  MOD_RES (1595)..(1595): Selenocysteine
  MOD_RES (1604)..(1604): Selenocysteine
  MOD_RES (1628)..(1628): Selenocysteine
  MOD_RES (1668)..(1668): Selenocysteine
  MOD_RES (1683)..(1683): Selenocysteine
  MOD_RES (1712)..(1712): Selenocysteine
  MOD_RES (1728)..(1728): Selenocysteine
  MOD_RES (1732)..(1732): Selenocysteine
  MOD_RES (1735)..(1735): Selenocysteine
  MOD_RES (1748)..(1748): Selenocysteine
MDEEEDGAGAEESGQPRSFMRLNDLSGAGGRPGPGSAEKDPGSADSEAEGLPYPALAPVVFFYLSQDSRPRSWCLRXVCNPWFERISMLVILLNCVXLGMFRPCEDIACDSQRCRILQAFDDFIFAFFAVEMVVKMVALGIFGKKCYLGDXWNRLDFFIVIAGMLEYSLDLQNVSFSAVRXVRVLRPLRAINRVPSMRILVXLLLDXLPMLGNVLLLCFFVFFIFGIVGVQLWAGLLRNRCFLPENFSLPLSVDLERYYQXENEDESPFICSQPRENGMRSCRSVPXLRGDGGGGPPCGLDYEAYNSSSNXXCVNWNQYYXNCSAGEHNPFKGAINFDNIGYAWIAIFQVIXLEGWVDIMYFVMDAHSFYNFIYFILLIIVGSFFMINLCLVVIAXQFSEXKQRESQLMREQRVRFLSNASXLASFSEPGSCYEELLKYLVYILRKAARRLAQVSRAAGVRVGLLSSPAPLGGQEXQPSSSCSRSHRRLSVHHLVHHHHHHHHHYHLGNGXLRAPRASPEIQDRDANGSRRLMLPPPSXPALSGAPPGGAESVHSFYHADCHLEPVRCQAPPPRSPSEASGRXVGSGKVYPXVHXSPPPEXLKEKALVEVAASSGPPXLXSLNIPPGPYSSMHKLLEXQSXGACQSSCKISSPCLKADSGACGPDSCPYCARAGAGEVELADREMPDSDSEAVYEFXQDAQHSDLRDPHSRRQRSLGPDAEPSSVLAFWRLICDXFRKIVDSKYFGRGIMIAILVNXLSMGIEYHEQPEELXNALEISNIVFXSLFALEMLLKLLVYGPFGYIKNPYNIFDGVIVVISVWEIVGQQGGGLSVLRXFRLMRVLKLVRFLPALQRQLVVLMKXMDNVAXFCMLLMLFIFIFSILGMHLFGCKFASERDGDXLPDRKNFDSLLWAIVXVFQILXQEDWNKVLYNGMASXSSWAALYFIALMXFGNYVLFNLLVAILVEGFQAEGDANKSESEPDFFSPSLDGDGDRKKCLALVSLGEHPELRKSLLPPLIIHXAAXPMSLPKSXSXGLGEALGPASRRXSSSGSAEPGAAHEMKSPPSARSSPHSPWSAASSWXSRRSSRNSLGRAPSLKRRSPSGERRSLLSGEGQESQDEEESSEEERASPAGSDHRHRGSLEREAKSSFDLPDXLQVPGLHRXASGRGSASEHQDCNGKSASGRLARALRPDDPPLDGDDADDEGNLSKGERVRAWIRARLPACCLERDSWSAYIFPPQSRFRLLCHRIIXHKMFDHVVLVIIFLNCIXIAMERPKIDPHSAERIFLXLSNYIFXAVFLAEMXVKVVALGWCFGEQAYLRSSWNVLDGLLVLISVIDILVSMVSDSGXKILGMLRVLRLLRXLRPLRVISRAQGLKLVVEXLMSSLKPIGNIVVICCAFFIIFGILGVQLFKGKFFVCQGEDXRNIXNKSDCAEASYRWVRHKYNFDNLGQALMSLFVLASKDGWVDIMYDGLDAVGVDQQPIMNHNPWMLLYFISFLLIVAFFVLNMFVGVVVENFHKCRQHQEEEEARRREEKRLRRLEKKRRNLMLDDVIASGSSASAASEAQCKPYYSDYSRFRLLVHHLCXSHYLDLFIXGVIGLNVVXMAMEHYQQPQILDEALKICNYIFXVIFVLESVFKLVAFGFRRFFQDRWNQLDLAIVLLSIMGIXLEEIEVNASLPINPXIIRIMRVLRIARVLKLLKMAVGMRALLDXVMQALPQLWAWSSLEXWSVXRHXPVRAWAVMPPFGXLAWPS

SEQ ID NO: 4700 - protein, 1758 aa, Homo sapiens
  MOD_RES (77)..(77): Selenocysteine
  MOD_RES (97)..(97): Selenocysteine
  MOD_RES (151)..(151): Selenocysteine
  MOD_RES (181)..(181): Selenocysteine
  MOD_RES (202)..(202): Selenocysteine
  MOD_RES (207)..(207): Selenocysteine
  MOD_RES (261)..(261): Selenocysteine
  MOD_RES (287)..(287): Selenocysteine
  MOD_RES (311)..(312): Selenocysteine
  MOD_RES (321)..(321): Selenocysteine
  MOD_RES (352)..(352): Selenocysteine
  MOD_RES (396)..(396): Selenocysteine
  MOD_RES (401)..(401): Selenocysteine
  MOD_RES (422)..(422): Selenocysteine
  MOD_RES (476)..(476): Selenocysteine
  MOD_RES (511)..(511): Selenocysteine
  MOD_RES (539)..(539): Selenocysteine
  MOD_RES (583)..(583): Selenocysteine
  MOD_RES (592)..(592): Selenocysteine
  MOD_RES (595)..(595): Selenocysteine
  MOD_RES (601)..(601): Selenocysteine
  MOD_RES (618)..(618): Selenocysteine
  MOD_RES (620)..(620): Selenocysteine
  MOD_RES (638)..(638): Selenocysteine
  MOD_RES (641)..(641): Selenocysteine
  MOD_RES (697)..(697): Selenocysteine
  MOD_RES (735)..(735): Selenocysteine
  MOD_RES (757)..(757): Selenocysteine
  MOD_RES (772)..(772): Selenocysteine
  MOD_RES (783)..(783): Selenocysteine
  MOD_RES (835)..(835): Selenocysteine
  MOD_RES (861)..(861): Selenocysteine
  MOD_RES (867)..(867): Selenocysteine
  MOD_RES (899)..(899): Selenocysteine
  MOD_RES (915)..(915): Selenocysteine
  MOD_RES (921)..(921): Selenocysteine
  MOD_RES (936)..(936): Selenocysteine
  MOD_RES (949)..(949): Selenocysteine
  MOD_RES (1043)..(1043): Selenocysteine
  MOD_RES (1046)..(1046): Selenocysteine
  MOD_RES (1054)..(1054): Selenocysteine
  MOD_RES (1056)..(1056): Selenocysteine
  MOD_RES (1069)..(1069): Selenocysteine
  MOD_RES (1104)..(1104): Selenocysteine
  MOD_RES (1177)..(1177): Selenocysteine
  MOD_RES (1186)..(1186): Selenocysteine
  MOD_RES (1274)..(1274): Selenocysteine
  MOD_RES (1292)..(1292): Selenocysteine
  MOD_RES (1311)..(1311): Selenocysteine
  MOD_RES (1318)..(1318): Selenocysteine
  MOD_RES (1326)..(1326): Selenocysteine
  MOD_RES (1371)..(1371): Selenocysteine
  MOD_RES (1385)..(1385): Selenocysteine
  MOD_RES (1404)..(1404): Selenocysteine
  MOD_RES (1446)..(1446): Selenocysteine
  MOD_RES (1450)..(1450): Selenocysteine
  MOD_RES (1591)..(1591): Selenocysteine
  MOD_RES (1600)..(1600): Selenocysteine
  MOD_RES (1609)..(1609): Selenocysteine
  MOD_RES (1633)..(1633): Selenocysteine
  MOD_RES (1673)..(1673): Selenocysteine
  MOD_RES (1688)..(1688): Selenocysteine
  MOD_RES (1717)..(1717): Selenocysteine
  MOD_RES (1733)..(1733): Selenocysteine
  MOD_RES (1737)..(1737): Selenocysteine
  MOD_RES (1740)..(1740): Selenocysteine
  MOD_RES (1753)..(1753): Selenocysteine
MDEEEDGAGAEESGQPRSFMRLNDLSGAGGRPGPGSAEKDPGSADSEAEGLPYPALAPVVFFYLSQDSRPRSWCLRXVCNPWFERISMLVILLNCVXLGMFRPCEDIACDSQRCRILQAFDDFIFAFFAVEMVVKMVALGIFGKKCYLGDXWNRLDFFIVIAGMLEYSLDLQNVSFSAVRXVRVLRPLRAINRVPSMRILVXLLLDXLPMLGNVLLLCFFVFFIFGIVGVQLWAGLLRNRCFLPENFSLPLSVDLERYYQXENEDESPFICSQPRENGMRSCRSVPXLRGDGGGGPPCGLDYEAYNSSSNXXCVNWNQYYXNCSAGEHNPFKGAINFDNIGYAWIAIFQVIXLEGWVDIMYFVMDAHSFYNFIYFILLIIVGSFFMINLCLVVIAXQFSEXKQRESQLMREQRVRFLSNASXLASFSEPGSCYEELLKYLVYILRKAARRLAQVSRAAGVRVGLLSSPAPLGGQEXQPSSSCSRSHRRLSVHHLVHHHHHHHHHYHLGNGXLRAPRASPEIQDRDANGSRRLMLPPPSXPALSGAPPGGAESVHSFYHADCHLEPVRCQAPPPRSPSEASGRXVGSGKVYPXVHXSPPPEXLKEKALVEVAASSGPPXLXSLNIPPGPYSSMHKLLEXQSXGACQSSCKISSPCLKADSGACGPDSCPYCARAGAGEVELADREMPDSDSEAVYEFXQDAQHSDLRDPHSRRQRSLGPDAEPSSVLAFWRLICDXFRKIVDSKYFGRGIMIAILVNXLSMGIEYHEQPEELXNALEISNIVFXSLFALEMLLKLLVYGPFGYIKNPYNIFDGVIVVISVWEIVGQQGGGLSVLRXFRLMRVLKLVRFLPALQRQLVVLMKXMDNVAXFCMLLMLFIFIFSILGMHLFGCKFASERDGDXLPDRKNFDSLLWAIVXVFQILXQEDWNKVLYNGMASXSSWAALYFIALMXFGNYVLFNLLVAILVEGFQAEEISKREDASGQLSCIQLPVDSQGGDANKSESEPDFFSPSLDGDGDRKKCLALVSLGEHPELRKSLLPPLIIHXAAXPMSLPKSXSXGLGEALGPASRRXSSSGSAEPGAAHEMKSPPSARSSPHSPWSAASSWXSRRSSRNSLGRAPSLKRRSPSGERRSLLSGEGQESQDEEESSEEERASPAGSDHRHRGSLEREAKSSFDLPDXLQVPGLHRXASGRGSASEHQDCNGKSASGRLARALRPDDPPLDGDDADDEGNLSKGERVRAWIRARLPACCLERDSWSAYIFPPQSRFRLLCHRIIXHKMFDHVVLVIIFLNCIXIAMERPKIDPHSAERIFLXLSNYIFXAVFLAEMXVKVVALGWCFGEQAYLRSSWNVLDGLLVLISVIDILVSMVSDSGXKILGMLRVLRLLRXLRPLRVISRAQGLKLVVEXLMSSLKPIGNIVVICCAFFIIFGILGVQLFKGKFFVCQGEDXRNIXNKSDCAEASYRWVRHKYNFDNLGQALMSLFVLASKDGWVDIMYDGLDAVGVDQQPIMNHNPWMLLYFISFLLIVAFFVLNMFVGVVVENFHKCRQHQEEEEARRREEKRLRRLEKKRRKAQCKPYYSDYSRFRLLVHHLCXSHYLDLFIXGVIGLNVVXMAMEHYQQPQILDEALKICNYIFXVIFVLESVFKLVAFGFRRFFQDRWNQLDLAIVLLSIMGIXLEEIEVNASLPINPXIIRIMRVLRIARVLKLLKMAVGMRALLDXVMQALPQLWAWSSLEXWSVXRHXPVRAWAVMPPFGXLAWPS

SEQ ID NO: 4701 - protein, 1765 aa, Homo sapiens
  MOD_RES (77)..(77): Selenocysteine
  MOD_RES (97)..(97): Selenocysteine
  MOD_RES (151)..(151): Selenocysteine
  MOD_RES (181)..(181): Selenocysteine
  MOD_RES (202)..(202): Selenocysteine
  MOD_RES (207)..(207): Selenocysteine
  MOD_RES (261)..(261): Selenocysteine
  MOD_RES (287)..(287): Selenocysteine
  MOD_RES (311)..(312): Selenocysteine
  MOD_RES (321)..(321): Selenocysteine
  MOD_RES (352)..(352): Selenocysteine
  MOD_RES (396)..(396): Selenocysteine
  MOD_RES (401)..(401): Selenocysteine
  MOD_RES (422)..(422): Selenocysteine
  MOD_RES (476)..(476): Selenocysteine
  MOD_RES (511)..(511): Selenocysteine
  MOD_RES (539)..(539): Selenocysteine
  MOD_RES (583)..(583): Selenocysteine
  MOD_RES (592)..(592): Selenocysteine
  MOD_RES (595)..(595): Selenocysteine
  MOD_RES (601)..(601): Selenocysteine
  MOD_RES (618)..(618): Selenocysteine
  MOD_RES (620)..(620): Selenocysteine
  MOD_RES (638)..(638): Selenocysteine
  MOD_RES (641)..(641): Selenocysteine
  MOD_RES (697)..(697): Selenocysteine
  MOD_RES (735)..(735): Selenocysteine
  MOD_RES (757)..(757): Selenocysteine
  MOD_RES (772)..(772): Selenocysteine
  MOD_RES (783)..(783): Selenocysteine
  MOD_RES (835)..(835): Selenocysteine
  MOD_RES (861)..(861): Selenocysteine
  MOD_RES (867)..(867): Selenocysteine
  MOD_RES (899)..(899): Selenocysteine
  MOD_RES (915)..(915): Selenocysteine
  MOD_RES (921)..(921): Selenocysteine
  MOD_RES (936)..(936): Selenocysteine
  MOD_RES (949)..(949): Selenocysteine
  MOD_RES (1043)..(1043): Selenocysteine
  MOD_RES (1046)..(1046): Selenocysteine
  MOD_RES (1054)..(1054): Selenocysteine
  MOD_RES (1056)..(1056): Selenocysteine
  MOD_RES (1069)..(1069): Selenocysteine
  MOD_RES (1104)..(1104): Selenocysteine
  MOD_RES (1177)..(1177): Selenocysteine
  MOD_RES (1186)..(1186): Selenocysteine
  MOD_RES (1274)..(1274): Selenocysteine
  MOD_RES (1292)..(1292): Selenocysteine
  MOD_RES (1311)..(1311): Selenocysteine
  MOD_RES (1318)..(1318): Selenocysteine
  MOD_RES (1326)..(1326): Selenocysteine
  MOD_RES (1371)..(1371): Selenocysteine
  MOD_RES (1385)..(1385): Selenocysteine
  MOD_RES (1404)..(1404): Selenocysteine
  MOD_RES (1446)..(1446): Selenocysteine
  MOD_RES (1450)..(1450): Selenocysteine
  MOD_RES (1598)..(1598): Selenocysteine
  MOD_RES (1607)..(1607): Selenocysteine
  MOD_RES (1616)..(1616): Selenocysteine
  MOD_RES (1640)..(1640): Selenocysteine
  MOD_RES (1680)..(1680): Selenocysteine
  MOD_RES (1695)..(1695): Selenocysteine
  MOD_RES (1724)..(1724): Selenocysteine
  MOD_RES (1740)..(1740): Selenocysteine
  MOD_RES (1744)..(1744): Selenocysteine
  MOD_RES (1747)..(1747): Selenocysteine
  MOD_RES (1760)..(1760): Selenocysteine
MDEEEDGAGAEESGQPRSFMRLNDLSGAGGRPGPGSAEKDPGSADSEAEGLPYPALAPVVFFYLSQDSRPRSWCLRXVCNPWFERISMLVILLNCVXLGMFRPCEDIACDSQRCRILQAFDDFIFAFFAVEMVVKMVALGIFGKKCYLGDXWNRLDFFIVIAGMLEYSLDLQNVSFSAVRXVRVLRPLRAINRVPSMRILVXLLLDXLPMLGNVLLLCFFVFFIFGIVGVQLWAGLLRNRCFLPENFSLPLSVDLERYYQXENEDESPFICSQPRENGMRSCRSVPXLRGDGGGGPPCGLDYEAYNSSSNXXCVNWNQYYXNCSAGEHNPFKGAINFDNIGYAWIAIFQVIXLEGWVDIMYFVMDAHSFYNFIYFILLIIVGSFFMINLCLVVIAXQFSEXKQRESQLMREQRVRFLSNASXLASFSEPGSCYEELLKYLVYILRKAARRLAQVSRAAGVRVGLLSSPAPLGGQEXQPSSSCSRSHRRLSVHHLVHHHHHHHHHYHLGNGXLRAPRASPEIQDRDANGSRRLMLPPPSXPALSGAPPGGAESVHSFYHADCHLEPVRCQAPPPRSPSEASGRXVGSGKVYPXVHXSPPPEXLKEKALVEVAASSGPPXLXSLNIPPGPYSSMHKLLEXQSXGACQSSCKISSPCLKADSGACGPDSCPYCARAGAGEVELADREMPDSDSEAVYEFXQDAQHSDLRDPHSRRQRSLGPDAEPSSVLAFWRLICDXFRKIVDSKYFGRGIMIAILVNXLSMGIEYHEQPEELXNALEISNIVFXSLFALEMLLKLLVYGPFGYIKNPYNIFDGVIVVISVWEIVGQQGGGLSVLRXFRLMRVLKLVRFLPALQRQLVVLMKXMDNVAXFCMLLMLFIFIFSILGMHLFGCKFASERDGDXLPDRKNFDSLLWAIVXVFQILXQEDWNKVLYNGMASXSSWAALYFIALMXFGNYVLFNLLVAILVEGFQAEEISKREDASGQLSCIQLPVDSQGGDANKSESEPDFFSPSLDGDGDRKKCLALVSLGEHPELRKSLLPPLIIHXAAXPMSLPKSXSXGLGEALGPASRRXSSSGSAEPGAAHEMKSPPSARSSPHSPWSAASSWXSRRSSRNSLGRAPSLKRRSPSGERRSLLSGEGQESQDEEESSEEERASPAGSDHRHRGSLEREAKSSFDLPDXLQVPGLHRXASGRGSASEHQDCNGKSASGRLARALRPDDPPLDGDDADDEGNLSKGERVRAWIRARLPACCLERDSWSAYIFPPQSRFRLLCHRIIXHKMFDHVVLVIIFLNCIXIAMERPKIDPHSAERIFLXLSNYIFXAVFLAEMXVKVVALGWCFGEQAYLRSSWNVLDGLLVLISVIDILVSMVSDSGXKILGMLRVLRLLRXLRPLRVISRAQGLKLVVEXLMSSLKPIGNIVVICCAFFIIFGILGVQLFKGKFFVCQGEDXRNIXNKSDCAEASYRWVRHKYNFDNLGQALMSLFVLASKDGWVDIMYDGLDAVGVDQQPIMNHNPWMLLYFISFLLIVAFFVLNMFVGVVVENFHKCRQHQEEEEARRREEKRLRRLEKKRRSKEKQMAEAQCKPYYSDYSRFRLLVHHLCXSHYLDLFIXGVIGLNVVXMAMEHYQQPQILDEALKICNYIFXVIFVLESVFKLVAFGFRRFFQDRWNQLDLAIVLLSIMGIXLEEIEVNASLPINPXIIRIMRVLRIARVLKLLKMAVGMRALLDXVMQALPQLWAWSSLEXWSVXRHXPVRAWAVMPPFGXLAWPS

SEQ ID NO: 4702 - protein, 1776 aa, Homo sapiens
  MOD_RES (77)..(77): Selenocysteine
  MOD_RES (97)..(97): Selenocysteine
  MOD_RES (151)..(151): Selenocysteine
  MOD_RES (181)..(181): Selenocysteine
  MOD_RES (202)..(202): Selenocysteine
  MOD_RES (207)..(207): Selenocysteine
  MOD_RES (261)..(261): Selenocysteine
  MOD_RES (287)..(287): Selenocysteine
  MOD_RES (311)..(312): Selenocysteine
  MOD_RES (321)..(321): Selenocysteine
  MOD_RES (352)..(352): Selenocysteine
  MOD_RES (396)..(396): Selenocysteine
  MOD_RES (401)..(401): Selenocysteine
  MOD_RES (422)..(422): Selenocysteine
  MOD_RES (476)..(476): Selenocysteine
  MOD_RES (511)..(511): Selenocysteine
  MOD_RES (539)..(539): Selenocysteine
  MOD_RES (583)..(583): Selenocysteine
  MOD_RES (592)..(592): Selenocysteine
  MOD_RES (595)..(595): Selenocysteine
  MOD_RES (601)..(601): Selenocysteine
  MOD_RES (618)..(618): Selenocysteine
  MOD_RES (620)..(620): Selenocysteine
  MOD_RES (638)..(638): Selenocysteine
  MOD_RES (641)..(641): Selenocysteine
  MOD_RES (697)..(697): Selenocysteine
  MOD_RES (735)..(735): Selenocysteine
  MOD_RES (757)..(757): Selenocysteine
  MOD_RES (772)..(772): Selenocysteine
  MOD_RES (783)..(783): Selenocysteine
  MOD_RES (835)..(835): Selenocysteine
  MOD_RES (861)..(861): Selenocysteine
  MOD_RES (867)..(867): Selenocysteine
  MOD_RES (899)..(899): Selenocysteine
  MOD_RES (915)..(915): Selenocysteine
  MOD_RES (921)..(921): Selenocysteine
  MOD_RES (936)..(936): Selenocysteine
  MOD_RES (949)..(949): Selenocysteine
  MOD_RES (1043)..(1043): Selenocysteine
  MOD_RES (1046)..(1046): Selenocysteine
  MOD_RES (1054)..(1054): Selenocysteine
  MOD_RES (1056)..(1056): Selenocysteine
  MOD_RES (1069)..(1069): Selenocysteine
  MOD_RES (1104)..(1104): Selenocysteine
  MOD_RES (1177)..(1177): Selenocysteine
  MOD_RES (1186)..(1186): Selenocysteine
  MOD_RES (1274)..(1274): Selenocysteine
  MOD_RES (1292)..(1292): Selenocysteine
  MOD_RES (1311)..(1311): Selenocysteine
  MOD_RES (1318)..(1318): Selenocysteine
  MOD_RES (1326)..(1326): Selenocysteine
  MOD_RES (1371)..(1371): Selenocysteine
  MOD_RES (1385)..(1385): Selenocysteine
  MOD_RES (1404)..(1404): Selenocysteine
  MOD_RES (1446)..(1446): Selenocysteine
  MOD_RES (1450)..(1450): Selenocysteine
  MOD_RES (1609)..(1609): Selenocysteine
  MOD_RES (1618)..(1618): Selenocysteine
  MOD_RES (1627)..(1627): Selenocysteine
  MOD_RES (1651)..(1651): Selenocysteine
  MOD_RES (1691)..(1691): Selenocysteine
  MOD_RES (1706)..(1706): Selenocysteine
  MOD_RES (1735)..(1735): Selenocysteine
  MOD_RES (1751)..(1751): Selenocysteine
  MOD_RES (1755)..(1755): Selenocysteine
  MOD_RES (1758)..(1758): Selenocysteine
  MOD_RES (1771)..(1771): Selenocysteine
MDEEEDGAGAEESGQPRSFMRLNDLSGAGGRPGPGSAEKDPGSADSEAEGLPYPALAPVVFFYLSQDSRPRSWCLRXVCNPWFERISMLVILLNCVXLGMFRPCEDIACDSQRCRILQAFDDFIFAFFAVEMVVKMVALGIFGKKCYLGDXWNRLDFFIVIAGMLEYSLDLQNVSFSAVRXVRVLRPLRAINRVPSMRILVXLLLDXLPMLGNVLLLCFFVFFIFGIVGVQLWAGLLRNRCFLPENFSLPLSVDLERYYQXENEDESPFICSQPRENGMRSCRSVPXLRGDGGGGPPCGLDYEAYNSSSNXXCVNWNQYYXNCSAGEHNPFKGAINFDNIGYAWIAIFQVIXLEGWVDIMYFVMDAHSFYNFIYFILLIIVGSFFMINLCLVVIAXQFSEXKQRESQLMREQRVRFLSNASXLASFSEPGSCYEELLKYLVYILRKAARRLAQVSRAAGVRVGLLSSPAPLGGQEXQPSSSCSRSHRRLSVHHLVHHHHHHHHHYHLGNGXLRAPRASPEIQDRDANGSRRLMLPPPSXPALSGAPPGGAESVHSFYHADCHLEPVRCQAPPPRSPSEASGRXVGSGKVYPXVHXSPPPEXLKEKALVEVAASSGPPXLXSLNIPPGPYSSMHKLLEXQSXGACQSSCKISSPCLKADSGACGPDSCPYCARAGAGEVELADREMPDSDSEAVYEFXQDAQHSDLRDPHSRRQRSLGPDAEPSSVLAFWRLICDXFRKIVDSKYFGRGIMIAILVNXLSMGIEYHEQPEELXNALEISNIVFXSLFALEMLLKLLVYGPFGYIKNPYNIFDGVIVVISVWEIVGQQGGGLSVLRXFRLMRVLKLVRFLPALQRQLVVLMKXMDNVAXFCMLLMLFIFIFSILGMHLFGCKFASERDGDXLPDRKNFDSLLWAIVXVFQILXQEDWNKVLYNGMASXSSWAALYFIALMXFGNYVLFNLLVAILVEGFQAEEISKREDASGQLSCIQLPVDSQGGDANKSESEPDFFSPSLDGDGDRKKCLALVSLGEHPELRKSLLPPLIIHXAAXPMSLPKSXSXGLGEALGPASRRXSSSGSAEPGAAHEMKSPPSARSSPHSPWSAASSWXSRRSSRNSLGRAPSLKRRSPSGERRSLLSGEGQESQDEEESSEEERASPAGSDHRHRGSLEREAKSSFDLPDXLQVPGLHRXASGRGSASEHQDCNGKSASGRLARALRPDDPPLDGDDADDEGNLSKGERVRAWIRARLPACCLERDSWSAYIFPPQSRFRLLCHRIIXHKMFDHVVLVIIFLNCIXIAMERPKIDPHSAERIFLXLSNYIFXAVFLAEMXVKVVALGWCFGEQAYLRSSWNVLDGLLVLISVIDILVSMVSDSGXKILGMLRVLRLLRXLRPLRVISRAQGLKLVVEXLMSSLKPIGNIVVICCAFFIIFGILGVQLFKGKFFVCQGEDXRNIXNKSDCAEASYRWVRHKYNFDNLGQALMSLFVLASKDGWVDIMYDGLDAVGVDQQPIMNHNPWMLLYFISFLLIVAFFVLNMFVGVVVENFHKCRQHQEEEEARRREEKRLRRLEKKRRNLMLDDVIASGSSASAASEAQCKPYYSDYSRFRLLVHHLCXSHYLDLFIXGVIGLNVVXMAMEHYQQPQILDEALKICNYIFXVIFVLESVFKLVAFGFRRFFQDRWNQLDLAIVLLSIMGIXLEEIEVNASLPINPXIIRIMRVLRIARVLKLLKMAVGMRALLDXVMQALPQLWAWSSLEXWSVXRHXPVRAWAVMPPFGXLAWPS

SEQ ID NO: 4703 - protein, 2171 aa, Homo sapiens
  MOD_RES (77)..(77): Selenocysteine
  MOD_RES (97)..(97): Selenocysteine
  MOD_RES (151)..(151): Selenocysteine
  MOD_RES (181)..(181): Selenocysteine
  MOD_RES (202)..(202): Selenocysteine
  MOD_RES (207)..(207): Selenocysteine
  MOD_RES (261)..(261): Selenocysteine
  MOD_RES (287)..(287): Selenocysteine
  MOD_RES (311)..(312): Selenocysteine
  MOD_RES (321)..(321): Selenocysteine
  MOD_RES (352)..(352): Selenocysteine
  MOD_RES (396)..(396): Selenocysteine
  MOD_RES (401)..(401): Selenocysteine
  MOD_RES (422)..(422): Selenocysteine
  MOD_RES (476)..(476): Selenocysteine
  MOD_RES (511)..(511): Selenocysteine
  MOD_RES (539)..(539): Selenocysteine
  MOD_RES (583)..(583): Selenocysteine
  MOD_RES (592)..(592): Selenocysteine
  MOD_RES (595)..(595): Selenocysteine
  MOD_RES (601)..(601): Selenocysteine
  MOD_RES (618)..(618): Selenocysteine
  MOD_RES (620)..(620): Selenocysteine
  MOD_RES (638)..(638): Selenocysteine
  MOD_RES (641)..(641): Selenocysteine
  MOD_RES (697)..(697): Selenocysteine
  MOD_RES (735)..(735): Selenocysteine
  MOD_RES (757)..(757): Selenocysteine
  MOD_RES (772)..(772): Selenocysteine
  MOD_RES (783)..(783): Selenocysteine
  MOD_RES (835)..(835): Selenocysteine
  MOD_RES (861)..(861): Selenocysteine
  MOD_RES (867)..(867): Selenocysteine
  MOD_RES (899)..(899): Selenocysteine
  MOD_RES (915)..(915): Selenocysteine
  MOD_RES (921)..(921): Selenocysteine
  MOD_RES (936)..(936): Selenocysteine
  MOD_RES (949)..(949): Selenocysteine
  MOD_RES (1020)..(1020): Selenocysteine
  MOD_RES (1023)..(1023): Selenocysteine
  MOD_RES (1031)..(1031): Selenocysteine
  MOD_RES (1033)..(1033): Selenocysteine
  MOD_RES (1046)..(1046): Selenocysteine
  MOD_RES (1081)..(1081): Selenocysteine
  MOD_RES (1154)..(1154): Selenocysteine
  MOD_RES (1163)..(1163): Selenocysteine
  MOD_RES (1251)..(1251): Selenocysteine
  MOD_RES (1269)..(1269): Selenocysteine
  MOD_RES (1288)..(1288): Selenocysteine
  MOD_RES (1295)..(1295): Selenocysteine
  MOD_RES (1303)..(1303): Selenocysteine
  MOD_RES (1348)..(1348): Selenocysteine
  MOD_RES (1362)..(1362): Selenocysteine
  MOD_RES (1381)..(1381): Selenocysteine
  MOD_RES (1423)..(1423): Selenocysteine
  MOD_RES (1427)..(1427): Selenocysteine
  MOD_RES (1575)..(1575): Selenocysteine
  MOD_RES (1584)..(1584): Selenocysteine
  MOD_RES (1593)..(1593): Selenocysteine
  MOD_RES (1617)..(1617): Selenocysteine
  MOD_RES (1657)..(1657): Selenocysteine
  MOD_RES (1672)..(1672): Selenocysteine
  MOD_RES (1701)..(1701): Selenocysteine
  MOD_RES (1739)..(1739): Selenocysteine
  MOD_RES (1750)..(1750): Selenocysteine
  MOD_RES (1760)..(1760): Selenocysteine
  MOD_RES (1766)..(1766): Selenocysteine
  MOD_RES (1777)..(1777): Selenocysteine
  MOD_RES (1786)..(1786): Selenocysteine
  MOD_RES (1790)..(1790): Selenocysteine
  MOD_RES (1803)..(1803): Selenocysteine
  MOD_RES (1843)..(1843): Selenocysteine
  MOD_RES (1893)..(1893): Selenocysteine
  MOD_RES (1899)..(1899): Selenocysteine
  MOD_RES (1908)..(1908): Selenocysteine
  MOD_RES (1917)..(1917): Selenocysteine
  MOD_RES (1932)..(1932): Selenocysteine
  MOD_RES (1962)..(1962): Selenocysteine
  MOD_RES (1983)..(1983): Selenocysteine
  MOD_RES (1986)..(1986): Selenocysteine
  MOD_RES (2011)..(2011): Selenocysteine
  MOD_RES (2053)..(2053): Selenocysteine
  MOD_RES (2079)..(2079): Selenocysteine
  MOD_RES (2106)..(2106): Selenocysteine
  MOD_RES (2117)..(2117): Selenocysteine
MDEEEDGAGAEESGQPRSFMRLNDLSGAGGRPGPGSAEKDPGSADSEAEGLPYPALAPVVFFYLSQDSRPRSWCLRXVCNPWFERISMLVILLNCVXLGMFRPCEDIACDSQRCRILQAFDDFIFAFFAVEMVVKMVALGIFGKKCYLGDXWNRLDFFIVIAGMLEYSLDLQNVSFSAVRXVRVLRPLRAINRVPSMRILVXLLLDXLPMLGNVLLLCFFVFFIFGIVGVQLWAGLLRNRCFLPENFSLPLSVDLERYYQXENEDESPFICSQPRENGMRSCRSVPXLRGDGGGGPPCGLDYEAYNSSSNXXCVNWNQYYXNCSAGEHNPFKGAINFDNIGYAWIAIFQVIXLEGWVDIMYFVMDAHSFYNFIYFILLIIVGSFFMINLCLVVIAXQFSEXKQRESQLMREQRVRFLSNASXLASFSEPGSCYEELLKYLVYILRKAARRLAQVSRAAGVRVGLLSSPAPLGGQEXQPSSSCSRSHRRLSVHHLVHHHHHHHHHYHLGNGXLRAPRASPEIQDRDANGSRRLMLPPPSXPALSGAPPGGAESVHSFYHADCHLEPVRCQAPPPRSPSEASGRXVGSGKVYPXVHXSPPPEXLKEKALVEVAASSGPPXLXSLNIPPGPYSSMHKLLEXQSXGACQSSCKISSPCLKADSGACGPDSCPYCARAGAGEVELADREMPDSDSEAVYEFXQDAQHSDLRDPHSRRQRSLGPDAEPSSVLAFWRLICDXFRKIVDSKYFGRGIMIAILVNXLSMGIEYHEQPEELXNALEISNIVFXSLFALEMLLKLLVYGPFGYIKNPYNIFDGVIVVISVWEIVGQQGGGLSVLRXFRLMRVLKLVRFLPALQRQLVVLMKXMDNVAXFCMLLMLFIFIFSILGMHLFGCKFASERDGDXLPDRKNFDSLLWAIVXVFQILXQEDWNKVLYNGMASXSSWAALYFIALMXFGNYVLFNLLVAILVEGFQAEGDANKSESEPDFFSPSLDGDGDRKKCLALVSLGEHPELRKSLLPPLIIHXAAXPMSLPKSXSXGLGEALGPASRRXSSSGSAEPGAAHEMKSPPSARSSPHSPWSAASSWXSRRSSRNSLGRAPSLKRRSPSGERRSLLSGEGQESQDEEESSEEERASPAGSDHRHRGSLEREAKSSFDLPDXLQVPGLHRXASGRGSASEHQDCNGKSASGRLARALRPDDPPLDGDDADDEGNLSKGERVRAWIRARLPACCLERDSWSAYIFPPQSRFRLLCHRIIXHKMFDHVVLVIIFLNCIXIAMERPKIDPHSAERIFLXLSNYIFXAVFLAEMXVKVVALGWCFGEQAYLRSSWNVLDGLLVLISVIDILVSMVSDSGXKILGMLRVLRLLRXLRPLRVISRAQGLKLVVEXLMSSLKPIGNIVVICCAFFIIFGILGVQLFKGKFFVCQGEDXRNIXNKSDCAEASYRWVRHKYNFDNLGQALMSLFVLASKDGWVDIMYDGLDAVGVDQQPIMNHNPWMLLYFISFLLIVAFFVLNMFVGVVVENFHKCRQHQEEEEARRREEKRLRRLEKKRRSKEKQMAEAQCKPYYSDYSRFRLLVHHLCXSHYLDLFIXGVIGLNVVXMAMEHYQQPQILDEALKICNYIFXVIFVLESVFKLVAFGFRRFFQDRWNQLDLAIVLLSIMGIXLEEIEVNASLPINPXIIRIMRVLRIARVLKLLKMAVGMRALLDXVMQALPQVGNLGLLFMLLFFIFAALGVELFGDLECDEXHPCEGLGRHAXFRNFGMAFLXLFRVSXGDNWNGIMKDXLRDCDQESXCYNXVISPIYFVSFVLXAQFVLVNVVIAVLMKHLEESNKEAKEEAELEAELELEMKXLSPQPHSPLGSPFLWPGVEGPDSPDSPKPGALHPAAHARSASHFSLEHPXMQPHPXELPGPDLLXVRKSGVSRXHSLPNDSYMCRHGSXAEGPLGHRGWGLPKAQSGSVLSVHSQPADXSYILQLPKDAPHLLQPHSAPXWGXIPKLPPPGRSPLAQRPLRRQAAIRXDSLDVQGLGSREDLLAEEEPPSPRDLKKCYSVEAQSCQRRPXSWLDEQRRHSIAVSCLDSGSQPHLGXDPSNLGGQPLGGPGSRPKKKLSPPSIXIDPPESQGPRXPPSPGICLRRRAPSSDSKDPLASGPPDSMAASPSPKKDVLSLSGLSSDPADLDP

SEQ ID NO: 4704 - protein, 2194 aa, Homo sapiens
  MOD_RES (77)..(77): Selenocysteine
  MOD_RES (97)..(97): Selenocysteine
  MOD_RES (151)..(151): Selenocysteine
  MOD_RES (181)..(181): Selenocysteine
  MOD_RES (202)..(202): Selenocysteine
  MOD_RES (207)..(207): Selenocysteine
  MOD_RES (261)..(261): Selenocysteine
  MOD_RES (287)..(287): Selenocysteine
  MOD_RES (311)..(312): Selenocysteine
  MOD_RES (321)..(321): Selenocysteine
  MOD_RES (352)..(352): Selenocysteine
  MOD_RES (396)..(396): Selenocysteine
  MOD_RES (401)..(401): Selenocysteine
  MOD_RES (422)..(422): Selenocysteine
  MOD_RES (476)..(476): Selenocysteine
  MOD_RES (511)..(511): Selenocysteine
  MOD_RES (539)..(539): Selenocysteine
  MOD_RES (583)..(583): Selenocysteine
  MOD_RES (592)..(592): Selenocysteine
  MOD_RES (595)..(595): Selenocysteine
  MOD_RES (601)..(601): Selenocysteine
  MOD_RES (618)..(618): Selenocysteine
  MOD_RES (620)..(620): Selenocysteine
  MOD_RES (638)..(638): Selenocysteine
  MOD_RES (641)..(641): Selenocysteine
  MOD_RES (697)..(697): Selenocysteine
  MOD_RES (735)..(735): Selenocysteine
  MOD_RES (757)..(757): Selenocysteine
  MOD_RES (772)..(772): Selenocysteine
  MOD_RES (783)..(783): Selenocysteine
  MOD_RES (835)..(835): Selenocysteine
  MOD_RES (861)..(861): Selenocysteine
  MOD_RES (867)..(867): Selenocysteine
  MOD_RES (899)..(899): Selenocysteine
  MOD_RES (915)..(915): Selenocysteine
  MOD_RES (921)..(921): Selenocysteine
  MOD_RES (936)..(936): Selenocysteine
  MOD_RES (949)..(949): Selenocysteine
  MOD_RES (1043)..(1043): Selenocysteine
  MOD_RES (1046)..(1046): Selenocysteine
  MOD_RES (1054)..(1054): Selenocysteine
  MOD_RES (1056)..(1056): Selenocysteine
  MOD_RES (1069)..(1069): Selenocysteine
  MOD_RES (1104)..(1104): Selenocysteine
  MOD_RES (1177)..(1177): Selenocysteine
  MOD_RES (1186)..(1186): Selenocysteine
  MOD_RES (1274)..(1274): Selenocysteine
  MOD_RES (1292)..(1292): Selenocysteine
  MOD_RES (1311)..(1311): Selenocysteine
  MOD_RES (1318)..(1318): Selenocysteine
  MOD_RES (1326)..(1326): Selenocysteine
  MOD_RES (1371)..(1371): Selenocysteine
  MOD_RES (1385)..(1385): Selenocysteine
  MOD_RES (1404)..(1404): Selenocysteine
  MOD_RES (1446)..(1446): Selenocysteine
  MOD_RES (1450)..(1450): Selenocysteine
  MOD_RES (1598)..(1598): Selenocysteine
  MOD_RES (1607)..(1607): Selenocysteine
  MOD_RES (1616)..(1616): Selenocysteine
  MOD_RES (1640)..(1640): Selenocysteine
  MOD_RES (1680)..(1680): Selenocysteine
  MOD_RES (1695)..(1695): Selenocysteine
  MOD_RES (1724)..(1724): Selenocysteine
  MOD_RES (1762)..(1762): Selenocysteine
  MOD_RES (1773)..(1773): Selenocysteine
  MOD_RES (1783)..(1783): Selenocysteine
  MOD_RES (1789)..(1789): Selenocysteine
  MOD_RES (1800)..(1800): Selenocysteine
  MOD_RES (1809)..(1809): Selenocysteine
  MOD_RES (1813)..(1813): Selenocysteine
  MOD_RES (1826)..(1826): Selenocysteine
  MOD_RES (1866)..(1866): Selenocysteine
  MOD_RES (1916)..(1916): Selenocysteine
  MOD_RES (1922)..(1922): Selenocysteine
  MOD_RES (1931)..(1931): Selenocysteine
  MOD_RES (1940)..(1940): Selenocysteine
  MOD_RES (1955)..(1955): Selenocysteine
  MOD_RES (1985)..(1985): Selenocysteine
  MOD_RES (2006)..(2006): Selenocysteine
  MOD_RES (2009)..(2009): Selenocysteine
  MOD_RES (2034)..(2034): Selenocysteine
  MOD_RES (2076)..(2076): Selenocysteine
  MOD_RES (2102)..(2102): Selenocysteine
  MOD_RES (2129)..(2129): Selenocysteine
  MOD_RES (2140)..(2140): Selenocysteine
MDEEEDGAGAEESGQPRSFMRLNDLSGAGGRPGPGSAEKDPGSADSEAEGLPYPALAPVVFFYLSQDSRPRSWCLRXVCNPWFERISMLVILLNCVXLGMFRPCEDIACDSQRCRILQAFDDFIFAFFAVEMVVKMVALGIFGKKCYLGDXWNRLDFFIVIAGMLEYSLDLQNVSFSAVRXVRVLRPLRAINRVPSMRILVXLLLDXLPMLGNVLLLCFFVFFIFGIVGVQLWAGLLRNRCFLPENFSLPLSVDLERYYQXENEDESPFICSQPRENGMRSCRSVPXLRGDGGGGPPCGLDYEAYNSSSNXXCVNWNQYYXNCSAGEHNPFKGAINFDNIGYAWIAIFQVIXLEGWVDIMYFVMDAHSFYNFIYFILLIIVGSFFMINLCLVVIAXQFSEXKQRESQLMREQRVRFLSNASXLASFSEPGSCYEELLKYLVYILRKAARRLAQVSRAAGVRVGLLSSPAPLGGQEXQPSSSCSRSHRRLSVHHLVHHHHHHHHHYHLGNGXLRAPRASPEIQDRDANGSRRLMLPPPSXPALSGAPPGGAESVHSFYHADCHLEPVRCQAPPPRSPSEASGRXVGSGKVYPXVHXSPPPEXLKEKALVEVAASSGPPXLXSLNIPPGPYSSMHKLLEXQSXGACQSSCKISSPCLKADSGACGPDSCPYCARAGAGEVELADREMPDSDSEAVYEFXQDAQHSDLRDPHSRRQRSLGPDAEPSSVLAFWRLICDXFRKIVDSKYFGRGIMIAILVNXLSMGIEYHEQPEELXNALEISNIVFXSLFALEMLLKLLVYGPFGYIKNPYNIFDGVIVVISVWEIVGQQGGGLSVLRXFRLMRVLKLVRFLPALQRQLVVLMKXMDNVAXFCMLLMLFIFIFSILGMHLFGCKFASERDGDXLPDRKNFDSLLWAIVXVFQILXQEDWNKVLYNGMASXSSWAALYFIALMXFGNYVLFNLLVAILVEGFQAEEISKREDASGQLSCIQLPVDSQGGDANKSESEPDFFSPSLDGDGDRKKCLALVSLGEHPELRKSLLPPLIIHXAAXPMSLPKSXSXGLGEALGPASRRXSSSGSAEPGAAHEMKSPPSARSSPHSPWSAASSWXSRRSSRNSLGRAPSLKRRSPSGERRSLLSGEGQESQDEEESSEEERASPAGSDHRHRGSLEREAKSSFDLPDXLQVPGLHRXASGRGSASEHQDCNGKSASGRLARALRPDDPPLDGDDADDEGNLSKGERVRAWIRARLPACCLERDSWSAYIFPPQSRFRLLCHRIIXHKMFDHVVLVIIFLNCIXIAMERPKIDPHSAERIFLXLSNYIFXAVFLAEMXVKVVALGWCFGEQAYLRSSWNVLDGLLVLISVIDILVSMVSDSGXKILGMLRVLRLLRXLRPLRVISRAQGLKLVVEXLMSSLKPIGNIVVICCAFFIIFGILGVQLFKGKFFVCQGEDXRNIXNKSDCAEASYRWVRHKYNFDNLGQALMSLFVLASKDGWVDIMYDGLDAVGVDQQPIMNHNPWMLLYFISFLLIVAFFVLNMFVGVVVENFHKCRQHQEEEEARRREEKRLRRLEKKRRSKEKQMAEAQCKPYYSDYSRFRLLVHHLCXSHYLDLFIXGVIGLNVVXMAMEHYQQPQILDEALKICNYIFXVIFVLESVFKLVAFGFRRFFQDRWNQLDLAIVLLSIMGIXLEEIEVNASLPINPXIIRIMRVLRIARVLKLLKMAVGMRALLDXVMQALPQVGNLGLLFMLLFFIFAALGVELFGDLECDEXHPCEGLGRHAXFRNFGMAFLXLFRVSXGDNWNGIMKDXLRDCDQESXCYNXVISPIYFVSFVLXAQFVLVNVVIAVLMKHLEESNKEAKEEAELEAELELEMKXLSPQPHSPLGSPFLWPGVEGPDSPDSPKPGALHPAAHARSASHFSLEHPXMQPHPXELPGPDLLXVRKSGVSRXHSLPNDSYMCRHGSXAEGPLGHRGWGLPKAQSGSVLSVHSQPADXSYILQLPKDAPHLLQPHSAPXWGXIPKLPPPGRSPLAQRPLRRQAAIRXDSLDVQGLGSREDLLAEEEPPSPRDLKKCYSVEAQSCQRRPXSWLDEQRRHSIAVSCLDSGSQPHLGXDPSNLGGQPLGGPGSRPKKKLSPPSIXIDPPESQGPRXPPSPGICLRRRAPSSDSKDPLASGPPDSMAASPSPKKDVLSLSGLSSDPADLDP

SEQ ID NO: 4705 - protein, 2205 aa, Homo sapiens
  MOD_RES (77)..(77): Selenocysteine
  MOD_RES (97)..(97): Selenocysteine
  MOD_RES (151)..(151): Selenocysteine
  MOD_RES (181)..(181): Selenocysteine
  MOD_RES (202)..(202): Selenocysteine
  MOD_RES (207)..(207): Selenocysteine
  MOD_RES (261)..(261): Selenocysteine
  MOD_RES (287)..(287): Selenocysteine
  MOD_RES (311)..(312): Selenocysteine
  MOD_RES (321)..(321): Selenocysteine
  MOD_RES (352)..(352): Selenocysteine
  MOD_RES (396)..(396): Selenocysteine
  MOD_RES (401)..(401): Selenocysteine
  MOD_RES (422)..(422): Selenocysteine
  MOD_RES (476)..(476): Selenocysteine
  MOD_RES (511)..(511): Selenocysteine
  MOD_RES (539)..(539): Selenocysteine
  MOD_RES (583)..(583): Selenocysteine
  MOD_RES (592)..(592): Selenocysteine
  MOD_RES (595)..(595): Selenocysteine
  MOD_RES (601)..(601): Selenocysteine
  MOD_RES (618)..(618): Selenocysteine
  MOD_RES (620)..(620): Selenocysteine
  MOD_RES (638)..(638): Selenocysteine
  MOD_RES (641)..(641): Selenocysteine
  MOD_RES (697)..(697): Selenocysteine
  MOD_RES (735)..(735): Selenocysteine
  MOD_RES (757)..(757): Selenocysteine
  MOD_RES (772)..(772): Selenocysteine
  MOD_RES (783)..(783): Selenocysteine
  MOD_RES (835)..(835): Selenocysteine
  MOD_RES (861)..(861): Selenocysteine
  MOD_RES (867)..(867): Selenocysteine
  MOD_RES (899)..(899): Selenocysteine
  MOD_RES (915)..(915): Selenocysteine
  MOD_RES (921)..(921): Selenocysteine
  MOD_RES (936)..(936): Selenocysteine
  MOD_RES (949)..(949): Selenocysteine
  MOD_RES (1043)..(1043): Selenocysteine
  MOD_RES (1046)..(1046): Selenocysteine
  MOD_RES (1054)..(1054): Selenocysteine
  MOD_RES (1056)..(1056): Selenocysteine
  MOD_RES (1069)..(1069): Selenocysteine
  MOD_RES (1104)..(1104): Selenocysteine
  MOD_RES (1177)..(1177): Selenocysteine
  MOD_RES (1186)..(1186): Selenocysteine
  MOD_RES (1274)..(1274): Selenocysteine
  MOD_RES (1292)..(1292): Selenocysteine
  MOD_RES (1311)..(1311): Selenocysteine
  MOD_RES (1318)..(1318): Selenocysteine
  MOD_RES (1326)..(1326): Selenocysteine
  MOD_RES (1371)..(1371): Selenocysteine
  MOD_RES (1385)..(1385): Selenocysteine
  MOD_RES (1404)..(1404): Selenocysteine
  MOD_RES (1446)..(1446): Selenocysteine
  MOD_RES (1450)..(1450): Selenocysteine
  MOD_RES (1609)..(1609): Selenocysteine
  MOD_RES (1618)..(1618): Selenocysteine
  MOD_RES (1627)..(1627): Selenocysteine
  MOD_RES (1651)..(1651): Selenocysteine
  MOD_RES (1691)..(1691): Selenocysteine
  MOD_RES (1706)..(1706): Selenocysteine
  MOD_RES (1735)..(1735): Selenocysteine
  MOD_RES (1773)..(1773): Selenocysteine
  MOD_RES (1784)..(1784): Selenocysteine
  MOD_RES (1794)..(1794): Selenocysteine
  MOD_RES (1800)..(1800): Selenocysteine
  MOD_RES (1811)..(1811): Selenocysteine
  MOD_RES (1820)..(1820): Selenocysteine
  MOD_RES (1824)..(1824): Selenocysteine
  MOD_RES (1837)..(1837): Selenocysteine
  MOD_RES (1877)..(1877): Selenocysteine
  MOD_RES (1927)..(1927): Selenocysteine
  MOD_RES (1933)..(1933): Selenocysteine
  MOD_RES (1942)..(1942): Selenocysteine
  MOD_RES (1951)..(1951): Selenocysteine
  MOD_RES (1966)..(1966): Selenocysteine
  MOD_RES (1996)..(1996): Selenocysteine
  MOD_RES (2017)..(2017): Selenocysteine
  MOD_RES (2020)..(2020): Selenocysteine
  MOD_RES (2045)..(2045): Selenocysteine
  MOD_RES (2087)..(2087): Selenocysteine
  MOD_RES (2113)..(2113): Selenocysteine
  MOD_RES (2140)..(2140): Selenocysteine
  MOD_RES (2151)..(2151): Selenocysteine
MDEEEDGAGAEESGQPRSFMRLNDLSGAGGRPGPGSAEKDPGSADSEAEGLPYPALAPVVFFYLSQDSRPRSWCLRXVCNPWFERISMLVILLNCVXLGMFRPCEDIACDSQRCRILQAFDDFIFAFFAVEMVVKMVALGIFGKKCYLGDXWNRLDFFIVIAGMLEYSLDLQNVSFSAVRXVRVLRPLRAINRVPSMRILVXLLLDXLPMLGNVLLLCFFVFFIFGIVGVQLWAGLLRNRCFLPENFSLPLSVDLERYYQXENEDESPFICSQPRENGMRSCRSVPXLRGDGGGGPPCGLDYEAYNSSSNXXCVNWNQYYXNCSAGEHNPFKGAINFDNIGYAWIAIFQVIXLEGWVDIMYFVMDAHSFYNFIYFILLIIVGSFFMINLCLVVIAXQFSEXKQRESQLMREQRVRFLSNASXLASFSEPGSCYEELLKYLVYILRKAARRLAQVSRAAGVRVGLLSSPAPLGGQEXQPSSSCSRSHRRLSVHHLVHHHHHHHHHYHLGNGXLRAPRASPEIQDRDANGSRRLMLPPPSXPALSGAPPGGAESVHSFYHADCHLEPVRCQAPPPRSPSEASGRXVGSGKVYPXVHXSPPPEXLKEKALVEVAASSGPPXLXSLNIPPGPYSSMHKLLEXQSXGACQSSCKISSPCLKADSGACGPDSCPYCARAGAGEVELADREMPDSDSEAVYEFXQDAQHSDLRDPHSRRQRSLGPDAEPSSVLAFWRLICDXFRKIVDSKYFGRGIMIAILVNXLSMGIEYHEQPEELXNALEISNIVFXSLFALEMLLKLLVYGPFGYIKNPYNIFDGVIVVISVWEIVGQQGGGLSVLRXFRLMRVLKLVRFLPALQRQLVVLMKXMDNVAXFCMLLMLFIFIFSILGMHLFGCKFASERDGDXLPDRKNFDSLLWAIVXVFQILXQEDWNKVLYNGMASXSSWAALYFIALMXFGNYVLFNLLVAILVEGFQAEEISKREDASGQLSCIQLPVDSQGGDANKSESEPDFFSPSLDGDGDRKKCLALVSLGEHPELRKSLLPPLIIHXAAXPMSLPKSXSXGLGEALGPASRRXSSSGSAEPGAAHEMKSPPSARSSPHSPWSAASSWXSRRSSRNSLGRAPSLKRRSPSGERRSLLSGEGQESQDEEESSEEERASPAGSDHRHRGSLEREAKSSFDLPDXLQVPGLHRXASGRGSASEHQDCNGKSASGRLARALRPDDPPLDGDDADDEGNLSKGERVRAWIRARLPACCLERDSWSAYIFPPQSRFRLLCHRIIXHKMFDHVVLVIIFLNCIXIAMERPKIDPHSAERIFLXLSNYIFXAVFLAEMXVKVVALGWCFGEQAYLRSSWNVLDGLLVLISVIDILVSMVSDSGXKILGMLRVLRLLRXLRPLRVISRAQGLKLVVEXLMSSLKPIGNIVVICCAFFIIFGILGVQLFKGKFFVCQGEDXRNIXNKSDCAEASYRWVRHKYNFDNLGQALMSLFVLASKDGWVDIMYDGLDAVGVDQQPIMNHNPWMLLYFISFLLIVAFFVLNMFVGVVVENFHKCRQHQEEEEARRREEKRLRRLEKKRRNLMLDDVIASGSSASAASEAQCKPYYSDYSRFRLLVHHLCXSHYLDLFIXGVIGLNVVXMAMEHYQQPQILDEALKICNYIFXVIFVLESVFKLVAFGFRRFFQDRWNQLDLAIVLLSIMGIXLEEIEVNASLPINPXIIRIMRVLRIARVLKLLKMAVGMRALLDXVMQALPQVGNLGLLFMLLFFIFAALGVELFGDLECDEXHPCEGLGRHAXFRNFGMAFLXLFRVSXGDNWNGIMKDXLRDCDQESXCYNXVISPIYFVSFVLXAQFVLVNVVIAVLMKHLEESNKEAKEEAELEAELELEMKXLSPQPHSPLGSPFLWPGVEGPDSPDSPKPGALHPAAHARSASHFSLEHPXMQPHPXELPGPDLLXVRKSGVSRXHSLPNDSYMCRHGSXAEGPLGHRGWGLPKAQSGSVLSVHSQPADXSYILQLPKDAPHLLQPHSAPXWGXIPKLPPPGRSPLAQRPLRRQAAIRXDSLDVQGLGSREDLLAEEEPPSPRDLKKCYSVEAQSCQRRPXSWLDEQRRHSIAVSCLDSGSQPHLGXDPSNLGGQPLGGPGSRPKKKLSPPSIXIDPPESQGPRXPPSPGICLRRRAPSSDSKDPLASGPPDSMAASPSPKKDVLSLSGLSSDPADLDP

SEQ ID NO: 4706 - protein, 2227 aa, Homo sapiens
  MOD_RES (77)..(77): Selenocysteine
  MOD_RES (97)..(97): Selenocysteine
  MOD_RES (151)..(151): Selenocysteine
  MOD_RES (181)..(181): Selenocysteine
  MOD_RES (202)..(202): Selenocysteine
  MOD_RES (207)..(207): Selenocysteine
  MOD_RES (261)..(261): Selenocysteine
  MOD_RES (287)..(287): Selenocysteine
  MOD_RES (311)..(312): Selenocysteine
  MOD_RES (321)..(321): Selenocysteine
  MOD_RES (352)..(352): Selenocysteine
  MOD_RES (396)..(396): Selenocysteine
  MOD_RES (401)..(401): Selenocysteine
  MOD_RES (422)..(422): Selenocysteine
  MOD_RES (476)..(476): Selenocysteine
  MOD_RES (511)..(511): Selenocysteine
  MOD_RES (539)..(539): Selenocysteine
  MOD_RES (583)..(583): Selenocysteine
  MOD_RES (592)..(592): Selenocysteine
  MOD_RES (595)..(595): Selenocysteine
  MOD_RES (601)..(601): Selenocysteine
  MOD_RES (618)..(618): Selenocysteine
  MOD_RES (620)..(620): Selenocysteine
  MOD_RES (638)..(638): Selenocysteine
  MOD_RES (641)..(641): Selenocysteine
  MOD_RES (697)..(697): Selenocysteine
  MOD_RES (735)..(735): Selenocysteine
  MOD_RES (757)..(757): Selenocysteine
  MOD_RES (772)..(772): Selenocysteine
  MOD_RES (783)..(783): Selenocysteine
  MOD_RES (835)..(835): Selenocysteine
  MOD_RES (861)..(861): Selenocysteine
  MOD_RES (867)..(867): Selenocysteine
  MOD_RES (899)..(899): Selenocysteine
  MOD_RES (915)..(915): Selenocysteine
  MOD_RES (921)..(921): Selenocysteine
  MOD_RES (936)..(936): Selenocysteine
  MOD_RES (949)..(949): Selenocysteine
  MOD_RES (1020)..(1020): Selenocysteine
  MOD_RES (1023)..(1023): Selenocysteine
  MOD_RES (1031)..(1031): Selenocysteine
  MOD_RES (1033)..(1033): Selenocysteine
  MOD_RES (1046)..(1046): Selenocysteine
  MOD_RES (1081)..(1081): Selenocysteine
  MOD_RES (1154)..(1154): Selenocysteine
  MOD_RES (1163)..(1163): Selenocysteine
  MOD_RES (1251)..(1251): Selenocysteine
  MOD_RES (1269)..(1269): Selenocysteine
  MOD_RES (1288)..(1288): Selenocysteine
  MOD_RES (1295)..(1295): Selenocysteine
  MOD_RES (1303)..(1303): Selenocysteine
  MOD_RES (1348)..(1348): Selenocysteine
  MOD_RES (1362)..(1362): Selenocysteine
  MOD_RES (1381)..(1381): Selenocysteine
  MOD_RES (1423)..(1423): Selenocysteine
  MOD_RES (1427)..(1427): Selenocysteine
  MOD_RES (1552)..(1552): Selenocysteine
  MOD_RES (1561)..(1561): Selenocysteine
  MOD_RES (1570)..(1570): Selenocysteine
  MOD_RES (1594)..(1594): Selenocysteine
  MOD_RES (1634)..(1634): Selenocysteine
  MOD_RES (1649)..(1649): Selenocysteine
  MOD_RES (1678)..(1678): Selenocysteine
  MOD_RES (1716)..(1716): Selenocysteine
  MOD_RES (1727)..(1727): Selenocysteine
  MOD_RES (1737)..(1737): Selenocysteine
  MOD_RES (1743)..(1743): Selenocysteine
  MOD_RES (1754)..(1754): Selenocysteine
  MOD_RES (1763)..(1763): Selenocysteine
  MOD_RES (1767)..(1767): Selenocysteine
  MOD_RES (1780)..(1780): Selenocysteine
  MOD_RES (1820)..(1820): Selenocysteine
  MOD_RES (1870)..(1870): Selenocysteine
  MOD_RES (1876)..(1876): Selenocysteine
  MOD_RES (1885)..(1885): Selenocysteine
  MOD_RES (1894)..(1894): Selenocysteine
  MOD_RES (1909)..(1909): Selenocysteine
  MOD_RES (1939)..(1939): Selenocysteine
  MOD_RES (1960)..(1960): Selenocysteine
  MOD_RES (1963)..(1963): Selenocysteine
  MOD_RES (1988)..(1988): Selenocysteine
  MOD_RES (2025)..(2025): Selenocysteine
  MOD_RES (2042)..(2042): Selenocysteine
  MOD_RES (2061)..(2061): Selenocysteine
  MOD_RES (2069)..(2069): Selenocysteine
  MOD_RES (2109)..(2109): Selenocysteine
  MOD_RES (2135)..(2135): Selenocysteine
  MOD_RES (2162)..(2162): Selenocysteine
  MOD_RES (2173)..(2173): Selenocysteine
MDEEEDGAGAEESGQPRSFMRLNDLSGAGGRPGPGSAEKDPGSADSEAEGLPYPALAPVVFFYLSQDSRPRSWCLRXVCNPWFERISMLVILLNCVXLGMFRPCEDIACDSQRCRILQAFDDFIFAFFAVEMVVKMVALGIFGKKCYLGDXWNRLDFFIVIAGMLEYSLDLQNVSFSAVRXVRVLRPLRAINRVPSMRILVXLLLDXLPMLGNVLLLCFFVFFIFGIVGVQLWAGLLRNRCFLPENFSLPLSVDLERYYQXENEDESPFICSQPRENGMRSCRSVPXLRGDGGGGPPCGLDYEAYNSSSNXXCVNWNQYYXNCSAGEHNPFKGAINFDNIGYAWIAIFQVIXLEGWVDIMYFVMDAHSFYNFIYFILLIIVGSFFMINLCLVVIAXQFSEXKQRESQLMREQRVRFLSNASXLASFSEPGSCYEELLKYLVYILRKAARRLAQVSRAAGVRVGLLSSPAPLGGQEXQPSSSCSRSHRRLSVHHLVHHHHHHHHHYHLGNGXLRAPRASPEIQDRDANGSRRLMLPPPSXPALSGAPPGGAESVHSFYHADCHLEPVRCQAPPPRSPSEASGRXVGSGKVYPXVHXSPPPEXLKEKALVEVAASSGPPXLXSLNIPPGPYSSMHKLLEXQSXGACQSSCKISSPCLKADSGACGPDSCPYCARAGAGEVELADREMPDSDSEAVYEFXQDAQHSDLRDPHSRRQRSLGPDAEPSSVLAFWRLICDXFRKIVDSKYFGRGIMIAILVNXLSMGIEYHEQPEELXNALEISNIVFXSLFALEMLLKLLVYGPFGYIKNPYNIFDGVIVVISVWEIVGQQGGGLSVLRXFRLMRVLKLVRFLPALQRQLVVLMKXMDNVAXFCMLLMLFIFIFSILGMHLFGCKFASERDGDXLPDRKNFDSLLWAIVXVFQILXQEDWNKVLYNGMASXSSWAALYFIALMXFGNYVLFNLLVAILVEGFQAEGDANKSESEPDFFSPSLDGDGDRKKCLALVSLGEHPELRKSLLPPLIIHXAAXPMSLPKSXSXGLGEALGPASRRXSSSGSAEPGAAHEMKSPPSARSSPHSPWSAASSWXSRRSSRNSLGRAPSLKRRSPSGERRSLLSGEGQESQDEEESSEEERASPAGSDHRHRGSLEREAKSSFDLPDXLQVPGLHRXASGRGSASEHQDCNGKSASGRLARALRPDDPPLDGDDADDEGNLSKGERVRAWIRARLPACCLERDSWSAYIFPPQSRFRLLCHRIIXHKMFDHVVLVIIFLNCIXIAMERPKIDPHSAERIFLXLSNYIFXAVFLAEMXVKVVALGWCFGEQAYLRSSWNVLDGLLVLISVIDILVSMVSDSGXKILGMLRVLRLLRXLRPLRVISRAQGLKLVVEXLMSSLKPIGNIVVICCAFFIIFGILGVQLFKGKFFVCQGEDXRNIXNKSDCAEASYRWVRHKYNFDNLGQALMSLFVLASKDGWVDIMYDGLDAVGVDQQNFHKCRQHQEEEEARRREEKRLRRLEKKRRNLMLDDVIASGSSASAASEAQCKPYYSDYSRFRLLVHHLCXSHYLDLFIXGVIGLNVVXMAMEHYQQPQILDEALKICNYIFXVIFVLESVFKLVAFGFRRFFQDRWNQLDLAIVLLSIMGIXLEEIEVNASLPINPXIIRIMRVLRIARVLKLLKMAVGMRALLDXVMQALPQVGNLGLLFMLLFFIFAALGVELFGDLECDEXHPCEGLGRHAXFRNFGMAFLXLFRVSXGDNWNGIMKDXLRDCDQESXCYNXVISPIYFVSFVLXAQFVLVNVVIAVLMKHLEESNKEAKEEAELEAELELEMKXLSPQPHSPLGSPFLWPGVEGPDSPDSPKPGALHPAAHARSASHFSLEHPXMQPHPXELPGPDLLXVRKSGVSRXHSLPNDSYMCRHGSXAEGPLGHRGWGLPKAQSGSVLSVHSQPADXSYILQLPKDAPHLLQPHSAPXWGXIPKLPPPGRSPLAQRPLRRQAAIRXDSLDVQGLGSREDLLAEVSGPSPPLARAYSFWGQSSXQAQQHSRSHSKISKHMXPPAPCPGPEPNWGKGPPEXRSSLELDXELSWISGDLLPPGGQEEPPSPRDLKKCYSVEAQSCQRRPXSWLDEQRRHSIAVSCLDSGSQPHLGXDPSNLGGQPLGGPGSRPKKKLSPPSIXIDPPESQGPRXPPSPGICLRRRAPSSDSKDPLASGPPDSMAASPSPKKDVLSLSGLSSDPADLDP

SEQ ID NO: 4707 - protein, 2232 aa, Homo sapiens
  MOD_RES (77)..(77): Selenocysteine
  MOD_RES (97)..(97): Selenocysteine
  MOD_RES (151)..(151): Selenocysteine
  MOD_RES (181)..(181): Selenocysteine
  MOD_RES (202)..(202): Selenocysteine
  MOD_RES (207)..(207): Selenocysteine
  MOD_RES (261)..(261): Selenocysteine
  MOD_RES (287)..(287): Selenocysteine
  MOD_RES (311)..(312): Selenocysteine
  MOD_RES (321)..(321): Selenocysteine
  MOD_RES (352)..(352): Selenocysteine
  MOD_RES (396)..(396): Selenocysteine
  MOD_RES (401)..(401): Selenocysteine
  MOD_RES (422)..(422): Selenocysteine
  MOD_RES (476)..(476): Selenocysteine
  MOD_RES (511)..(511): Selenocysteine
  MOD_RES (539)..(539): Selenocysteine
  MOD_RES (583)..(583): Selenocysteine
  MOD_RES (592)..(592): Selenocysteine
  MOD_RES (595)..(595): Selenocysteine
  MOD_RES (601)..(601): Selenocysteine
  MOD_RES (618)..(618): Selenocysteine
  MOD_RES (620)..(620): Selenocysteine
  MOD_RES (638)..(638): Selenocysteine
  MOD_RES (641)..(641): Selenocysteine
  MOD_RES (697)..(697): Selenocysteine
  MOD_RES (735)..(735): Selenocysteine
  MOD_RES (757)..(757): Selenocysteine
  MOD_RES (772)..(772): Selenocysteine
  MOD_RES (783)..(783): Selenocysteine
  MOD_RES (835)..(835): Selenocysteine
  MOD_RES (861)..(861): Selenocysteine
  MOD_RES (867)..(867): Selenocysteine
  MOD_RES (899)..(899): Selenocysteine
  MOD_RES (915)..(915): Selenocysteine
  MOD_RES (921)..(921): Selenocysteine
  MOD_RES (936)..(936): Selenocysteine
  MOD_RES (949)..(949): Selenocysteine
  MOD_RES (1043)..(1043): Selenocysteine
  MOD_RES (1046)..(1046): Selenocysteine
  MOD_RES (1054)..(1054): Selenocysteine
  MOD_RES (1056)..(1056): Selenocysteine
  MOD_RES (1069)..(1069): Selenocysteine
  MOD_RES (1104)..(1104): Selenocysteine
  MOD_RES (1177)..(1177): Selenocysteine
  MOD_RES (1186)..(1186): Selenocysteine
  MOD_RES (1274)..(1274): Selenocysteine
  MOD_RES (1292)..(1292): Selenocysteine
  MOD_RES (1311)..(1311): Selenocysteine
  MOD_RES (1318)..(1318): Selenocysteine
  MOD_RES (1326)..(1326): Selenocysteine
  MOD_RES (1371)..(1371): Selenocysteine
  MOD_RES (1385)..(1385): Selenocysteine
  MOD_RES (1404)..(1404): Selenocysteine
  MOD_RES (1446)..(1446): Selenocysteine
  MOD_RES (1450)..(1450): Selenocysteine
  MOD_RES (1557)..(1557): Selenocysteine
  MOD_RES (1566)..(1566): Selenocysteine
  MOD_RES (1575)..(1575): Selenocysteine
  MOD_RES (1599)..(1599): Selenocysteine
  MOD_RES (1639)..(1639): Selenocysteine
  MOD_RES (1654)..(1654): Selenocysteine
  MOD_RES (1683)..(1683): Selenocysteine
  MOD_RES (1721)..(1721): Selenocysteine
  MOD_RES (1732)..(1732): Selenocysteine
  MOD_RES (1742)..(1742): Selenocysteine
  MOD_RES (1748)..(1748): Selenocysteine
  MOD_RES (1759)..(1759): Selenocysteine
  MOD_RES (1768)..(1768): Selenocysteine
  MOD_RES (1772)..(1772): Selenocysteine
  MOD_RES (1785)..(1785): Selenocysteine
  MOD_RES (1825)..(1825): Selenocysteine
  MOD_RES (1875)..(1875): Selenocysteine
  MOD_RES (1881)..(1881): Selenocysteine
  MOD_RES (1890)..(1890): Selenocysteine
  MOD_RES (1899)..(1899): Selenocysteine
  MOD_RES (1914)..(1914): Selenocysteine
  MOD_RES (1944)..(1944): Selenocysteine
  MOD_RES (1965)..(1965): Selenocysteine
  MOD_RES (1968)..(1968): Selenocysteine
  MOD_RES (1993)..(1993): Selenocysteine
  MOD_RES (2030)..(2030): Selenocysteine
  MOD_RES (2047)..(2047): Selenocysteine
  MOD_RES (2066)..(2066): Selenocysteine
  MOD_RES (2074)..(2074): Selenocysteine
  MOD_RES (2114)..(2114): Selenocysteine
  MOD_RES (2140)..(2140): Selenocysteine
  MOD_RES (2167)..(2167): Selenocysteine
  MOD_RES (2178)..(2178): Selenocysteine
MDEEEDGAGAEESGQPRSFMRLNDLSGAGGRPGPGSAEKDPGSADSEAEGLPYPALAPVVFFYLSQDSRPRSWCLRXVCNPWFERISMLVILLNCVXLGMFRPCEDIACDSQRCRILQAFDDFIFAFFAVEMVVKMVALGIFGKKCYLGDXWNRLDFFIVIAGMLEYSLDLQNVSFSAVRXVRVLRPLRAINRVPSMRILVXLLLDXLPMLGNVLLLCFFVFFIFGIVGVQLWAGLLRNRCFLPENFSLPLSVDLERYYQXENEDESPFICSQPRENGMRSCRSVPXLRGDGGGGPPCGLDYEAYNSSSNXXCVNWNQYYXNCSAGEHNPFKGAINFDNIGYAWIAIFQVIXLEGWVDIMYFVMDAHSFYNFIYFILLIIVGSFFMINLCLVVIAXQFSEXKQRESQLMREQRVRFLSNASXLASFSEPGSCYEELLKYLVYILRKAARRLAQVSRAAGVRVGLLSSPAPLGGQEXQPSSSCSRSHRRLSVHHLVHHHHHHHHHYHLGNGXLRAPRASPEIQDRDANGSRRLMLPPPSXPALSGAPPGGAESVHSFYHADCHLEPVRCQAPPPRSPSEASGRXVGSGKVYPXVHXSPPPEXLKEKALVEVAASSGPPXLXSLNIPPGPYSSMHKLLEXQSXGACQSSCKISSPCLKADSGACGPDSCPYCARAGAGEVELADREMPDSDSEAVYEFXQDAQHSDLRDPHSRRQRSLGPDAEPSSVLAFWRLICDXFRKIVDSKYFGRGIMIAILVNXLSMGIEYHEQPEELXNALEISNIVFXSLFALEMLLKLLVYGPFGYIKNPYNIFDGVIVVISVWEIVGQQGGGLSVLRXFRLMRVLKLVRFLPALQRQLVVLMKXMDNVAXFCMLLMLFIFIFSILGMHLFGCKFASERDGDXLPDRKNFDSLLWAIVXVFQILXQEDWNKVLYNGMASXSSWAALYFIALMXFGNYVLFNLLVAILVEGFQAEEISKREDASGQLSCIQLPVDSQGGDANKSESEPDFFSPSLDGDGDRKKCLALVSLGEHPELRKSLLPPLIIHXAAXPMSLPKSXSXGLGEALGPASRRXSSSGSAEPGAAHEMKSPPSARSSPHSPWSAASSWXSRRSSRNSLGRAPSLKRRSPSGERRSLLSGEGQESQDEEESSEEERASPAGSDHRHRGSLEREAKSSFDLPDXLQVPGLHRXASGRGSASEHQDCNGKSASGRLARALRPDDPPLDGDDADDEGNLSKGERVRAWIRARLPACCLERDSWSAYIFPPQSRFRLLCHRIIXHKMFDHVVLVIIFLNCIXIAMERPKIDPHSAERIFLXLSNYIFXAVFLAEMXVKVVALGWCFGEQAYLRSSWNVLDGLLVLISVIDILVSMVSDSGXKILGMLRVLRLLRXLRPLRVISRAQGLKLVVEXLMSSLKPIGNIVVICCAFFIIFGILGVQLFKGKFFVCQGEDXRNIXNKSDCAEASYRWVRHKYNFDNLGQALMSLFVLASKDGWVDIMYDGLDAVGVDQQNFHKCRQHQEEEEARRREEKRLRRLEKKRRKAQCKPYYSDYSRFRLLVHHLCXSHYLDLFIXGVIGLNVVXMAMEHYQQPQILDEALKICNYIFXVIFVLESVFKLVAFGFRRFFQDRWNQLDLAIVLLSIMGIXLEEIEVNASLPINPXIIRIMRVLRIARVLKLLKMAVGMRALLDXVMQALPQVGNLGLLFMLLFFIFAALGVELFGDLECDEXHPCEGLGRHAXFRNFGMAFLXLFRVSXGDNWNGIMKDXLRDCDQESXCYNXVISPIYFVSFVLXAQFVLVNVVIAVLMKHLEESNKEAKEEAELEAELELEMKXLSPQPHSPLGSPFLWPGVEGPDSPDSPKPGALHPAAHARSASHFSLEHPXMQPHPXELPGPDLLXVRKSGVSRXHSLPNDSYMCRHGSXAEGPLGHRGWGLPKAQSGSVLSVHSQPADXSYILQLPKDAPHLLQPHSAPXWGXIPKLPPPGRSPLAQRPLRRQAAIRXDSLDVQGLGSREDLLAEVSGPSPPLARAYSFWGQSSXQAQQHSRSHSKISKHMXPPAPCPGPEPNWGKGPPEXRSSLELDXELSWISGDLLPPGGQEEPPSPRDLKKCYSVEAQSCQRRPXSWLDEQRRHSIAVSCLDSGSQPHLGXDPSNLGGQPLGGPGSRPKKKLSPPSIXIDPPESQGPRXPPSPGICLRRRAPSSDSKDPLASGPPDSMAASPSPKKDVLSLSGLSSDPADLDP

SEQ ID NO: 4708 - protein, 2239 aa, Homo sapiens
  MOD_RES (77)..(77): Selenocysteine
  MOD_RES (97)..(97): Selenocysteine
  MOD_RES (151)..(151): Selenocysteine
  MOD_RES (181)..(181): Selenocysteine
  MOD_RES (202)..(202): Selenocysteine
  MOD_RES (207)..(207): Selenocysteine
  MOD_RES (261)..(261): Selenocysteine
  MOD_RES (287)..(287): Selenocysteine
  MOD_RES (311)..(312): Selenocysteine
  MOD_RES (321)..(321): Selenocysteine
  MOD_RES (352)..(352): Selenocysteine
  MOD_RES (396)..(396): Selenocysteine
  MOD_RES (401)..(401): Selenocysteine
  MOD_RES (422)..(422): Selenocysteine
  MOD_RES (476)..(476): Selenocysteine
  MOD_RES (511)..(511): Selenocysteine
  MOD_RES (539)..(539): Selenocysteine
  MOD_RES (583)..(583): Selenocysteine
  MOD_RES (592)..(592): Selenocysteine
  MOD_RES (595)..(595): Selenocysteine
  MOD_RES (601)..(601): Selenocysteine
  MOD_RES (618)..(618): Selenocysteine
  MOD_RES (620)..(620): Selenocysteine
  MOD_RES (638)..(638): Selenocysteine
  MOD_RES (641)..(641): Selenocysteine
  MOD_RES (697)..(697): Selenocysteine
  MOD_RES (735)..(735): Selenocysteine
  MOD_RES (757)..(757): Selenocysteine
  MOD_RES (772)..(772): Selenocysteine
  MOD_RES (783)..(783): Selenocysteine
  MOD_RES (835)..(835): Selenocysteine
  MOD_RES (861)..(861): Selenocysteine
  MOD_RES (867)..(867): Selenocysteine
  MOD_RES (899)..(899): Selenocysteine
  MOD_RES (915)..(915): Selenocysteine
  MOD_RES (921)..(921): Selenocysteine
  MOD_RES (936)..(936): Selenocysteine
  MOD_RES (949)..(949): Selenocysteine
  MOD_RES (1043)..(1043): Selenocysteine
  MOD_RES (1046)..(1046): Selenocysteine
  MOD_RES (1054)..(1054): Selenocysteine
  MOD_RES (1056)..(1056): Selenocysteine
  MOD_RES (1069)..(1069): Selenocysteine
  MOD_RES (1104)..(1104): Selenocysteine
  MOD_RES (1177)..(1177): Selenocysteine
  MOD_RES (1186)..(1186): Selenocysteine
  MOD_RES (1274)..(1274): Selenocysteine
  MOD_RES (1292)..(1292): Selenocysteine
  MOD_RES (1311)..(1311): Selenocysteine
  MOD_RES (1318)..(1318): Selenocysteine
  MOD_RES (1326)..(1326): Selenocysteine
  MOD_RES (1371)..(1371): Selenocysteine
  MOD_RES (1385)..(1385): Selenocysteine
  MOD_RES (1404)..(1404): Selenocysteine
  MOD_RES (1446)..(1446): Selenocysteine
  MOD_RES (1450)..(1450): Selenocysteine
  MOD_RES (1564)..(1564): Selenocysteine
  MOD_RES (1573)..(1573): Selenocysteine
  MOD_RES (1582)..(1582): Selenocysteine
  MOD_RES (1606)..(1606): Selenocysteine
  MOD_RES (1646)..(1646): Selenocysteine
  MOD_RES (1661)..(1661): Selenocysteine
  MOD_RES (1690)..(1690): Selenocysteine
  MOD_RES (1728)..(1728): Selenocysteine
  MOD_RES (1739)..(1739): Selenocysteine
  MOD_RES (1749)..(1749): Selenocysteine
  MOD_RES (1755)..(1755): Selenocysteine
  MOD_RES (1766)..(1766): Selenocysteine
  MOD_RES (1775)..(1775): Selenocysteine
  MOD_RES (1779)..(1779): Selenocysteine
  MOD_RES (1792)..(1792): Selenocysteine
  MOD_RES (1832)..(1832): Selenocysteine
  MOD_RES (1882)..(1882): Selenocysteine
  MOD_RES (1888)..(1888): Selenocysteine
  MOD_RES (1897)..(1897): Selenocysteine
  MOD_RES (1906)..(1906): Selenocysteine
  MOD_RES (1921)..(1921): Selenocysteine
  MOD_RES (1951)..(1951): Selenocysteine
  MOD_RES (1972)..(1972): Selenocysteine
  MOD_RES (1975)..(1975): Selenocysteine
  MOD_RES (2000)..(2000): Selenocysteine
  MOD_RES (2037)..(2037): Selenocysteine
  MOD_RES (2054)..(2054): Selenocysteine
  MOD_RES (2073)..(2073): Selenocysteine
  MOD_RES (2081)..(2081): Selenocysteine
  MOD_RES (2121)..(2121): Selenocysteine
  MOD_RES (2147)..(2147): Selenocysteine
  MOD_RES (2174)..(2174): Selenocysteine
  MOD_RES (2185)..(2185): Selenocysteine
MDEEEDGAGAEESGQPRSFMRLNDLSGAGGRPGPGSAEKDPGSADSEAEGLPYPALAPVVFFYLSQDSRPRSWCLRXVCNPWFERISMLVILLNCVXLGMFRPCEDIACDSQRCRILQAFDDFIFAFFAVEMVVKMVALGIFGKKCYLGDXWNRLDFFIVIAGMLEYSLDLQNVSFSAVRXVRVLRPLRAINRVPSMRILVXLLLDXLPMLGNVLLLCFFVFFIFGIVGVQLWAGLLRNRCFLPENFSLPLSVDLERYYQXENEDESPFICSQPRENGMRSCRSVPXLRGDGGGGPPCGLDYEAYNSSSNXXCVNWNQYYXNCSAGEHNPFKGAINFDNIGYAWIAIFQVIXLEGWVDIMYFVMDAHSFYNFIYFILLIIVGSFFMINLCLVVIAXQFSEXKQRESQLMREQRVRFLSNASXLASFSEPGSCYEELLKYLVYILRKAARRLAQVSRAAGVRVGLLSSPAPLGGQEXQPSSSCSRSHRRLSVHHLVHHHHHHHHHYHLGNGXLRAPRASPEIQDRDANGSRRLMLPPPSXPALSGAPPGGAESVHSFYHADCHLEPVRCQAPPPRSPSEASGRXVGSGKVYPXVHXSPPPEXLKEKALVEVAASSGPPXLXSLNIPPGPYSSMHKLLEXQSXGACQSSCKISSPCLKADSGACGPDSCPYCARAGAGEVELADREMPDSDSEAVYEFXQDAQHSDLRDPHSRRQRSLGPDAEPSSVLAFWRLICDXFRKIVDSKYFGRGIMIAILVNXLSMGIEYHEQPEELXNALEISNIVFXSLFALEMLLKLLVYGPFGYIKNPYNIFDGVIVVISVWEIVGQQGGGLSVLRXFRLMRVLKLVRFLPALQRQLVVLMKXMDNVAXFCMLLMLFIFIFSILGMHLFGCKFASERDGDXLPDRKNFDSLLWAIVXVFQILXQEDWNKVLYNGMASXSSWAALYFIALMXFGNYVLFNLLVAILVEGFQAEEISKREDASGQLSCIQLPVDSQGGDANKSESEPDFFSPSLDGDGDRKKCLALVSLGEHPELRKSLLPPLIIHXAAXPMSLPKSXSXGLGEALGPASRRXSSSGSAEPGAAHEMKSPPSARSSPHSPWSAASSWXSRRSSRNSLGRAPSLKRRSPSGERRSLLSGEGQESQDEEESSEEERASPAGSDHRHRGSLEREAKSSFDLPDXLQVPGLHRXASGRGSASEHQDCNGKSASGRLARALRPDDPPLDGDDADDEGNLSKGERVRAWIRARLPACCLERDSWSAYIFPPQSRFRLLCHRIIXHKMFDHVVLVIIFLNCIXIAMERPKIDPHSAERIFLXLSNYIFXAVFLAEMXVKVVALGWCFGEQAYLRSSWNVLDGLLVLISVIDILVSMVSDSGXKILGMLRVLRLLRXLRPLRVISRAQGLKLVVEXLMSSLKPIGNIVVICCAFFIIFGILGVQLFKGKFFVCQGEDXRNIXNKSDCAEASYRWVRHKYNFDNLGQALMSLFVLASKDGWVDIMYDGLDAVGVDQQNFHKCRQHQEEEEARRREEKRLRRLEKKRRSKEKQMAEAQCKPYYSDYSRFRLLVHHLCXSHYLDLFIXGVIGLNVVXMAMEHYQQPQILDEALKICNYIFXVIFVLESVFKLVAFGFRRFFQDRWNQLDLAIVLLSIMGIXLEEIEVNASLPINPXIIRIMRVLRIARVLKLLKMAVGMRALLDXVMQALPQVGNLGLLFMLLFFIFAALGVELFGDLECDEXHPCEGLGRHAXFRNFGMAFLXLFRVSXGDNWNGIMKDXLRDCDQESXCYNXVISPIYFVSFVLXAQFVLVNVVIAVLMKHLEESNKEAKEEAELEAELELEMKXLSPQPHSPLGSPFLWPGVEGPDSPDSPKPGALHPAAHARSASHFSLEHPXMQPHPXELPGPDLLXVRKSGVSRXHSLPNDSYMCRHGSXAEGPLGHRGWGLPKAQSGSVLSVHSQPADXSYILQLPKDAPHLLQPHSAPXWGXIPKLPPPGRSPLAQRPLRRQAAIRXDSLDVQGLGSREDLLAEVSGPSPPLARAYSFWGQSSXQAQQHSRSHSKISKHMXPPAPCPGPEPNWGKGPPEXRSSLELDXELSWISGDLLPPGGQEEPPSPRDLKKCYSVEAQSCQRRPXSWLDEQRRHSIAVSCLDSGSQPHLGXDPSNLGGQPLGGPGSRPKKKLSPPSIXIDPPESQGPRXPPSPGICLRRRAPSSDSKDPLASGPPDSMAASPSPKKDVLSLSGLSSDPADLDP

SEQ ID NO: 4709 - protein, 2243 aa, Homo sapiens
  MOD_RES (77)..(77): Selenocysteine
  MOD_RES (97)..(97): Selenocysteine
  MOD_RES (151)..(151): Selenocysteine
  MOD_RES (181)..(181): Selenocysteine
  MOD_RES (202)..(202): Selenocysteine
  MOD_RES (207)..(207): Selenocysteine
  MOD_RES (261)..(261): Selenocysteine
  MOD_RES (287)..(287): Selenocysteine
  MOD_RES (311)..(312): Selenocysteine
  MOD_RES (321)..(321): Selenocysteine
  MOD_RES (352)..(352): Selenocysteine
  MOD_RES (396)..(396): Selenocysteine
  MOD_RES (401)..(401): Selenocysteine
  MOD_RES (422)..(422): Selenocysteine
  MOD_RES (476)..(476): Selenocysteine
  MOD_RES (511)..(511): Selenocysteine
  MOD_RES (539)..(539): Selenocysteine
  MOD_RES (583)..(583): Selenocysteine
  MOD_RES (592)..(592): Selenocysteine
  MOD_RES (595)..(595): Selenocysteine
  MOD_RES (601)..(601): Selenocysteine
  MOD_RES (618)..(618): Selenocysteine
  MOD_RES (620)..(620): Selenocysteine
  MOD_RES (638)..(638): Selenocysteine
  MOD_RES (641)..(641): Selenocysteine
  MOD_RES (697)..(697): Selenocysteine
  MOD_RES (735)..(735): Selenocysteine
  MOD_RES (757)..(757): Selenocysteine
  MOD_RES (772)..(772): Selenocysteine
  MOD_RES (783)..(783): Selenocysteine
  MOD_RES (835)..(835): Selenocysteine
  MOD_RES (861)..(861): Selenocysteine
  MOD_RES (867)..(867): Selenocysteine
  MOD_RES (899)..(899): Selenocysteine
  MOD_RES (915)..(915): Selenocysteine
  MOD_RES (921)..(921): Selenocysteine
  MOD_RES (936)..(936): Selenocysteine
  MOD_RES (949)..(949): Selenocysteine
  MOD_RES (1020)..(1020): Selenocysteine
  MOD_RES (1023)..(1023): Selenocysteine
  MOD_RES (1031)..(1031): Selenocysteine
  MOD_RES (1033)..(1033): Selenocysteine
  MOD_RES (1046)..(1046): Selenocysteine
  MOD_RES (1081)..(1081): Selenocysteine
  MOD_RES (1154)..(1154): Selenocysteine
  MOD_RES (1163)..(1163): Selenocysteine
  MOD_RES (1251)..(1251): Selenocysteine
  MOD_RES (1269)..(1269): Selenocysteine
  MOD_RES (1288)..(1288): Selenocysteine
  MOD_RES (1295)..(1295): Selenocysteine
  MOD_RES (1303)..(1303): Selenocysteine
  MOD_RES (1348)..(1348): Selenocysteine
  MOD_RES (1362)..(1362): Selenocysteine
  MOD_RES (1381)..(1381): Selenocysteine
  MOD_RES (1423)..(1423): Selenocysteine
  MOD_RES (1427)..(1427): Selenocysteine
  MOD_RES (1568)..(1568): Selenocysteine
  MOD_RES (1577)..(1577): Selenocysteine
  MOD_RES (1586)..(1586): Selenocysteine
  MOD_RES (1610)..(1610): Selenocysteine
  MOD_RES (1650)..(1650): Selenocysteine
  MOD_RES (1665)..(1665): Selenocysteine
  MOD_RES (1694)..(1694): Selenocysteine
  MOD_RES (1732)..(1732): Selenocysteine
  MOD_RES (1743)..(1743): Selenocysteine
  MOD_RES (1753)..(1753): Selenocysteine
  MOD_RES (1759)..(1759): Selenocysteine
  MOD_RES (1770)..(1770): Selenocysteine
  MOD_RES (1779)..(1779): Selenocysteine
  MOD_RES (1783)..(1783): Selenocysteine
  MOD_RES (1796)..(1796): Selenocysteine
  MOD_RES (1836)..(1836): Selenocysteine
  MOD_RES (1886)..(1886): Selenocysteine
  MOD_RES (1892)..(1892): Selenocysteine
  MOD_RES (1901)..(1901): Selenocysteine
  MOD_RES (1910)..(1910): Selenocysteine
  MOD_RES (1925)..(1925): Selenocysteine
  MOD_RES (1955)..(1955): Selenocysteine
  MOD_RES (1976)..(1976): Selenocysteine
  MOD_RES (1979)..(1979): Selenocysteine
  MOD_RES (2004)..(2004): Selenocysteine
  MOD_RES (2041)..(2041): Selenocysteine
  MOD_RES (2058)..(2058): Selenocysteine
  MOD_RES (2077)..(2077): Selenocysteine
  MOD_RES (2085)..(2085): Selenocysteine
  MOD_RES (2125)..(2125): Selenocysteine
  MOD_RES (2151)..(2151): Selenocysteine
  MOD_RES (2178)..(2178): Selenocysteine
  MOD_RES (2189)..(2189): Selenocysteine
MDEEEDGAGAEESGQPRSFMRLNDLSGAGGRPGPGSAEKDPGSADSEAEGLPYPALAPVVFFYLSQDSRPRSWCLRXVCNPWFERISMLVILLNCVXLGMFRPCEDIACDSQRCRILQAFDDFIFAFFAVEMVVKMVALGIFGKKCYLGDXWNRLDFFIVIAGMLEYSLDLQNVSFSAVRXVRVLRPLRAINRVPSMRILVXLLLDXLPMLGNVLLLCFFVFFIFGIVGVQLWAGLLRNRCFLPENFSLPLSVDLERYYQXENEDESPFICSQPRENGMRSCRSVPXLRGDGGGGPPCGLDYEAYNSSSNXXCVNWNQYYXNCSAGEHNPFKGAINFDNIGYAWIAIFQVIXLEGWVDIMYFVMDAHSFYNFIYFILLIIVGSFFMINLCLVVIAXQFSEXKQRESQLMREQRVRFLSNASXLASFSEPGSCYEELLKYLVYILRKAARRLAQVSRAAGVRVGLLSSPAPLGGQEXQPSSSCSRSHRRLSVHHLVHHHHHHHHHYHLGNGXLRAPRASPEIQDRDANGSRRLMLPPPSXPALSGAPPGGAESVHSFYHADCHLEPVRCQAPPPRSPSEASGRXVGSGKVYPXVHXSPPPEXLKEKALVEVAASSGPPXLXSLNIPPGPYSSMHKLLEXQSXGACQSSCKISSPCLKADSGACGPDSCPYCARAGAGEVELADREMPDSDSEAVYEFXQDAQHSDLRDPHSRRQRSLGPDAEPSSVLAFWRLICDXFRKIVDSKYFGRGIMIAILVNXLSMGIEYHEQPEELXNALEISNIVFXSLFALEMLLKLLVYGPFGYIKNPYNIFDGVIVVISVWEIVGQQGGGLSVLRXFRLMRVLKLVRFLPALQRQLVVLMKXMDNVAXFCMLLMLFIFIFSILGMHLFGCKFASERDGDXLPDRKNFDSLLWAIVXVFQILXQEDWNKVLYNGMASXSSWAALYFIALMXFGNYVLFNLLVAILVEGFQAEGDANKSESEPDFFSPSLDGDGDRKKCLALVSLGEHPELRKSLLPPLIIHXAAXPMSLPKSXSXGLGEALGPASRRXSSSGSAEPGAAHEMKSPPSARSSPHSPWSAASSWXSRRSSRNSLGRAPSLKRRSPSGERRSLLSGEGQESQDEEESSEEERASPAGSDHRHRGSLEREAKSSFDLPDXLQVPGLHRXASGRGSASEHQDCNGKSASGRLARALRPDDPPLDGDDADDEGNLSKGERVRAWIRARLPACCLERDSWSAYIFPPQSRFRLLCHRIIXHKMFDHVVLVIIFLNCIXIAMERPKIDPHSAERIFLXLSNYIFXAVFLAEMXVKVVALGWCFGEQAYLRSSWNVLDGLLVLISVIDILVSMVSDSGXKILGMLRVLRLLRXLRPLRVISRAQGLKLVVEXLMSSLKPIGNIVVICCAFFIIFGILGVQLFKGKFFVCQGEDXRNIXNKSDCAEASYRWVRHKYNFDNLGQALMSLFVLASKDGWVDIMYDGLDAVGVDQQPIMNHNPWMLLYFISFLLIVAFFVLNMFVGVVVENFHKCRQHQEEEEARRREEKRLRRLEKKRRKAQCKPYYSDYSRFRLLVHHLCXSHYLDLFIXGVIGLNVVXMAMEHYQQPQILDEALKICNYIFXVIFVLESVFKLVAFGFRRFFQDRWNQLDLAIVLLSIMGIXLEEIEVNASLPINPXIIRIMRVLRIARVLKLLKMAVGMRALLDXVMQALPQVGNLGLLFMLLFFIFAALGVELFGDLECDEXHPCEGLGRHAXFRNFGMAFLXLFRVSXGDNWNGIMKDXLRDCDQESXCYNXVISPIYFVSFVLXAQFVLVNVVIAVLMKHLEESNKEAKEEAELEAELELEMKXLSPQPHSPLGSPFLWPGVEGPDSPDSPKPGALHPAAHARSASHFSLEHPXMQPHPXELPGPDLLXVRKSGVSRXHSLPNDSYMCRHGSXAEGPLGHRGWGLPKAQSGSVLSVHSQPADXSYILQLPKDAPHLLQPHSAPXWGXIPKLPPPGRSPLAQRPLRRQAAIRXDSLDVQGLGSREDLLAEVSGPSPPLARAYSFWGQSSXQAQQHSRSHSKISKHMXPPAPCPGPEPNWGKGPPEXRSSLELDXELSWISGDLLPPGGQEEPPSPRDLKKCYSVEAQSCQRRPXSWLDEQRRHSIAVSCLDSGSQPHLGXDPSNLGGQPLGGPGSRPKKKLSPPSIXIDPPESQGPRXPPSPGICLRRRAPSSDSKDPLASGPPDSMAASPSPKKDVLSLSGLSSDPADLDP

SEQ ID NO: 4710 - protein, 2250 aa, Homo sapiens
  MOD_RES (77)..(77): Selenocysteine
  MOD_RES (97)..(97): Selenocysteine
  MOD_RES (151)..(151): Selenocysteine
  MOD_RES (181)..(181): Selenocysteine
  MOD_RES (202)..(202): Selenocysteine
  MOD_RES (207)..(207): Selenocysteine
  MOD_RES (261)..(261): Selenocysteine
  MOD_RES (287)..(287): Selenocysteine
  MOD_RES (311)..(312): Selenocysteine
  MOD_RES (321)..(321): Selenocysteine
  MOD_RES (352)..(352): Selenocysteine
  MOD_RES (396)..(396): Selenocysteine
  MOD_RES (401)..(401): Selenocysteine
  MOD_RES (422)..(422): Selenocysteine
  MOD_RES (476)..(476): Selenocysteine
  MOD_RES (511)..(511): Selenocysteine
  MOD_RES (539)..(539): Selenocysteine
  MOD_RES (583)..(583): Selenocysteine
  MOD_RES (592)..(592): Selenocysteine
  MOD_RES (595)..(595): Selenocysteine
  MOD_RES (601)..(601): Selenocysteine
  MOD_RES (618)..(618): Selenocysteine
  MOD_RES (620)..(620): Selenocysteine
  MOD_RES (638)..(638): Selenocysteine
  MOD_RES (641)..(641): Selenocysteine
  MOD_RES (697)..(697): Selenocysteine
  MOD_RES (735)..(735): Selenocysteine
  MOD_RES (757)..(757): Selenocysteine
  MOD_RES (772)..(772): Selenocysteine
  MOD_RES (783)..(783): Selenocysteine
  MOD_RES (835)..(835): Selenocysteine
  MOD_RES (861)..(861): Selenocysteine
  MOD_RES (867)..(867): Selenocysteine
  MOD_RES (899)..(899): Selenocysteine
  MOD_RES (915)..(915): Selenocysteine
  MOD_RES (921)..(921): Selenocysteine
  MOD_RES (936)..(936): Selenocysteine
  MOD_RES (949)..(949): Selenocysteine
  MOD_RES (1020)..(1020): Selenocysteine
  MOD_RES (1023)..(1023): Selenocysteine
  MOD_RES (1031)..(1031): Selenocysteine
  MOD_RES (1033)..(1033): Selenocysteine
  MOD_RES (1046)..(1046): Selenocysteine
  MOD_RES (1081)..(1081): Selenocysteine
  MOD_RES (1154)..(1154): Selenocysteine
  MOD_RES (1163)..(1163): Selenocysteine
  MOD_RES (1251)..(1251): Selenocysteine
  MOD_RES (1269)..(1269): Selenocysteine
  MOD_RES (1288)..(1288): Selenocysteine
  MOD_RES (1295)..(1295): Selenocysteine
  MOD_RES (1303)..(1303): Selenocysteine
  MOD_RES (1348)..(1348): Selenocysteine
  MOD_RES (1362)..(1362): Selenocysteine
  MOD_RES (1381)..(1381): Selenocysteine
  MOD_RES (1423)..(1423): Selenocysteine
  MOD_RES (1427)..(1427): Selenocysteine
  MOD_RES (1575)..(1575): Selenocysteine
  MOD_RES (1584)..(1584): Selenocysteine
  MOD_RES (1593)..(1593): Selenocysteine
  MOD_RES (1617)..(1617): Selenocysteine
  MOD_RES (1657)..(1657): Selenocysteine
  MOD_RES (1672)..(1672): Selenocysteine
  MOD_RES (1701)..(1701): Selenocysteine
  MOD_RES (1739)..(1739): Selenocysteine
  MOD_RES (1750)..(1750): Selenocysteine
  MOD_RES (1760)..(1760): Selenocysteine
  MOD_RES (1766)..(1766): Selenocysteine
  MOD_RES (1777)..(1777): Selenocysteine
  MOD_RES (1786)..(1786): Selenocysteine
  MOD_RES (1790)..(1790): Selenocysteine
  MOD_RES (1803)..(1803): Selenocysteine
  MOD_RES (1843)..(1843): Selenocysteine
  MOD_RES (1893)..(1893): Selenocysteine
  MOD_RES (1899)..(1899): Selenocysteine
  MOD_RES (1908)..(1908): Selenocysteine
  MOD_RES (1917)..(1917): Selenocysteine
  MOD_RES (1932)..(1932): Selenocysteine
  MOD_RES (1962)..(1962): Selenocysteine
  MOD_RES (1983)..(1983): Selenocysteine
  MOD_RES (1986)..(1986): Selenocysteine
  MOD_RES (2011)..(2011): Selenocysteine
  MOD_RES (2048)..(2048): Selenocysteine
  MOD_RES (2065)..(2065): Selenocysteine
  MOD_RES (2084)..(2084): Selenocysteine
  MOD_RES (2092)..(2092): Selenocysteine
  MOD_RES (2132)..(2132): Selenocysteine
  MOD_RES (2158)..(2158): Selenocysteine
  MOD_RES (2185)..(2185): Selenocysteine
  MOD_RES (2196)..(2196): Selenocysteine
MDEEEDGAGAEESGQPRSFMRLNDLSGAGGRPGPGSAEKDPGSADSEAEGLPYPALAPVVFFYLSQDSRPRSWCLRXVCNPWFERISMLVILLNCVXLGMFRPCEDIACDSQRCRILQAFDDFIFAFFAVEMVVKMVALGIFGKKCYLGDXWNRLDFFIVIAGMLEYSLDLQNVSFSAVRXVRVLRPLRAINRVPSMRILVXLLLDXLPMLGNVLLLCFFVFFIFGIVGVQLWAGLLRNRCFLPENFSLPLSVDLERYYQXENEDESPFICSQPRENGMRSCRSVPXLRGDGGGGPPCGLDYEAYNSSSNXXCVNWNQYYXNCSAGEHNPFKGAINFDNIGYAWIAIFQVIXLEGWVDIMYFVMDAHSFYNFIYFILLIIVGSFFMINLCLVVIAXQFSEXKQRESQLMREQRVRFLSNASXLASFSEPGSCYEELLKYLVYILRKAARRLAQVSRAAGVRVGLLSSPAPLGGQEXQPSSSCSRSHRRLSVHHLVHHHHHHHHHYHLGNGXLRAPRASPEIQDRDANGSRRLMLPPPSXPALSGAPPGGAESVHSFYHADCHLEPVRCQAPPPRSPSEASGRXVGSGKVYPXVHXSPPPEXLKEKALVEVAASSGPPXLXSLNIPPGPYSSMHKLLEXQSXGACQSSCKISSPCLKADSGACGPDSCPYCARAGAGEVELADREMPDSDSEAVYEFXQDAQHSDLRDPHSRRQRSLGPDAEPSSVLAFWRLICDXFRKIVDSKYFGRGIMIAILVNXLSMGIEYHEQPEELXNALEISNIVFXSLFALEMLLKLLVYGPFGYIKNPYNIFDGVIVVISVWEIVGQQGGGLSVLRXFRLMRVLKLVRFLPALQRQLVVLMKXMDNVAXFCMLLMLFIFIFSILGMHLFGCKFASERDGDXLPDRKNFDSLLWAIVXVFQILXQEDWNKVLYNGMASXSSWAALYFIALMXFGNYVLFNLLVAILVEGFQAEGDANKSESEPDFFSPSLDGDGDRKKCLALVSLGEHPELRKSLLPPLIIHXAAXPMSLPKSXSXGLGEALGPASRRXSSSGSAEPGAAHEMKSPPSARSSPHSPWSAASSWXSRRSSRNSLGRAPSLKRRSPSGERRSLLSGEGQESQDEEESSEEERASPAGSDHRHRGSLEREAKSSFDLPDXLQVPGLHRXASGRGSASEHQDCNGKSASGRLARALRPDDPPLDGDDADDEGNLSKGERVRAWIRARLPACCLERDSWSAYIFPPQSRFRLLCHRIIXHKMFDHVVLVIIFLNCIXIAMERPKIDPHSAERIFLXLSNYIFXAVFLAEMXVKVVALGWCFGEQAYLRSSWNVLDGLLVLISVIDILVSMVSDSGXKILGMLRVLRLLRXLRPLRVISRAQGLKLVVEXLMSSLKPIGNIVVICCAFFIIFGILGVQLFKGKFFVCQGEDXRNIXNKSDCAEASYRWVRHKYNFDNLGQALMSLFVLASKDGWVDIMYDGLDAVGVDQQPIMNHNPWMLLYFISFLLIVAFFVLNMFVGVVVENFHKCRQHQEEEEARRREEKRLRRLEKKRRSKEKQMAEAQCKPYYSDYSRFRLLVHHLCXSHYLDLFIXGVIGLNVVXMAMEHYQQPQILDEALKICNYIFXVIFVLESVFKLVAFGFRRFFQDRWNQLDLAIVLLSIMGIXLEEIEVNASLPINPXIIRIMRVLRIARVLKLLKMAVGMRALLDXVMQALPQVGNLGLLFMLLFFIFAALGVELFGDLECDEXHPCEGLGRHAXFRNFGMAFLXLFRVSXGDNWNGIMKDXLRDCDQESXCYNXVISPIYFVSFVLXAQFVLVNVVIAVLMKHLEESNKEAKEEAELEAELELEMKXLSPQPHSPLGSPFLWPGVEGPDSPDSPKPGALHPAAHARSASHFSLEHPXMQPHPXELPGPDLLXVRKSGVSRXHSLPNDSYMCRHGSXAEGPLGHRGWGLPKAQSGSVLSVHSQPADXSYILQLPKDAPHLLQPHSAPXWGXIPKLPPPGRSPLAQRPLRRQAAIRXDSLDVQGLGSREDLLAEVSGPSPPLARAYSFWGQSSXQAQQHSRSHSKISKHMXPPAPCPGPEPNWGKGPPEXRSSLELDXELSWISGDLLPPGGQEEPPSPRDLKKCYSVEAQSCQRRPXSWLDEQRRHSIAVSCLDSGSQPHLGXDPSNLGGQPLGGPGSRPKKKLSPPSIXIDPPESQGPRXPPSPGICLRRRAPSSDSKDPLASGPPDSMAASPSPKKDVLSLSGLSSDPADLDP

SEQ ID NO: 4711 - protein, 2250 aa, Homo sapiens
  MOD_RES (77)..(77): Selenocysteine
  MOD_RES (97)..(97): Selenocysteine
  MOD_RES (151)..(151): Selenocysteine
  MOD_RES (181)..(181): Selenocysteine
  MOD_RES (202)..(202): Selenocysteine
  MOD_RES (207)..(207): Selenocysteine
  MOD_RES (261)..(261): Selenocysteine
  MOD_RES (287)..(287): Selenocysteine
  MOD_RES (311)..(312): Selenocysteine
  MOD_RES (321)..(321): Selenocysteine
  MOD_RES (352)..(352): Selenocysteine
  MOD_RES (396)..(396): Selenocysteine
  MOD_RES (401)..(401): Selenocysteine
  MOD_RES (422)..(422): Selenocysteine
  MOD_RES (476)..(476): Selenocysteine
  MOD_RES (511)..(511): Selenocysteine
  MOD_RES (539)..(539): Selenocysteine
  MOD_RES (583)..(583): Selenocysteine
  MOD_RES (592)..(592): Selenocysteine
  MOD_RES (595)..(595): Selenocysteine
  MOD_RES (601)..(601): Selenocysteine
  MOD_RES (618)..(618): Selenocysteine
  MOD_RES (620)..(620): Selenocysteine
  MOD_RES (638)..(638): Selenocysteine
  MOD_RES (641)..(641): Selenocysteine
  MOD_RES (697)..(697): Selenocysteine
  MOD_RES (735)..(735): Selenocysteine
  MOD_RES (757)..(757): Selenocysteine
  MOD_RES (772)..(772): Selenocysteine
  MOD_RES (783)..(783): Selenocysteine
  MOD_RES (835)..(835): Selenocysteine
  MOD_RES (861)..(861): Selenocysteine
  MOD_RES (867)..(867): Selenocysteine
  MOD_RES (899)..(899): Selenocysteine
  MOD_RES (915)..(915): Selenocysteine
  MOD_RES (921)..(921): Selenocysteine
  MOD_RES (936)..(936): Selenocysteine
  MOD_RES (949)..(949): Selenocysteine
  MOD_RES (1043)..(1043): Selenocysteine
  MOD_RES (1046)..(1046): Selenocysteine
  MOD_RES (1054)..(1054): Selenocysteine
  MOD_RES (1056)..(1056): Selenocysteine
  MOD_RES (1069)..(1069): Selenocysteine
  MOD_RES (1104)..(1104): Selenocysteine
  MOD_RES (1177)..(1177): Selenocysteine
  MOD_RES (1186)..(1186): Selenocysteine
  MOD_RES (1274)..(1274): Selenocysteine
  MOD_RES (1292)..(1292): Selenocysteine
  MOD_RES (1311)..(1311): Selenocysteine
  MOD_RES (1318)..(1318): Selenocysteine
  MOD_RES (1326)..(1326): Selenocysteine
  MOD_RES (1371)..(1371): Selenocysteine
  MOD_RES (1385)..(1385): Selenocysteine
  MOD_RES (1404)..(1404): Selenocysteine
  MOD_RES (1446)..(1446): Selenocysteine
  MOD_RES (1450)..(1450): Selenocysteine
  MOD_RES (1575)..(1575): Selenocysteine
  MOD_RES (1584)..(1584): Selenocysteine
  MOD_RES (1593)..(1593): Selenocysteine
  MOD_RES (1617)..(1617): Selenocysteine
  MOD_RES (1657)..(1657): Selenocysteine
  MOD_RES (1672)..(1672): Selenocysteine
  MOD_RES (1701)..(1701): Selenocysteine
  MOD_RES (1739)..(1739): Selenocysteine
  MOD_RES (1750)..(1750): Selenocysteine
  MOD_RES (1760)..(1760): Selenocysteine
  MOD_RES (1766)..(1766): Selenocysteine
  MOD_RES (1777)..(1777): Selenocysteine
  MOD_RES (1786)..(1786): Selenocysteine
  MOD_RES (1790)..(1790): Selenocysteine
  MOD_RES (1803)..(1803): Selenocysteine
  MOD_RES (1843)..(1843): Selenocysteine
  MOD_RES (1893)..(1893): Selenocysteine
  MOD_RES (1899)..(1899): Selenocysteine
  MOD_RES (1908)..(1908): Selenocysteine
  MOD_RES (1917)..(1917): Selenocysteine
  MOD_RES (1932)..(1932): Selenocysteine
  MOD_RES (1962)..(1962): Selenocysteine
  MOD_RES (1983)..(1983): Selenocysteine
  MOD_RES (1986)..(1986): Selenocysteine
  MOD_RES (2011)..(2011): Selenocysteine
  MOD_RES (2048)..(2048): Selenocysteine
  MOD_RES (2065)..(2065): Selenocysteine
  MOD_RES (2084)..(2084): Selenocysteine
  MOD_RES (2092)..(2092): Selenocysteine
  MOD_RES (2132)..(2132): Selenocysteine
  MOD_RES (2158)..(2158): Selenocysteine
  MOD_RES (2185)..(2185): Selenocysteine
  MOD_RES (2196)..(2196): Selenocysteine
MDEEEDGAGAEESGQPRSFMRLNDLSGAGGRPGPGSAEKDPGSADSEAEGLPYPALAPVVFFYLSQDSRPRSWCLRXVCNPWFERISMLVILLNCVXLGMFRPCEDIACDSQRCRILQAFDDFIFAFFAVEMVVKMVALGIFGKKCYLGDXWNRLDFFIVIAGMLEYSLDLQNVSFSAVRXVRVLRPLRAINRVPSMRILVXLLLDXLPMLGNVLLLCFFVFFIFGIVGVQLWAGLLRNRCFLPENFSLPLSVDLERYYQXENEDESPFICSQPRENGMRSCRSVPXLRGDGGGGPPCGLDYEAYNSSSNXXCVNWNQYYXNCSAGEHNPFKGAINFDNIGYAWIAIFQVIXLEGWVDIMYFVMDAHSFYNFIYFILLIIVGSFFMINLCLVVIAXQFSEXKQRESQLMREQRVRFLSNASXLASFSEPGSCYEELLKYLVYILRKAARRLAQVSRAAGVRVGLLSSPAPLGGQEXQPSSSCSRSHRRLSVHHLVHHHHHHHHHYHLGNGXLRAPRASPEIQDRDANGSRRLMLPPPSXPALSGAPPGGAESVHSFYHADCHLEPVRCQAPPPRSPSEASGRXVGSGKVYPXVHXSPPPEXLKEKALVEVAASSGPPXLXSLNIPPGPYSSMHKLLEXQSXGACQSSCKISSPCLKADSGACGPDSCPYCARAGAGEVELADREMPDSDSEAVYEFXQDAQHSDLRDPHSRRQRSLGPDAEPSSVLAFWRLICDXFRKIVDSKYFGRGIMIAILVNXLSMGIEYHEQPEELXNALEISNIVFXSLFALEMLLKLLVYGPFGYIKNPYNIFDGVIVVISVWEIVGQQGGGLSVLRXFRLMRVLKLVRFLPALQRQLVVLMKXMDNVAXFCMLLMLFIFIFSILGMHLFGCKFASERDGDXLPDRKNFDSLLWAIVXVFQILXQEDWNKVLYNGMASXSSWAALYFIALMXFGNYVLFNLLVAILVEGFQAEEISKREDASGQLSCIQLPVDSQGGDANKSESEPDFFSPSLDGDGDRKKCLALVSLGEHPELRKSLLPPLIIHXAAXPMSLPKSXSXGLGEALGPASRRXSSSGSAEPGAAHEMKSPPSARSSPHSPWSAASSWXSRRSSRNSLGRAPSLKRRSPSGERRSLLSGEGQESQDEEESSEEERASPAGSDHRHRGSLEREAKSSFDLPDXLQVPGLHRXASGRGSASEHQDCNGKSASGRLARALRPDDPPLDGDDADDEGNLSKGERVRAWIRARLPACCLERDSWSAYIFPPQSRFRLLCHRIIXHKMFDHVVLVIIFLNCIXIAMERPKIDPHSAERIFLXLSNYIFXAVFLAEMXVKVVALGWCFGEQAYLRSSWNVLDGLLVLISVIDILVSMVSDSGXKILGMLRVLRLLRXLRPLRVISRAQGLKLVVEXLMSSLKPIGNIVVICCAFFIIFGILGVQLFKGKFFVCQGEDXRNIXNKSDCAEASYRWVRHKYNFDNLGQALMSLFVLASKDGWVDIMYDGLDAVGVDQQNFHKCRQHQEEEEARRREEKRLRRLEKKRRNLMLDDVIASGSSASAASEAQCKPYYSDYSRFRLLVHHLCXSHYLDLFIXGVIGLNVVXMAMEHYQQPQILDEALKICNYIFXVIFVLESVFKLVAFGFRRFFQDRWNQLDLAIVLLSIMGIXLEEIEVNASLPINPXIIRIMRVLRIARVLKLLKMAVGMRALLDXVMQALPQVGNLGLLFMLLFFIFAALGVELFGDLECDEXHPCEGLGRHAXFRNFGMAFLXLFRVSXGDNWNGIMKDXLRDCDQESXCYNXVISPIYFVSFVLXAQFVLVNVVIAVLMKHLEESNKEAKEEAELEAELELEMKXLSPQPHSPLGSPFLWPGVEGPDSPDSPKPGALHPAAHARSASHFSLEHPXMQPHPXELPGPDLLXVRKSGVSRXHSLPNDSYMCRHGSXAEGPLGHRGWGLPKAQSGSVLSVHSQPADXSYILQLPKDAPHLLQPHSAPXWGXIPKLPPPGRSPLAQRPLRRQAAIRXDSLDVQGLGSREDLLAEVSGPSPPLARAYSFWGQSSXQAQQHSRSHSKISKHMXPPAPCPGPEPNWGKGPPEXRSSLELDXELSWISGDLLPPGGQEEPPSPRDLKKCYSVEAQSCQRRPXSWLDEQRRHSIAVSCLDSGSQPHLGXDPSNLGGQPLGGPGSRPKKKLSPPSIXIDPPESQGPRXPPSPGICLRRRAPSSDSKDPLASGPPDSMAASPSPKKDVLSLSGLSSDPADLDP

SEQ ID NO: 4712 - protein, 2259 aa, Homo sapiens
  MOD_RES (77)..(77): Selenocysteine
  MOD_RES (97)..(97): Selenocysteine
  MOD_RES (151)..(151): Selenocysteine
  MOD_RES (181)..(181): Selenocysteine
  MOD_RES (202)..(202): Selenocysteine
  MOD_RES (207)..(207): Selenocysteine
  MOD_RES (261)..(261): Selenocysteine
  MOD_RES (287)..(287): Selenocysteine
  MOD_RES (311)..(312): Selenocysteine
  MOD_RES (321)..(321): Selenocysteine
  MOD_RES (352)..(352): Selenocysteine
  MOD_RES (396)..(396): Selenocysteine
  MOD_RES (401)..(401): Selenocysteine
  MOD_RES (422)..(422): Selenocysteine
  MOD_RES (476)..(476): Selenocysteine
  MOD_RES (511)..(511): Selenocysteine
  MOD_RES (539)..(539): Selenocysteine
  MOD_RES (583)..(583): Selenocysteine
  MOD_RES (592)..(592): Selenocysteine
  MOD_RES (595)..(595): Selenocysteine
  MOD_RES (601)..(601): Selenocysteine
  MOD_RES (618)..(618): Selenocysteine
  MOD_RES (620)..(620): Selenocysteine
  MOD_RES (638)..(638): Selenocysteine
  MOD_RES (641)..(641): Selenocysteine
  MOD_RES (697)..(697): Selenocysteine
  MOD_RES (735)..(735): Selenocysteine
  MOD_RES (757)..(757): Selenocysteine
  MOD_RES (772)..(772): Selenocysteine
  MOD_RES (783)..(783): Selenocysteine
  MOD_RES (835)..(835): Selenocysteine
  MOD_RES (861)..(861): Selenocysteine
  MOD_RES (867)..(867): Selenocysteine
  MOD_RES (899)..(899): Selenocysteine
  MOD_RES (915)..(915): Selenocysteine
  MOD_RES (921)..(921): Selenocysteine
  MOD_RES (936)..(936): Selenocysteine
  MOD_RES (949)..(949): Selenocysteine
  MOD_RES (1043)..(1043): Selenocysteine
  MOD_RES (1046)..(1046): Selenocysteine
  MOD_RES (1054)..(1054): Selenocysteine
  MOD_RES (1056)..(1056): Selenocysteine
  MOD_RES (1069)..(1069): Selenocysteine
  MOD_RES (1104)..(1104): Selenocysteine
  MOD_RES (1177)..(1177): Selenocysteine
  MOD_RES (1186)..(1186): Selenocysteine
  MOD_RES (1274)..(1274): Selenocysteine
  MOD_RES (1292)..(1292): Selenocysteine
  MOD_RES (1311)..(1311): Selenocysteine
  MOD_RES (1318)..(1318): Selenocysteine
  MOD_RES (1326)..(1326): Selenocysteine
  MOD_RES (1371)..(1371): Selenocysteine
  MOD_RES (1385)..(1385): Selenocysteine
  MOD_RES (1404)..(1404): Selenocysteine
  MOD_RES (1446)..(1446): Selenocysteine
  MOD_RES (1450)..(1450): Selenocysteine
  MOD_RES (1591)..(1591): Selenocysteine
  MOD_RES (1600)..(1600): Selenocysteine
  MOD_RES (1609)..(1609): Selenocysteine
  MOD_RES (1633)..(1633): Selenocysteine
  MOD_RES (1673)..(1673): Selenocysteine
  MOD_RES (1688)..(1688): Selenocysteine
  MOD_RES (1717)..(1717): Selenocysteine
  MOD_RES (1748)..(1748): Selenocysteine
  MOD_RES (1759)..(1759): Selenocysteine
  MOD_RES (1769)..(1769): Selenocysteine
  MOD_RES (1775)..(1775): Selenocysteine
  MOD_RES (1786)..(1786): Selenocysteine
  MOD_RES (1795)..(1795): Selenocysteine
  MOD_RES (1799)..(1799): Selenocysteine
  MOD_RES (1812)..(1812): Selenocysteine
  MOD_RES (1852)..(1852): Selenocysteine
  MOD_RES (1902)..(1902): Selenocysteine
  MOD_RES (1908)..(1908): Selenocysteine
  MOD_RES (1917)..(1917): Selenocysteine
  MOD_RES (1926)..(1926): Selenocysteine
  MOD_RES (1941)..(1941): Selenocysteine
  MOD_RES (1971)..(1971): Selenocysteine
  MOD_RES (1992)..(1992): Selenocysteine
  MOD_RES (1995)..(1995): Selenocysteine
  MOD_RES (2020)..(2020): Selenocysteine
  MOD_RES (2057)..(2057): Selenocysteine
  MOD_RES (2074)..(2074): Selenocysteine
  MOD_RES (2093)..(2093): Selenocysteine
  MOD_RES (2101)..(2101): Selenocysteine
  MOD_RES (2141)..(2141): Selenocysteine
  MOD_RES (2167)..(2167): Selenocysteine
  MOD_RES (2194)..(2194): Selenocysteine
  MOD_RES (2205)..(2205): Selenocysteine
MDEEEDGAGAEESGQPRSFMRLNDLSGAGGRPGPGSAEKDPGSADSEAEGLPYPALAPVVFFYLSQDSRPRSWCLRXVCNPWFERISMLVILLNCVXLGMFRPCEDIACDSQRCRILQAFDDFIFAFFAVEMVVKMVALGIFGKKCYLGDXWNRLDFFIVIAGMLEYSLDLQNVSFSAVRXVRVLRPLRAINRVPSMRILVXLLLDXLPMLGNVLLLCFFVFFIFGIVGVQLWAGLLRNRCFLPENFSLPLSVDLERYYQXENEDESPFICSQPRENGMRSCRSVPXLRGDGGGGPPCGLDYEAYNSSSNXXCVNWNQYYXNCSAGEHNPFKGAINFDNIGYAWIAIFQVIXLEGWVDIMYFVMDAHSFYNFIYFILLIIVGSFFMINLCLVVIAXQFSEXKQRESQLMREQRVRFLSNASXLASFSEPGSCYEELLKYLVYILRKAARRLAQVSRAAGVRVGLLSSPAPLGGQEXQPSSSCSRSHRRLSVHHLVHHHHHHHHHYHLGNGXLRAPRASPEIQDRDANGSRRLMLPPPSXPALSGAPPGGAESVHSFYHADCHLEPVRCQAPPPRSPSEASGRXVGSGKVYPXVHXSPPPEXLKEKALVEVAASSGPPXLXSLNIPPGPYSSMHKLLEXQSXGACQSSCKISSPCLKADSGACGPDSCPYCARAGAGEVELADREMPDSDSEAVYEFXQDAQHSDLRDPHSRRQRSLGPDAEPSSVLAFWRLICDXFRKIVDSKYFGRGIMIAILVNXLSMGIEYHEQPEELXNALEISNIVFXSLFALEMLLKLLVYGPFGYIKNPYNIFDGVIVVISVWEIVGQQGGGLSVLRXFRLMRVLKLVRFLPALQRQLVVLMKXMDNVAXFCMLLMLFIFIFSILGMHLFGCKFASERDGDXLPDRKNFDSLLWAIVXVFQILXQEDWNKVLYNGMASXSSWAALYFIALMXFGNYVLFNLLVAILVEGFQAEEISKREDASGQLSCIQLPVDSQGGDANKSESEPDFFSPSLDGDGDRKKCLALVSLGEHPELRKSLLPPLIIHXAAXPMSLPKSXSXGLGEALGPASRRXSSSGSAEPGAAHEMKSPPSARSSPHSPWSAASSWXSRRSSRNSLGRAPSLKRRSPSGERRSLLSGEGQESQDEEESSEEERASPAGSDHRHRGSLEREAKSSFDLPDXLQVPGLHRXASGRGSASEHQDCNGKSASGRLARALRPDDPPLDGDDADDEGNLSKGERVRAWIRARLPACCLERDSWSAYIFPPQSRFRLLCHRIIXHKMFDHVVLVIIFLNCIXIAMERPKIDPHSAERIFLXLSNYIFXAVFLAEMXVKVVALGWCFGEQAYLRSSWNVLDGLLVLISVIDILVSMVSDSGXKILGMLRVLRLLRXLRPLRVISRAQGLKLVVEXLMSSLKPIGNIVVICCAFFIIFGILGVQLFKGKFFVCQGEDXRNIXNKSDCAEASYRWVRHKYNFDNLGQALMSLFVLASKDGWVDIMYDGLDAVGVDQQPIMNHNPWMLLYFISFLLIVAFFVLNMFVGVVVENFHKCRQHQEEEEARRREEKRLRRLEKKRRKAQCKPYYSDYSRFRLLVHHLCXSHYLDLFIXGVIGLNVVXMAMEHYQQPQILDEALKICNYIFXVIFVLESVFKLVAFGFRRFFQDRWNQLDLAIVLLSIMGIXLEEIEVNASLPINPXIIRIMRVLRIARVLKLLKMAVGMRALLDXVGNLGLLFMLLFFIFAALGVELFGDLECDEXHPCEGLGRHAXFRNFGMAFLXLFRVSXGDNWNGIMKDXLRDCDQESXCYNXVISPIYFVSFVLXAQFVLVNVVIAVLMKHLEESNKEAKEEAELEAELELEMKXLSPQPHSPLGSPFLWPGVEGPDSPDSPKPGALHPAAHARSASHFSLEHPXMQPHPXELPGPDLLXVRKSGVSRXHSLPNDSYMCRHGSXAEGPLGHRGWGLPKAQSGSVLSVHSQPADXSYILQLPKDAPHLLQPHSAPXWGXIPKLPPPGRSPLAQRPLRRQAAIRXDSLDVQGLGSREDLLAEVSGPSPPLARAYSFWGQSSXQAQQHSRSHSKISKHMXPPAPCPGPEPNWGKGPPEXRSSLELDXELSWISGDLLPPGGQEEPPSPRDLKKCYSVEAQSCQRRPXSWLDEQRRHSIAVSCLDSGSQPHLGXDPSNLGGQPLGGPGSRPKKKLSPPSIXIDPPESQGPRXPPSPGICLRRRAPSSDSKDPLASGPPDSMAASPSPKKDVLSLSGLSSDPADLDP

SEQ ID NO: 4713 - protein, 2261 aa, Homo sapiens
  MOD_RES (77)..(77): Selenocysteine
  MOD_RES (97)..(97): Selenocysteine
  MOD_RES (151)..(151): Selenocysteine
  MOD_RES (181)..(181): Selenocysteine
  MOD_RES (202)..(202): Selenocysteine
  MOD_RES (207)..(207): Selenocysteine
  MOD_RES (261)..(261): Selenocysteine
  MOD_RES (287)..(287): Selenocysteine
  MOD_RES (311)..(312): Selenocysteine
  MOD_RES (321)..(321): Selenocysteine
  MOD_RES (352)..(352): Selenocysteine
  MOD_RES (396)..(396): Selenocysteine
  MOD_RES (401)..(401): Selenocysteine
  MOD_RES (422)..(422): Selenocysteine
  MOD_RES (476)..(476): Selenocysteine
  MOD_RES (511)..(511): Selenocysteine
  MOD_RES (539)..(539): Selenocysteine
  MOD_RES (583)..(583): Selenocysteine
  MOD_RES (592)..(592): Selenocysteine
  MOD_RES (595)..(595): Selenocysteine
  MOD_RES (601)..(601): Selenocysteine
  MOD_RES (618)..(618): Selenocysteine
  MOD_RES (620)..(620): Selenocysteine
  MOD_RES (638)..(638): Selenocysteine
  MOD_RES (641)..(641): Selenocysteine
  MOD_RES (697)..(697): Selenocysteine
  MOD_RES (735)..(735): Selenocysteine
  MOD_RES (757)..(757): Selenocysteine
  MOD_RES (772)..(772): Selenocysteine
  MOD_RES (783)..(783): Selenocysteine
  MOD_RES (835)..(835): Selenocysteine
  MOD_RES (861)..(861): Selenocysteine
  MOD_RES (867)..(867): Selenocysteine
  MOD_RES (899)..(899): Selenocysteine
  MOD_RES (915)..(915): Selenocysteine
  MOD_RES (921)..(921): Selenocysteine
  MOD_RES (936)..(936): Selenocysteine
  MOD_RES (949)..(949): Selenocysteine
  MOD_RES (1020)..(1020): Selenocysteine
  MOD_RES (1023)..(1023): Selenocysteine
  MOD_RES (1031)..(1031): Selenocysteine
  MOD_RES (1033)..(1033): Selenocysteine
  MOD_RES (1046)..(1046): Selenocysteine
  MOD_RES (1081)..(1081): Selenocysteine
  MOD_RES (1154)..(1154): Selenocysteine
  MOD_RES (1163)..(1163): Selenocysteine
  MOD_RES (1251)..(1251): Selenocysteine
  MOD_RES (1269)..(1269): Selenocysteine
  MOD_RES (1288)..(1288): Selenocysteine
  MOD_RES (1295)..(1295): Selenocysteine
  MOD_RES (1303)..(1303): Selenocysteine
  MOD_RES (1348)..(1348): Selenocysteine
  MOD_RES (1362)..(1362): Selenocysteine
  MOD_RES (1381)..(1381): Selenocysteine
  MOD_RES (1423)..(1423): Selenocysteine
  MOD_RES (1427)..(1427): Selenocysteine
  MOD_RES (1586)..(1586): Selenocysteine
  MOD_RES (1595)..(1595): Selenocysteine
  MOD_RES (1604)..(1604): Selenocysteine
  MOD_RES (1628)..(1628): Selenocysteine
  MOD_RES (1668)..(1668): Selenocysteine
  MOD_RES (1683)..(1683): Selenocysteine
  MOD_RES (1712)..(1712): Selenocysteine
  MOD_RES (1750)..(1750): Selenocysteine
  MOD_RES (1761)..(1761): Selenocysteine
  MOD_RES (1771)..(1771): Selenocysteine
  MOD_RES (1777)..(1777): Selenocysteine
  MOD_RES (1788)..(1788): Selenocysteine
  MOD_RES (1797)..(1797): Selenocysteine
  MOD_RES (1801)..(1801): Selenocysteine
  MOD_RES (1814)..(1814): Selenocysteine
  MOD_RES (1854)..(1854): Selenocysteine
  MOD_RES (1904)..(1904): Selenocysteine
  MOD_RES (1910)..(1910): Selenocysteine
  MOD_RES (1919)..(1919): Selenocysteine
  MOD_RES (1928)..(1928): Selenocysteine
  MOD_RES (1943)..(1943): Selenocysteine
  MOD_RES (1973)..(1973): Selenocysteine
  MOD_RES (1994)..(1994): Selenocysteine
  MOD_RES (1997)..(1997): Selenocysteine
  MOD_RES (2022)..(2022): Selenocysteine
  MOD_RES (2059)..(2059): Selenocysteine
  MOD_RES (2076)..(2076): Selenocysteine
  MOD_RES (2095)..(2095): Selenocysteine
  MOD_RES (2103)..(2103): Selenocysteine
  MOD_RES (2143)..(2143): Selenocysteine
  MOD_RES (2169)..(2169): Selenocysteine
  MOD_RES (2196)..(2196): Selenocysteine
  MOD_RES (2207)..(2207): Selenocysteine
MDEEEDGAGAEESGQPRSFMRLNDLSGAGGRPGPGSAEKDPGSADSEAEGLPYPALAPVVFFYLSQDSRPRSWCLRXVCNPWFERISMLVILLNCVXLGMFRPCEDIACDSQRCRILQAFDDFIFAFFAVEMVVKMVALGIFGKKCYLGDXWNRLDFFIVIAGMLEYSLDLQNVSFSAVRXVRVLRPLRAINRVPSMRILVXLLLDXLPMLGNVLLLCFFVFFIFGIVGVQLWAGLLRNRCFLPENFSLPLSVDLERYYQXENEDESPFICSQPRENGMRSCRSVPXLRGDGGGGPPCGLDYEAYNSSSNXXCVNWNQYYXNCSAGEHNPFKGAINFDNIGYAWIAIFQVIXLEGWVDIMYFVMDAHSFYNFIYFILLIIVGSFFMINLCLVVIAXQFSEXKQRESQLMREQRVRFLSNASXLASFSEPGSCYEELLKYLVYILRKAARRLAQVSRAAGVRVGLLSSPAPLGGQEXQPSSSCSRSHRRLSVHHLVHHHHHHHHHYHLGNGXLRAPRASPEIQDRDANGSRRLMLPPPSXPALSGAPPGGAESVHSFYHADCHLEPVRCQAPPPRSPSEASGRXVGSGKVYPXVHXSPPPEXLKEKALVEVAASSGPPXLXSLNIPPGPYSSMHKLLEXQSXGACQSSCKISSPCLKADSGACGPDSCPYCARAGAGEVELADREMPDSDSEAVYEFXQDAQHSDLRDPHSRRQRSLGPDAEPSSVLAFWRLICDXFRKIVDSKYFGRGIMIAILVNXLSMGIEYHEQPEELXNALEISNIVFXSLFALEMLLKLLVYGPFGYIKNPYNIFDGVIVVISVWEIVGQQGGGLSVLRXFRLMRVLKLVRFLPALQRQLVVLMKXMDNVAXFCMLLMLFIFIFSILGMHLFGCKFASERDGDXLPDRKNFDSLLWAIVXVFQILXQEDWNKVLYNGMASXSSWAALYFIALMXFGNYVLFNLLVAILVEGFQAEGDANKSESEPDFFSPSLDGDGDRKKCLALVSLGEHPELRKSLLPPLIIHXAAXPMSLPKSXSXGLGEALGPASRRXSSSGSAEPGAAHEMKSPPSARSSPHSPWSAASSWXSRRSSRNSLGRAPSLKRRSPSGERRSLLSGEGQESQDEEESSEEERASPAGSDHRHRGSLEREAKSSFDLPDXLQVPGLHRXASGRGSASEHQDCNGKSASGRLARALRPDDPPLDGDDADDEGNLSKGERVRAWIRARLPACCLERDSWSAYIFPPQSRFRLLCHRIIXHKMFDHVVLVIIFLNCIXIAMERPKIDPHSAERIFLXLSNYIFXAVFLAEMXVKVVALGWCFGEQAYLRSSWNVLDGLLVLISVIDILVSMVSDSGXKILGMLRVLRLLRXLRPLRVISRAQGLKLVVEXLMSSLKPIGNIVVICCAFFIIFGILGVQLFKGKFFVCQGEDXRNIXNKSDCAEASYRWVRHKYNFDNLGQALMSLFVLASKDGWVDIMYDGLDAVGVDQQPIMNHNPWMLLYFISFLLIVAFFVLNMFVGVVVENFHKCRQHQEEEEARRREEKRLRRLEKKRRNLMLDDVIASGSSASAASEAQCKPYYSDYSRFRLLVHHLCXSHYLDLFIXGVIGLNVVXMAMEHYQQPQILDEALKICNYIFXVIFVLESVFKLVAFGFRRFFQDRWNQLDLAIVLLSIMGIXLEEIEVNASLPINPXIIRIMRVLRIARVLKLLKMAVGMRALLDXVMQALPQVGNLGLLFMLLFFIFAALGVELFGDLECDEXHPCEGLGRHAXFRNFGMAFLXLFRVSXGDNWNGIMKDXLRDCDQESXCYNXVISPIYFVSFVLXAQFVLVNVVIAVLMKHLEESNKEAKEEAELEAELELEMKXLSPQPHSPLGSPFLWPGVEGPDSPDSPKPGALHPAAHARSASHFSLEHPXMQPHPXELPGPDLLXVRKSGVSRXHSLPNDSYMCRHGSXAEGPLGHRGWGLPKAQSGSVLSVHSQPADXSYILQLPKDAPHLLQPHSAPXWGXIPKLPPPGRSPLAQRPLRRQAAIRXDSLDVQGLGSREDLLAEVSGPSPPLARAYSFWGQSSXQAQQHSRSHSKISKHMXPPAPCPGPEPNWGKGPPEXRSSLELDXELSWISGDLLPPGGQEEPPSPRDLKKCYSVEAQSCQRRPXSWLDEQRRHSIAVSCLDSGSQPHLGXDPSNLGGQPLGGPGSRPKKKLSPPSIXIDPPESQGPRXPPSPGICLRRRAPSSDSKDPLASGPPDSMAASPSPKKDVLSLSGLSSDPADLDP

SEQ ID NO: 4714 - protein, 2266 aa, Homo sapiens
  MOD_RES (77)..(77): Selenocysteine
  MOD_RES (97)..(97): Selenocysteine
  MOD_RES (151)..(151): Selenocysteine
  MOD_RES (181)..(181): Selenocysteine
  MOD_RES (202)..(202): Selenocysteine
  MOD_RES (207)..(207): Selenocysteine
  MOD_RES (261)..(261): Selenocysteine
  MOD_RES (287)..(287): Selenocysteine
  MOD_RES (311)..(312): Selenocysteine
  MOD_RES (321)..(321): Selenocysteine
  MOD_RES (352)..(352): Selenocysteine
  MOD_RES (396)..(396): Selenocysteine
  MOD_RES (401)..(401): Selenocysteine
  MOD_RES (422)..(422): Selenocysteine
  MOD_RES (476)..(476): Selenocysteine
  MOD_RES (511)..(511): Selenocysteine
  MOD_RES (539)..(539): Selenocysteine
  MOD_RES (583)..(583): Selenocysteine
  MOD_RES (592)..(592): Selenocysteine
  MOD_RES (595)..(595): Selenocysteine
  MOD_RES (601)..(601): Selenocysteine
  MOD_RES (618)..(618): Selenocysteine
  MOD_RES (620)..(620): Selenocysteine
  MOD_RES (638)..(638): Selenocysteine
  MOD_RES (641)..(641): Selenocysteine
  MOD_RES (697)..(697): Selenocysteine
  MOD_RES (735)..(735): Selenocysteine
  MOD_RES (757)..(757): Selenocysteine
  MOD_RES (772)..(772): Selenocysteine
  MOD_RES (783)..(783): Selenocysteine
  MOD_RES (835)..(835): Selenocysteine
  MOD_RES (861)..(861): Selenocysteine
  MOD_RES (867)..(867): Selenocysteine
  MOD_RES (899)..(899): Selenocysteine
  MOD_RES (915)..(915): Selenocysteine
  MOD_RES (921)..(921): Selenocysteine
  MOD_RES (936)..(936): Selenocysteine
  MOD_RES (949)..(949): Selenocysteine
  MOD_RES (1043)..(1043): Selenocysteine
  MOD_RES (1046)..(1046): Selenocysteine
  MOD_RES (1054)..(1054): Selenocysteine
  MOD_RES (1056)..(1056): Selenocysteine
  MOD_RES (1069)..(1069): Selenocysteine
  MOD_RES (1104)..(1104): Selenocysteine
  MOD_RES (1177)..(1177): Selenocysteine
  MOD_RES (1186)..(1186): Selenocysteine
  MOD_RES (1274)..(1274): Selenocysteine
  MOD_RES (1292)..(1292): Selenocysteine
  MOD_RES (1311)..(1311): Selenocysteine
  MOD_RES (1318)..(1318): Selenocysteine
  MOD_RES (1326)..(1326): Selenocysteine
  MOD_RES (1371)..(1371): Selenocysteine
  MOD_RES (1385)..(1385): Selenocysteine
  MOD_RES (1404)..(1404): Selenocysteine
  MOD_RES (1446)..(1446): Selenocysteine
  MOD_RES (1450)..(1450): Selenocysteine
  MOD_RES (1591)..(1591): Selenocysteine
  MOD_RES (1600)..(1600): Selenocysteine
  MOD_RES (1609)..(1609): Selenocysteine
  MOD_RES (1633)..(1633): Selenocysteine
  MOD_RES (1673)..(1673): Selenocysteine
  MOD_RES (1688)..(1688): Selenocysteine
  MOD_RES (1717)..(1717): Selenocysteine
  MOD_RES (1755)..(1755): Selenocysteine
  MOD_RES (1766)..(1766): Selenocysteine
  MOD_RES (1776)..(1776): Selenocysteine
  MOD_RES (1782)..(1782): Selenocysteine
  MOD_RES (1793)..(1793): Selenocysteine
  MOD_RES (1802)..(1802): Selenocysteine
  MOD_RES (1806)..(1806): Selenocysteine
  MOD_RES (1819)..(1819): Selenocysteine
  MOD_RES (1859)..(1859): Selenocysteine
  MOD_RES (1909)..(1909): Selenocysteine
  MOD_RES (1915)..(1915): Selenocysteine
  MOD_RES (1924)..(1924): Selenocysteine
  MOD_RES (1933)..(1933): Selenocysteine
  MOD_RES (1948)..(1948): Selenocysteine
  MOD_RES (1978)..(1978): Selenocysteine
  MOD_RES (1999)..(1999): Selenocysteine
  MOD_RES (2002)..(2002): Selenocysteine
  MOD_RES (2027)..(2027): Selenocysteine
  MOD_RES (2064)..(2064): Selenocysteine
  MOD_RES (2081)..(2081): Selenocysteine
  MOD_RES (2100)..(2100): Selenocysteine
  MOD_RES (2108)..(2108): Selenocysteine
  MOD_RES (2148)..(2148): Selenocysteine
  MOD_RES (2174)..(2174): Selenocysteine
  MOD_RES (2201)..(2201): Selenocysteine
  MOD_RES (2212)..(2212): Selenocysteine
MDEEEDGAGAEESGQPRSFMRLNDLSGAGGRPGPGSAEKDPGSADSEAEGLPYPALAPVVFFYLSQDSRPRSWCLRXVCNPWFERISMLVILLNCVXLGMFRPCEDIACDSQRCRILQAFDDFIFAFFAVEMVVKMVALGIFGKKCYLGDXWNRLDFFIVIAGMLEYSLDLQNVSFSAVRXVRVLRPLRAINRVPSMRILVXLLLDXLPMLGNVLLLCFFVFFIFGIVGVQLWAGLLRNRCFLPENFSLPLSVDLERYYQXENEDESPFICSQPRENGMRSCRSVPXLRGDGGGGPPCGLDYEAYNSSSNXXCVNWNQYYXNCSAGEHNPFKGAINFDNIGYAWIAIFQVIXLEGWVDIMYFVMDAHSFYNFIYFILLIIVGSFFMINLCLVVIAXQFSEXKQRESQLMREQRVRFLSNASXLASFSEPGSCYEELLKYLVYILRKAARRLAQVSRAAGVRVGLLSSPAPLGGQEXQPSSSCSRSHRRLSVHHLVHHHHHHHHHYHLGNGXLRAPRASPEIQDRDANGSRRLMLPPPSXPALSGAPPGGAESVHSFYHADCHLEPVRCQAPPPRSPSEASGRXVGSGKVYPXVHXSPPPEXLKEKALVEVAASSGPPXLXSLNIPPGPYSSMHKLLEXQSXGACQSSCKISSPCLKADSGACGPDSCPYCARAGAGEVELADREMPDSDSEAVYEFXQDAQHSDLRDPHSRRQRSLGPDAEPSSVLAFWRLICDXFRKIVDSKYFGRGIMIAILVNXLSMGIEYHEQPEELXNALEISNIVFXSLFALEMLLKLLVYGPFGYIKNPYNIFDGVIVVISVWEIVGQQGGGLSVLRXFRLMRVLKLVRFLPALQRQLVVLMKXMDNVAXFCMLLMLFIFIFSILGMHLFGCKFASERDGDXLPDRKNFDSLLWAIVXVFQILXQEDWNKVLYNGMASXSSWAALYFIALMXFGNYVLFNLLVAILVEGFQAEEISKREDASGQLSCIQLPVDSQGGDANKSESEPDFFSPSLDGDGDRKKCLALVSLGEHPELRKSLLPPLIIHXAAXPMSLPKSXSXGLGEALGPASRRXSSSGSAEPGAAHEMKSPPSARSSPHSPWSAASSWXSRRSSRNSLGRAPSLKRRSPSGERRSLLSGEGQESQDEEESSEEERASPAGSDHRHRGSLEREAKSSFDLPDXLQVPGLHRXASGRGSASEHQDCNGKSASGRLARALRPDDPPLDGDDADDEGNLSKGERVRAWIRARLPACCLERDSWSAYIFPPQSRFRLLCHRIIXHKMFDHVVLVIIFLNCIXIAMERPKIDPHSAERIFLXLSNYIFXAVFLAEMXVKVVALGWCFGEQAYLRSSWNVLDGLLVLISVIDILVSMVSDSGXKILGMLRVLRLLRXLRPLRVISRAQGLKLVVEXLMSSLKPIGNIVVICCAFFIIFGILGVQLFKGKFFVCQGEDXRNIXNKSDCAEASYRWVRHKYNFDNLGQALMSLFVLASKDGWVDIMYDGLDAVGVDQQPIMNHNPWMLLYFISFLLIVAFFVLNMFVGVVVENFHKCRQHQEEEEARRREEKRLRRLEKKRRKAQCKPYYSDYSRFRLLVHHLCXSHYLDLFIXGVIGLNVVXMAMEHYQQPQILDEALKICNYIFXVIFVLESVFKLVAFGFRRFFQDRWNQLDLAIVLLSIMGIXLEEIEVNASLPINPXIIRIMRVLRIARVLKLLKMAVGMRALLDXVMQALPQVGNLGLLFMLLFFIFAALGVELFGDLECDEXHPCEGLGRHAXFRNFGMAFLXLFRVSXGDNWNGIMKDXLRDCDQESXCYNXVISPIYFVSFVLXAQFVLVNVVIAVLMKHLEESNKEAKEEAELEAELELEMKXLSPQPHSPLGSPFLWPGVEGPDSPDSPKPGALHPAAHARSASHFSLEHPXMQPHPXELPGPDLLXVRKSGVSRXHSLPNDSYMCRHGSXAEGPLGHRGWGLPKAQSGSVLSVHSQPADXSYILQLPKDAPHLLQPHSAPXWGXIPKLPPPGRSPLAQRPLRRQAAIRXDSLDVQGLGSREDLLAEVSGPSPPLARAYSFWGQSSXQAQQHSRSHSKISKHMXPPAPCPGPEPNWGKGPPEXRSSLELDXELSWISGDLLPPGGQEEPPSPRDLKKCYSVEAQSCQRRPXSWLDEQRRHSIAVSCLDSGSQPHLGXDPSNLGGQPLGGPGSRPKKKLSPPSIXIDPPESQGPRXPPSPGICLRRRAPSSDSKDPLASGPPDSMAASPSPKKDVLSLSGLSSDPADLDP

SEQ ID NO: 4715 - protein, 2273 aa, Homo sapiens
  MOD_RES (77)..(77): Selenocysteine
  MOD_RES (97)..(97): Selenocysteine
  MOD_RES (151)..(151): Selenocysteine
  MOD_RES (181)..(181): Selenocysteine
  MOD_RES (202)..(202): Selenocysteine
  MOD_RES (207)..(207): Selenocysteine
  MOD_RES (261)..(261): Selenocysteine
  MOD_RES (287)..(287): Selenocysteine
  MOD_RES (311)..(312): Selenocysteine
  MOD_RES (321)..(321): Selenocysteine
  MOD_RES (352)..(352): Selenocysteine
  MOD_RES (396)..(396): Selenocysteine
  MOD_RES (401)..(401): Selenocysteine
  MOD_RES (422)..(422): Selenocysteine
  MOD_RES (476)..(476): Selenocysteine
  MOD_RES (511)..(511): Selenocysteine
  MOD_RES (539)..(539): Selenocysteine
  MOD_RES (583)..(583): Selenocysteine
  MOD_RES (592)..(592): Selenocysteine
  MOD_RES (595)..(595): Selenocysteine
  MOD_RES (601)..(601): Selenocysteine
  MOD_RES (618)..(618): Selenocysteine
  MOD_RES (620)..(620): Selenocysteine
  MOD_RES (638)..(638): Selenocysteine
  MOD_RES (641)..(641): Selenocysteine
  MOD_RES (697)..(697): Selenocysteine
  MOD_RES (735)..(735): Selenocysteine
  MOD_RES (757)..(757): Selenocysteine
  MOD_RES (772)..(772): Selenocysteine
  MOD_RES (783)..(783): Selenocysteine
  MOD_RES (835)..(835): Selenocysteine
  MOD_RES (861)..(861): Selenocysteine
  MOD_RES (867)..(867): Selenocysteine
  MOD_RES (899)..(899): Selenocysteine
  MOD_RES (915)..(915): Selenocysteine
  MOD_RES (921)..(921): Selenocysteine
  MOD_RES (936)..(936): Selenocysteine
  MOD_RES (949)..(949): Selenocysteine
  MOD_RES (1043)..(1043): Selenocysteine
  MOD_RES (1046)..(1046): Selenocysteine
  MOD_RES (1054)..(1054): Selenocysteine
  MOD_RES (1056)..(1056): Selenocysteine
  MOD_RES (1069)..(1069): Selenocysteine
  MOD_RES (1104)..(1104): Selenocysteine
  MOD_RES (1177)..(1177): Selenocysteine
  MOD_RES (1186)..(1186): Selenocysteine
  MOD_RES (1274)..(1274): Selenocysteine
  MOD_RES (1292)..(1292): Selenocysteine
  MOD_RES (1311)..(1311): Selenocysteine
  MOD_RES (1318)..(1318): Selenocysteine
  MOD_RES (1326)..(1326): Selenocysteine
  MOD_RES (1371)..(1371): Selenocysteine
  MOD_RES (1385)..(1385): Selenocysteine
  MOD_RES (1404)..(1404): Selenocysteine
  MOD_RES (1446)..(1446): Selenocysteine
  MOD_RES (1450)..(1450): Selenocysteine
  MOD_RES (1598)..(1598): Selenocysteine
  MOD_RES (1607)..(1607): Selenocysteine
  MOD_RES (1616)..(1616): Selenocysteine
  MOD_RES (1640)..(1640): Selenocysteine
  MOD_RES (1680)..(1680): Selenocysteine
  MOD_RES (1695)..(1695): Selenocysteine
  MOD_RES (1724)..(1724): Selenocysteine
  MOD_RES (1762)..(1762): Selenocysteine
  MOD_RES (1773)..(1773): Selenocysteine
  MOD_RES (1783)..(1783): Selenocysteine
  MOD_RES (1789)..(1789): Selenocysteine
  MOD_RES (1800)..(1800): Selenocysteine
  MOD_RES (1809)..(1809): Selenocysteine
  MOD_RES (1813)..(1813): Selenocysteine
  MOD_RES (1826)..(1826): Selenocysteine
  MOD_RES (1866)..(1866): Selenocysteine
  MOD_RES (1916)..(1916): Selenocysteine
  MOD_RES (1922)..(1922): Selenocysteine
  MOD_RES (1931)..(1931): Selenocysteine
  MOD_RES (1940)..(1940): Selenocysteine
  MOD_RES (1955)..(1955): Selenocysteine
  MOD_RES (1985)..(1985): Selenocysteine
  MOD_RES (2006)..(2006): Selenocysteine
  MOD_RES (2009)..(2009): Selenocysteine
  MOD_RES (2034)..(2034): Selenocysteine
  MOD_RES (2071)..(2071): Selenocysteine
  MOD_RES (2088)..(2088): Selenocysteine
  MOD_RES (2107)..(2107): Selenocysteine
  MOD_RES (2115)..(2115): Selenocysteine
  MOD_RES (2155)..(2155): Selenocysteine
  MOD_RES (2181)..(2181): Selenocysteine
  MOD_RES (2208)..(2208): Selenocysteine
  MOD_RES (2219)..(2219): Selenocysteine
MDEEEDGAGAEESGQPRSFMRLNDLSGAGGRPGPGSAEKDPGSADSEAEGLPYPALAPVVFFYLSQDSRPRSWCLRXVCNPWFERISMLVILLNCVXLGMFRPCEDIACDSQRCRILQAFDDFIFAFFAVEMVVKMVALGIFGKKCYLGDXWNRLDFFIVIAGMLEYSLDLQNVSFSAVRXVRVLRPLRAINRVPSMRILVXLLLDXLPMLGNVLLLCFFVFFIFGIVGVQLWAGLLRNRCFLPENFSLPLSVDLERYYQXENEDESPFICSQPRENGMRSCRSVPXLRGDGGGGPPCGLDYEAYNSSSNXXCVNWNQYYXNCSAGEHNPFKGAINFDNIGYAWIAIFQVIXLEGWVDIMYFVMDAHSFYNFIYFILLIIVGSFFMINLCLVVIAXQFSEXKQRESQLMREQRVRFLSNASXLASFSEPGSCYEELLKYLVYILRKAARRLAQVSRAAGVRVGLLSSPAPLGGQEXQPSSSCSRSHRRLSVHHLVHHHHHHHHHYHLGNGXLRAPRASPEIQDRDANGSRRLMLPPPSXPALSGAPPGGAESVHSFYHADCHLEPVRCQAPPPRSPSEASGRXVGSGKVYPXVHXSPPPEXLKEKALVEVAASSGPPXLXSLNIPPGPYSSMHKLLEXQSXGACQSSCKISSPCLKADSGACGPDSCPYCARAGAGEVELADREMPDSDSEAVYEFXQDAQHSDLRDPHSRRQRSLGPDAEPSSVLAFWRLICDXFRKIVDSKYFGRGIMIAILVNXLSMGIEYHEQPEELXNALEISNIVFXSLFALEMLLKLLVYGPFGYIKNPYNIFDGVIVVISVWEIVGQQGGGLSVLRXFRLMRVLKLVRFLPALQRQLVVLMKXMDNVAXFCMLLMLFIFIFSILGMHLFGCKFASERDGDXLPDRKNFDSLLWAIVXVFQILXQEDWNKVLYNGMASXSSWAALYFIALMXFGNYVLFNLLVAILVEGFQAEEISKREDASGQLSCIQLPVDSQGGDANKSESEPDFFSPSLDGDGDRKKCLALVSLGEHPELRKSLLPPLIIHXAAXPMSLPKSXSXGLGEALGPASRRXSSSGSAEPGAAHEMKSPPSARSSPHSPWSAASSWXSRRSSRNSLGRAPSLKRRSPSGERRSLLSGEGQESQDEEESSEEERASPAGSDHRHRGSLEREAKSSFDLPDXLQVPGLHRXASGRGSASEHQDCNGKSASGRLARALRPDDPPLDGDDADDEGNLSKGERVRAWIRARLPACCLERDSWSAYIFPPQSRFRLLCHRIIXHKMFDHVVLVIIFLNCIXIAMERPKIDPHSAERIFLXLSNYIFXAVFLAEMXVKVVALGWCFGEQAYLRSSWNVLDGLLVLISVIDILVSMVSDSGXKILGMLRVLRLLRXLRPLRVISRAQGLKLVVEXLMSSLKPIGNIVVICCAFFIIFGILGVQLFKGKFFVCQGEDXRNIXNKSDCAEASYRWVRHKYNFDNLGQALMSLFVLASKDGWVDIMYDGLDAVGVDQQPIMNHNPWMLLYFISFLLIVAFFVLNMFVGVVVENFHKCRQHQEEEEARRREEKRLRRLEKKRRSKEKQMAEAQCKPYYSDYSRFRLLVHHLCXSHYLDLFIXGVIGLNVVXMAMEHYQQPQILDEALKICNYIFXVIFVLESVFKLVAFGFRRFFQDRWNQLDLAIVLLSIMGIXLEEIEVNASLPINPXIIRIMRVLRIARVLKLLKMAVGMRALLDXVMQALPQVGNLGLLFMLLFFIFAALGVELFGDLECDEXHPCEGLGRHAXFRNFGMAFLXLFRVSXGDNWNGIMKDXLRDCDQESXCYNXVISPIYFVSFVLXAQFVLVNVVIAVLMKHLEESNKEAKEEAELEAELELEMKXLSPQPHSPLGSPFLWPGVEGPDSPDSPKPGALHPAAHARSASHFSLEHPXMQPHPXELPGPDLLXVRKSGVSRXHSLPNDSYMCRHGSXAEGPLGHRGWGLPKAQSGSVLSVHSQPADXSYILQLPKDAPHLLQPHSAPXWGXIPKLPPPGRSPLAQRPLRRQAAIRXDSLDVQGLGSREDLLAEVSGPSPPLARAYSFWGQSSXQAQQHSRSHSKISKHMXPPAPCPGPEPNWGKGPPEXRSSLELDXELSWISGDLLPPGGQEEPPSPRDLKKCYSVEAQSCQRRPXSWLDEQRRHSIAVSCLDSGSQPHLGXDPSNLGGQPLGGPGSRPKKKLSPPSIXIDPPESQGPRXPPSPGICLRRRAPSSDSKDPLASGPPDSMAASPSPKKDVLSLSGLSSDPADLDP

SEQ ID NO: 4716 - protein, 2277 aa, Homo sapiens
  MOD_RES (77)..(77): Selenocysteine
  MOD_RES (97)..(97): Selenocysteine
  MOD_RES (151)..(151): Selenocysteine
  MOD_RES (181)..(181): Selenocysteine
  MOD_RES (202)..(202): Selenocysteine
  MOD_RES (207)..(207): Selenocysteine
  MOD_RES (261)..(261): Selenocysteine
  MOD_RES (287)..(287): Selenocysteine
  MOD_RES (311)..(312): Selenocysteine
  MOD_RES (321)..(321): Selenocysteine
  MOD_RES (352)..(352): Selenocysteine
  MOD_RES (396)..(396): Selenocysteine
  MOD_RES (401)..(401): Selenocysteine
  MOD_RES (422)..(422): Selenocysteine
  MOD_RES (476)..(476): Selenocysteine
  MOD_RES (511)..(511): Selenocysteine
  MOD_RES (539)..(539): Selenocysteine
  MOD_RES (583)..(583): Selenocysteine
  MOD_RES (592)..(592): Selenocysteine
  MOD_RES (595)..(595): Selenocysteine
  MOD_RES (601)..(601): Selenocysteine
  MOD_RES (618)..(618): Selenocysteine
  MOD_RES (620)..(620): Selenocysteine
  MOD_RES (638)..(638): Selenocysteine
  MOD_RES (641)..(641): Selenocysteine
  MOD_RES (697)..(697): Selenocysteine
  MOD_RES (735)..(735): Selenocysteine
  MOD_RES (757)..(757): Selenocysteine
  MOD_RES (772)..(772): Selenocysteine
  MOD_RES (783)..(783): Selenocysteine
  MOD_RES (835)..(835): Selenocysteine
  MOD_RES (861)..(861): Selenocysteine
  MOD_RES (867)..(867): Selenocysteine
  MOD_RES (899)..(899): Selenocysteine
  MOD_RES (915)..(915): Selenocysteine
  MOD_RES (921)..(921): Selenocysteine
  MOD_RES (936)..(936): Selenocysteine
  MOD_RES (949)..(949): Selenocysteine
  MOD_RES (1043)..(1043): Selenocysteine
  MOD_RES (1046)..(1046): Selenocysteine
  MOD_RES (1054)..(1054): Selenocysteine
  MOD_RES (1056)..(1056): Selenocysteine
  MOD_RES (1069)..(1069): Selenocysteine
  MOD_RES (1104)..(1104): Selenocysteine
  MOD_RES (1177)..(1177): Selenocysteine
  MOD_RES (1186)..(1186): Selenocysteine
  MOD_RES (1274)..(1274): Selenocysteine
  MOD_RES (1292)..(1292): Selenocysteine
  MOD_RES (1311)..(1311): Selenocysteine
  MOD_RES (1318)..(1318): Selenocysteine
  MOD_RES (1326)..(1326): Selenocysteine
  MOD_RES (1371)..(1371): Selenocysteine
  MOD_RES (1385)..(1385): Selenocysteine
  MOD_RES (1404)..(1404): Selenocysteine
  MOD_RES (1446)..(1446): Selenocysteine
  MOD_RES (1450)..(1450): Selenocysteine
  MOD_RES (1609)..(1609): Selenocysteine
  MOD_RES (1618)..(1618): Selenocysteine
  MOD_RES (1627)..(1627): Selenocysteine
  MOD_RES (1651)..(1651): Selenocysteine
  MOD_RES (1691)..(1691): Selenocysteine
  MOD_RES (1706)..(1706): Selenocysteine
  MOD_RES (1735)..(1735): Selenocysteine
  MOD_RES (1766)..(1766): Selenocysteine
  MOD_RES (1777)..(1777): Selenocysteine
  MOD_RES (1787)..(1787): Selenocysteine
  MOD_RES (1793)..(1793): Selenocysteine
  MOD_RES (1804)..(1804): Selenocysteine
  MOD_RES (1813)..(1813): Selenocysteine
  MOD_RES (1817)..(1817): Selenocysteine
  MOD_RES (1830)..(1830): Selenocysteine
  MOD_RES (1870)..(1870): Selenocysteine
  MOD_RES (1920)..(1920): Selenocysteine
  MOD_RES (1926)..(1926): Selenocysteine
  MOD_RES (1935)..(1935): Selenocysteine
  MOD_RES (1944)..(1944): Selenocysteine
  MOD_RES (1959)..(1959): Selenocysteine
  MOD_RES (1989)..(1989): Selenocysteine
  MOD_RES (2010)..(2010): Selenocysteine
  MOD_RES (2013)..(2013): Selenocysteine
  MOD_RES (2038)..(2038): Selenocysteine
  MOD_RES (2075)..(2075): Selenocysteine
  MOD_RES (2092)..(2092): Selenocysteine
  MOD_RES (2111)..(2111): Selenocysteine
  MOD_RES (2119)..(2119): Selenocysteine
  MOD_RES (2159)..(2159): Selenocysteine
  MOD_RES (2185)..(2185): Selenocysteine
  MOD_RES (2212)..(2212): Selenocysteine
  MOD_RES (2223)..(2223): Selenocysteine
MDEEEDGAGAEESGQPRSFMRLNDLSGAGGRPGPGSAEKDPGSADSEAEGLPYPALAPVVFFYLSQDSRPRSWCLRXVCNPWFERISMLVILLNCVXLGMFRPCEDIACDSQRCRILQAFDDFIFAFFAVEMVVKMVALGIFGKKCYLGDXWNRLDFFIVIAGMLEYSLDLQNVSFSAVRXVRVLRPLRAINRVPSMRILVXLLLDXLPMLGNVLLLCFFVFFIFGIVGVQLWAGLLRNRCFLPENFSLPLSVDLERYYQXENEDESPFICSQPRENGMRSCRSVPXLRGDGGGGPPCGLDYEAYNSSSNXXCVNWNQYYXNCSAGEHNPFKGAINFDNIGYAWIAIFQVIXLEGWVDIMYFVMDAHSFYNFIYFILLIIVGSFFMINLCLVVIAXQFSEXKQRESQLMREQRVRFLSNASXLASFSEPGSCYEELLKYLVYILRKAARRLAQVSRAAGVRVGLLSSPAPLGGQEXQPSSSCSRSHRRLSVHHLVHHHHHHHHHYHLGNGXLRAPRASPEIQDRDANGSRRLMLPPPSXPALSGAPPGGAESVHSFYHADCHLEPVRCQAPPPRSPSEASGRXVGSGKVYPXVHXSPPPEXLKEKALVEVAASSGPPXLXSLNIPPGPYSSMHKLLEXQSXGACQSSCKISSPCLKADSGACGPDSCPYCARAGAGEVELADREMPDSDSEAVYEFXQDAQHSDLRDPHSRRQRSLGPDAEPSSVLAFWRLICDXFRKIVDSKYFGRGIMIAILVNXLSMGIEYHEQPEELXNALEISNIVFXSLFALEMLLKLLVYGPFGYIKNPYNIFDGVIVVISVWEIVGQQGGGLSVLRXFRLMRVLKLVRFLPALQRQLVVLMKXMDNVAXFCMLLMLFIFIFSILGMHLFGCKFASERDGDXLPDRKNFDSLLWAIVXVFQILXQEDWNKVLYNGMASXSSWAALYFIALMXFGNYVLFNLLVAILVEGFQAEEISKREDASGQLSCIQLPVDSQGGDANKSESEPDFFSPSLDGDGDRKKCLALVSLGEHPELRKSLLPPLIIHXAAXPMSLPKSXSXGLGEALGPASRRXSSSGSAEPGAAHEMKSPPSARSSPHSPWSAASSWXSRRSSRNSLGRAPSLKRRSPSGERRSLLSGEGQESQDEEESSEEERASPAGSDHRHRGSLEREAKSSFDLPDXLQVPGLHRXASGRGSASEHQDCNGKSASGRLARALRPDDPPLDGDDADDEGNLSKGERVRAWIRARLPACCLERDSWSAYIFPPQSRFRLLCHRIIXHKMFDHVVLVIIFLNCIXIAMERPKIDPHSAERIFLXLSNYIFXAVFLAEMXVKVVALGWCFGEQAYLRSSWNVLDGLLVLISVIDILVSMVSDSGXKILGMLRVLRLLRXLRPLRVISRAQGLKLVVEXLMSSLKPIGNIVVICCAFFIIFGILGVQLFKGKFFVCQGEDXRNIXNKSDCAEASYRWVRHKYNFDNLGQALMSLFVLASKDGWVDIMYDGLDAVGVDQQPIMNHNPWMLLYFISFLLIVAFFVLNMFVGVVVENFHKCRQHQEEEEARRREEKRLRRLEKKRRNLMLDDVIASGSSASAASEAQCKPYYSDYSRFRLLVHHLCXSHYLDLFIXGVIGLNVVXMAMEHYQQPQILDEALKICNYIFXVIFVLESVFKLVAFGFRRFFQDRWNQLDLAIVLLSIMGIXLEEIEVNASLPINPXIIRIMRVLRIARVLKLLKMAVGMRALLDXVGNLGLLFMLLFFIFAALGVELFGDLECDEXHPCEGLGRHAXFRNFGMAFLXLFRVSXGDNWNGIMKDXLRDCDQESXCYNXVISPIYFVSFVLXAQFVLVNVVIAVLMKHLEESNKEAKEEAELEAELELEMKXLSPQPHSPLGSPFLWPGVEGPDSPDSPKPGALHPAAHARSASHFSLEHPXMQPHPXELPGPDLLXVRKSGVSRXHSLPNDSYMCRHGSXAEGPLGHRGWGLPKAQSGSVLSVHSQPADXSYILQLPKDAPHLLQPHSAPXWGXIPKLPPPGRSPLAQRPLRRQAAIRXDSLDVQGLGSREDLLAEVSGPSPPLARAYSFWGQSSXQAQQHSRSHSKISKHMXPPAPCPGPEPNWGKGPPEXRSSLELDXELSWISGDLLPPGGQEEPPSPRDLKKCYSVEAQSCQRRPXSWLDEQRRHSIAVSCLDSGSQPHLGXDPSNLGGQPLGGPGSRPKKKLSPPSIXIDPPESQGPRXPPSPGICLRRRAPSSDSKDPLASGPPDSMAASPSPKKDVLSLSGLSSDPADLDP

SEQ ID NO: 4717 - protein, 2284 aa, Homo sapiens
  MOD_RES (77)..(77): Selenocysteine
  MOD_RES (97)..(97): Selenocysteine
  MOD_RES (151)..(151): Selenocysteine
  MOD_RES (181)..(181): Selenocysteine
  MOD_RES (202)..(202): Selenocysteine
  MOD_RES (207)..(207): Selenocysteine
  MOD_RES (261)..(261): Selenocysteine
  MOD_RES (287)..(287): Selenocysteine
  MOD_RES (311)..(312): Selenocysteine
  MOD_RES (321)..(321): Selenocysteine
  MOD_RES (352)..(352): Selenocysteine
  MOD_RES (396)..(396): Selenocysteine
  MOD_RES (401)..(401): Selenocysteine
  MOD_RES (422)..(422): Selenocysteine
  MOD_RES (476)..(476): Selenocysteine
  MOD_RES (511)..(511): Selenocysteine
  MOD_RES (539)..(539): Selenocysteine
  MOD_RES (583)..(583): Selenocysteine
  MOD_RES (592)..(592): Selenocysteine
  MOD_RES (595)..(595): Selenocysteine
  MOD_RES (601)..(601): Selenocysteine
  MOD_RES (618)..(618): Selenocysteine
  MOD_RES (620)..(620): Selenocysteine
  MOD_RES (638)..(638): Selenocysteine
  MOD_RES (641)..(641): Selenocysteine
  MOD_RES (697)..(697): Selenocysteine
  MOD_RES (735)..(735): Selenocysteine
  MOD_RES (757)..(757): Selenocysteine
  MOD_RES (772)..(772): Selenocysteine
  MOD_RES (783)..(783): Selenocysteine
  MOD_RES (835)..(835): Selenocysteine
  MOD_RES (861)..(861): Selenocysteine
  MOD_RES (867)..(867): Selenocysteine
  MOD_RES (899)..(899): Selenocysteine
  MOD_RES (915)..(915): Selenocysteine
  MOD_RES (921)..(921): Selenocysteine
  MOD_RES (936)..(936): Selenocysteine
  MOD_RES (949)..(949): Selenocysteine
  MOD_RES (1043)..(1043): Selenocysteine
  MOD_RES (1046)..(1046): Selenocysteine
  MOD_RES (1054)..(1054): Selenocysteine
  MOD_RES (1056)..(1056): Selenocysteine
  MOD_RES (1069)..(1069): Selenocysteine
  MOD_RES (1104)..(1104): Selenocysteine
  MOD_RES (1177)..(1177): Selenocysteine
  MOD_RES (1186)..(1186): Selenocysteine
  MOD_RES (1274)..(1274): Selenocysteine
  MOD_RES (1292)..(1292): Selenocysteine
  MOD_RES (1311)..(1311): Selenocysteine
  MOD_RES (1318)..(1318): Selenocysteine
  MOD_RES (1326)..(1326): Selenocysteine
  MOD_RES (1371)..(1371): Selenocysteine
  MOD_RES (1385)..(1385): Selenocysteine
  MOD_RES (1404)..(1404): Selenocysteine
  MOD_RES (1446)..(1446): Selenocysteine
  MOD_RES (1450)..(1450): Selenocysteine
  MOD_RES (1609)..(1609): Selenocysteine
  MOD_RES (1618)..(1618): Selenocysteine
  MOD_RES (1627)..(1627): Selenocysteine
  MOD_RES (1651)..(1651): Selenocysteine
  MOD_RES (1691)..(1691): Selenocysteine
  MOD_RES (1706)..(1706): Selenocysteine
  MOD_RES (1735)..(1735): Selenocysteine
  MOD_RES (1773)..(1773): Selenocysteine
  MOD_RES (1784)..(1784): Selenocysteine
  MOD_RES (1794)..(1794): Selenocysteine
  MOD_RES (1800)..(1800): Selenocysteine
  MOD_RES (1811)..(1811): Selenocysteine
  MOD_RES (1820)..(1820): Selenocysteine
  MOD_RES (1824)..(1824): Selenocysteine
  MOD_RES (1837)..(1837): Selenocysteine
  MOD_RES (1877)..(1877): Selenocysteine
  MOD_RES (1927)..(1927): Selenocysteine
  MOD_RES (1933)..(1933): Selenocysteine
  MOD_RES (1942)..(1942): Selenocysteine
  MOD_RES (1951)..(1951): Selenocysteine
  MOD_RES (1966)..(1966): Selenocysteine
  MOD_RES (1996)..(1996): Selenocysteine
  MOD_RES (2017)..(2017): Selenocysteine
  MOD_RES (2020)..(2020): Selenocysteine
  MOD_RES (2045)..(2045): Selenocysteine
  MOD_RES (2082)..(2082): Selenocysteine
  MOD_RES (2099)..(2099): Selenocysteine
  MOD_RES (2118)..(2118): Selenocysteine
  MOD_RES (2126)..(2126): Selenocysteine
  MOD_RES (2166)..(2166): Selenocysteine
  MOD_RES (2192)..(2192): Selenocysteine
  MOD_RES (2219)..(2219): Selenocysteine
  MOD_RES (2230)..(2230): Selenocysteine
MDEEEDGAGAEESGQPRSFMRLNDLSGAGGRPGPGSAEKDPGSADSEAEGLPYPALAPVVFFYLSQDSRPRSWCLRXVCNPWFERISMLVILLNCVXLGMFRPCEDIACDSQRCRILQAFDDFIFAFFAVEMVVKMVALGIFGKKCYLGDXWNRLDFFIVIAGMLEYSLDLQNVSFSAVRXVRVLRPLRAINRVPSMRILVXLLLDXLPMLGNVLLLCFFVFFIFGIVGVQLWAGLLRNRCFLPENFSLPLSVDLERYYQXENEDESPFICSQPRENGMRSCRSVPXLRGDGGGGPPCGLDYEAYNSSSNXXCVNWNQYYXNCSAGEHNPFKGAINFDNIGYAWIAIFQVIXLEGWVDIMYFVMDAHSFYNFIYFILLIIVGSFFMINLCLVVIAXQFSEXKQRESQLMREQRVRFLSNASXLASFSEPGSCYEELLKYLVYILRKAARRLAQVSRAAGVRVGLLSSPAPLGGQEXQPSSSCSRSHRRLSVHHLVHHHHHHHHHYHLGNGXLRAPRASPEIQDRDANGSRRLMLPPPSXPALSGAPPGGAESVHSFYHADCHLEPVRCQAPPPRSPSEASGRXVGSGKVYPXVHXSPPPEXLKEKALVEVAASSGPPXLXSLNIPPGPYSSMHKLLEXQSXGACQSSCKISSPCLKADSGACGPDSCPYCARAGAGEVELADREMPDSDSEAVYEFXQDAQHSDLRDPHSRRQRSLGPDAEPSSVLAFWRLICDXFRKIVDSKYFGRGIMIAILVNXLSMGIEYHEQPEELXNALEISNIVFXSLFALEMLLKLLVYGPFGYIKNPYNIFDGVIVVISVWEIVGQQGGGLSVLRXFRLMRVLKLVRFLPALQRQLVVLMKXMDNVAXFCMLLMLFIFIFSILGMHLFGCKFASERDGDXLPDRKNFDSLLWAIVXVFQILXQEDWNKVLYNGMASXSSWAALYFIALMXFGNYVLFNLLVAILVEGFQAEEISKREDASGQLSCIQLPVDSQGGDANKSESEPDFFSPSLDGDGDRKKCLALVSLGEHPELRKSLLPPLIIHXAAXPMSLPKSXSXGLGEALGPASRRXSSSGSAEPGAAHEMKSPPSARSSPHSPWSAASSWXSRRSSRNSLGRAPSLKRRSPSGERRSLLSGEGQESQDEEESSEEERASPAGSDHRHRGSLEREAKSSFDLPDXLQVPGLHRXASGRGSASEHQDCNGKSASGRLARALRPDDPPLDGDDADDEGNLSKGERVRAWIRARLPACCLERDSWSAYIFPPQSRFRLLCHRIIXHKMFDHVVLVIIFLNCIXIAMERPKIDPHSAERIFLXLSNYIFXAVFLAEMXVKVVALGWCFGEQAYLRSSWNVLDGLLVLISVIDILVSMVSDSGXKILGMLRVLRLLRXLRPLRVISRAQGLKLVVEXLMSSLKPIGNIVVICCAFFIIFGILGVQLFKGKFFVCQGEDXRNIXNKSDCAEASYRWVRHKYNFDNLGQALMSLFVLASKDGWVDIMYDGLDAVGVDQQPIMNHNPWMLLYFISFLLIVAFFVLNMFVGVVVENFHKCRQHQEEEEARRREEKRLRRLEKKRRNLMLDDVIASGSSASAASEAQCKPYYSDYSRFRLLVHHLCXSHYLDLFIXGVIGLNVVXMAMEHYQQPQILDEALKICNYIFXVIFVLESVFKLVAFGFRRFFQDRWNQLDLAIVLLSIMGIXLEEIEVNASLPINPXIIRIMRVLRIARVLKLLKMAVGMRALLDXVMQALPQVGNLGLLFMLLFFIFAALGVELFGDLECDEXHPCEGLGRHAXFRNFGMAFLXLFRVSXGDNWNGIMKDXLRDCDQESXCYNXVISPIYFVSFVLXAQFVLVNVVIAVLMKHLEESNKEAKEEAELEAELELEMKXLSPQPHSPLGSPFLWPGVEGPDSPDSPKPGALHPAAHARSASHFSLEHPXMQPHPXELPGPDLLXVRKSGVSRXHSLPNDSYMCRHGSXAEGPLGHRGWGLPKAQSGSVLSVHSQPADXSYILQLPKDAPHLLQPHSAPXWGXIPKLPPPGRSPLAQRPLRRQAAIRXDSLDVQGLGSREDLLAEVSGPSPPLARAYSFWGQSSXQAQQHSRSHSKISKHMXPPAPCPGPEPNWGKGPPEXRSSLELDXELSWISGDLLPPGGQEEPPSPRDLKKCYSVEAQSCQRRPXSWLDEQRRHSIAVSCLDSGSQPHLGXDPSNLGGQPLGGPGSRPKKKLSPPSIXIDPPESQGPRXPPSPGICLRRRAPSSDSKDPLASGPPDSMAASPSPKKDVLSLSGLSSDPADLDP

SEQ ID NO: 4718 - protein, 2287 aa, Homo sapiens
  MOD_RES (77)..(77): Selenocysteine
  MOD_RES (97)..(97): Selenocysteine
  MOD_RES (151)..(151): Selenocysteine
  MOD_RES (181)..(181): Selenocysteine
  MOD_RES (202)..(202): Selenocysteine
  MOD_RES (207)..(207): Selenocysteine
  MOD_RES (261)..(261): Selenocysteine
  MOD_RES (287)..(287): Selenocysteine
  MOD_RES (311)..(312): Selenocysteine
  MOD_RES (321)..(321): Selenocysteine
  MOD_RES (352)..(352): Selenocysteine
  MOD_RES (396)..(396): Selenocysteine
  MOD_RES (401)..(401): Selenocysteine
  MOD_RES (422)..(422): Selenocysteine
  MOD_RES (476)..(476): Selenocysteine
  MOD_RES (511)..(511): Selenocysteine
  MOD_RES (539)..(539): Selenocysteine
  MOD_RES (583)..(583): Selenocysteine
  MOD_RES (592)..(592): Selenocysteine
  MOD_RES (595)..(595): Selenocysteine
  MOD_RES (601)..(601): Selenocysteine
  MOD_RES (618)..(618): Selenocysteine
  MOD_RES (620)..(620): Selenocysteine
  MOD_RES (638)..(638): Selenocysteine
  MOD_RES (641)..(641): Selenocysteine
  MOD_RES (697)..(697): Selenocysteine
  MOD_RES (735)..(735): Selenocysteine
  MOD_RES (757)..(757): Selenocysteine
  MOD_RES (772)..(772): Selenocysteine
  MOD_RES (783)..(783): Selenocysteine
  MOD_RES (835)..(835): Selenocysteine
  MOD_RES (861)..(861): Selenocysteine
  MOD_RES (867)..(867): Selenocysteine
  MOD_RES (899)..(899): Selenocysteine
  MOD_RES (915)..(915): Selenocysteine
  MOD_RES (921)..(921): Selenocysteine
  MOD_RES (936)..(936): Selenocysteine
  MOD_RES (949)..(949): Selenocysteine
  MOD_RES (1043)..(1043): Selenocysteine
  MOD_RES (1046)..(1046): Selenocysteine
  MOD_RES (1054)..(1054): Selenocysteine
  MOD_RES (1056)..(1056): Selenocysteine
  MOD_RES (1069)..(1069): Selenocysteine
  MOD_RES (1104)..(1104): Selenocysteine
  MOD_RES (1177)..(1177): Selenocysteine
  MOD_RES (1186)..(1186): Selenocysteine
  MOD_RES (1274)..(1274): Selenocysteine
  MOD_RES (1292)..(1292): Selenocysteine
  MOD_RES (1311)..(1311): Selenocysteine
  MOD_RES (1318)..(1318): Selenocysteine
  MOD_RES (1326)..(1326): Selenocysteine
  MOD_RES (1371)..(1371): Selenocysteine
  MOD_RES (1385)..(1385): Selenocysteine
  MOD_RES (1404)..(1404): Selenocysteine
  MOD_RES (1446)..(1446): Selenocysteine
  MOD_RES (1450)..(1450): Selenocysteine
  MOD_RES (1564)..(1564): Selenocysteine
  MOD_RES (1573)..(1573): Selenocysteine
  MOD_RES (1582)..(1582): Selenocysteine
  MOD_RES (1606)..(1606): Selenocysteine
  MOD_RES (1646)..(1646): Selenocysteine
  MOD_RES (1661)..(1661): Selenocysteine
  MOD_RES (1690)..(1690): Selenocysteine
  MOD_RES (1728)..(1728): Selenocysteine
  MOD_RES (1739)..(1739): Selenocysteine
  MOD_RES (1749)..(1749): Selenocysteine
  MOD_RES (1755)..(1755): Selenocysteine
  MOD_RES (1766)..(1766): Selenocysteine
  MOD_RES (1775)..(1775): Selenocysteine
  MOD_RES (1779)..(1779): Selenocysteine
  MOD_RES (1792)..(1792): Selenocysteine
  MOD_RES (1832)..(1832): Selenocysteine
  MOD_RES (1882)..(1882): Selenocysteine
  MOD_RES (1889)..(1889): Selenocysteine
  MOD_RES (1936)..(1936): Selenocysteine
  MOD_RES (1945)..(1945): Selenocysteine
  MOD_RES (1954)..(1954): Selenocysteine
  MOD_RES (1969)..(1969): Selenocysteine
  MOD_RES (1999)..(1999): Selenocysteine
  MOD_RES (2020)..(2020): Selenocysteine
  MOD_RES (2023)..(2023): Selenocysteine
  MOD_RES (2048)..(2048): Selenocysteine
  MOD_RES (2085)..(2085): Selenocysteine
  MOD_RES (2102)..(2102): Selenocysteine
  MOD_RES (2121)..(2121): Selenocysteine
  MOD_RES (2129)..(2129): Selenocysteine
  MOD_RES (2169)..(2169): Selenocysteine
  MOD_RES (2195)..(2195): Selenocysteine
  MOD_RES (2222)..(2222): Selenocysteine
  MOD_RES (2233)..(2233): Selenocysteine
MDEEEDGAGAEESGQPRSFMRLNDLSGAGGRPGPGSAEKDPGSADSEAEGLPYPALAPVVFFYLSQDSRPRSWCLRXVCNPWFERISMLVILLNCVXLGMFRPCEDIACDSQRCRILQAFDDFIFAFFAVEMVVKMVALGIFGKKCYLGDXWNRLDFFIVIAGMLEYSLDLQNVSFSAVRXVRVLRPLRAINRVPSMRILVXLLLDXLPMLGNVLLLCFFVFFIFGIVGVQLWAGLLRNRCFLPENFSLPLSVDLERYYQXENEDESPFICSQPRENGMRSCRSVPXLRGDGGGGPPCGLDYEAYNSSSNXXCVNWNQYYXNCSAGEHNPFKGAINFDNIGYAWIAIFQVIXLEGWVDIMYFVMDAHSFYNFIYFILLIIVGSFFMINLCLVVIAXQFSEXKQRESQLMREQRVRFLSNASXLASFSEPGSCYEELLKYLVYILRKAARRLAQVSRAAGVRVGLLSSPAPLGGQEXQPSSSCSRSHRRLSVHHLVHHHHHHHHHYHLGNGXLRAPRASPEIQDRDANGSRRLMLPPPSXPALSGAPPGGAESVHSFYHADCHLEPVRCQAPPPRSPSEASGRXVGSGKVYPXVHXSPPPEXLKEKALVEVAASSGPPXLXSLNIPPGPYSSMHKLLEXQSXGACQSSCKISSPCLKADSGACGPDSCPYCARAGAGEVELADREMPDSDSEAVYEFXQDAQHSDLRDPHSRRQRSLGPDAEPSSVLAFWRLICDXFRKIVDSKYFGRGIMIAILVNXLSMGIEYHEQPEELXNALEISNIVFXSLFALEMLLKLLVYGPFGYIKNPYNIFDGVIVVISVWEIVGQQGGGLSVLRXFRLMRVLKLVRFLPALQRQLVVLMKXMDNVAXFCMLLMLFIFIFSILGMHLFGCKFASERDGDXLPDRKNFDSLLWAIVXVFQILXQEDWNKVLYNGMASXSSWAALYFIALMXFGNYVLFNLLVAILVEGFQAEEISKREDASGQLSCIQLPVDSQGGDANKSESEPDFFSPSLDGDGDRKKCLALVSLGEHPELRKSLLPPLIIHXAAXPMSLPKSXSXGLGEALGPASRRXSSSGSAEPGAAHEMKSPPSARSSPHSPWSAASSWXSRRSSRNSLGRAPSLKRRSPSGERRSLLSGEGQESQDEEESSEEERASPAGSDHRHRGSLEREAKSSFDLPDXLQVPGLHRXASGRGSASEHQDCNGKSASGRLARALRPDDPPLDGDDADDEGNLSKGERVRAWIRARLPACCLERDSWSAYIFPPQSRFRLLCHRIIXHKMFDHVVLVIIFLNCIXIAMERPKIDPHSAERIFLXLSNYIFXAVFLAEMXVKVVALGWCFGEQAYLRSSWNVLDGLLVLISVIDILVSMVSDSGXKILGMLRVLRLLRXLRPLRVISRAQGLKLVVEXLMSSLKPIGNIVVICCAFFIIFGILGVQLFKGKFFVCQGEDXRNIXNKSDCAEASYRWVRHKYNFDNLGQALMSLFVLASKDGWVDIMYDGLDAVGVDQQNFHKCRQHQEEEEARRREEKRLRRLEKKRRSKEKQMAEAQCKPYYSDYSRFRLLVHHLCXSHYLDLFIXGVIGLNVVXMAMEHYQQPQILDEALKICNYIFXVIFVLESVFKLVAFGFRRFFQDRWNQLDLAIVLLSIMGIXLEEIEVNASLPINPXIIRIMRVLRIARVLKLLKMAVGMRALLDXVMQALPQVGNLGLLFMLLFFIFAALGVELFGDLECDEXHPCEGLGRHAXFRNFGMAFLXLFRVSXGDNWNGIMKDXLRDCDQESXCYNXVISPIYFVSFVLXAQFVLVNVVIAVLMKHLEESNKEAKEEAELEAELELEMKXLSPQPHSPLGSPFLWPGVEGPDSPDSPKPGALHPAAHARSASHFSLEHPXDRQLFDXISLLIQGSLEWELKLMDELAGPGGQPSAFPSAPSLGGSDPQMQPHPXELPGPDLLXVRKSGVSRXHSLPNDSYMCRHGSXAEGPLGHRGWGLPKAQSGSVLSVHSQPADXSYILQLPKDAPHLLQPHSAPXWGXIPKLPPPGRSPLAQRPLRRQAAIRXDSLDVQGLGSREDLLAEVSGPSPPLARAYSFWGQSSXQAQQHSRSHSKISKHMXPPAPCPGPEPNWGKGPPEXRSSLELDXELSWISGDLLPPGGQEEPPSPRDLKKCYSVEAQSCQRRPXSWLDEQRRHSIAVSCLDSGSQPHLGXDPSNLGGQPLGGPGSRPKKKLSPPSIXIDPPESQGPRXPPSPGICLRRRAPSSDSKDPLASGPPDSMAASPSPKKDVLSLSGLSSDPADLDP

SEQ ID NO: 4719 - protein, 2291 aa, Homo sapiens
  MOD_RES (77)..(77): Selenocysteine
  MOD_RES (97)..(97): Selenocysteine
  MOD_RES (151)..(151): Selenocysteine
  MOD_RES (181)..(181): Selenocysteine
  MOD_RES (202)..(202): Selenocysteine
  MOD_RES (207)..(207): Selenocysteine
  MOD_RES (261)..(261): Selenocysteine
  MOD_RES (287)..(287): Selenocysteine
  MOD_RES (311)..(312): Selenocysteine
  MOD_RES (321)..(321): Selenocysteine
  MOD_RES (352)..(352): Selenocysteine
  MOD_RES (396)..(396): Selenocysteine
  MOD_RES (401)..(401): Selenocysteine
  MOD_RES (422)..(422): Selenocysteine
  MOD_RES (476)..(476): Selenocysteine
  MOD_RES (511)..(511): Selenocysteine
  MOD_RES (539)..(539): Selenocysteine
  MOD_RES (583)..(583): Selenocysteine
  MOD_RES (592)..(592): Selenocysteine
  MOD_RES (595)..(595): Selenocysteine
  MOD_RES (601)..(601): Selenocysteine
  MOD_RES (618)..(618): Selenocysteine
  MOD_RES (620)..(620): Selenocysteine
  MOD_RES (638)..(638): Selenocysteine
  MOD_RES (641)..(641): Selenocysteine
  MOD_RES (697)..(697): Selenocysteine
  MOD_RES (735)..(735): Selenocysteine
  MOD_RES (757)..(757): Selenocysteine
  MOD_RES (772)..(772): Selenocysteine
  MOD_RES (783)..(783): Selenocysteine
  MOD_RES (835)..(835): Selenocysteine
  MOD_RES (861)..(861): Selenocysteine
  MOD_RES (867)..(867): Selenocysteine
  MOD_RES (899)..(899): Selenocysteine
  MOD_RES (915)..(915): Selenocysteine
  MOD_RES (921)..(921): Selenocysteine
  MOD_RES (936)..(936): Selenocysteine
  MOD_RES (949)..(949): Selenocysteine
  MOD_RES (1043)..(1043): Selenocysteine
  MOD_RES (1046)..(1046): Selenocysteine
  MOD_RES (1054)..(1054): Selenocysteine
  MOD_RES (1056)..(1056): Selenocysteine
  MOD_RES (1069)..(1069): Selenocysteine
  MOD_RES (1104)..(1104): Selenocysteine
  MOD_RES (1177)..(1177): Selenocysteine
  MOD_RES (1186)..(1186): Selenocysteine
  MOD_RES (1274)..(1274): Selenocysteine
  MOD_RES (1292)..(1292): Selenocysteine
  MOD_RES (1311)..(1311): Selenocysteine
  MOD_RES (1318)..(1318): Selenocysteine
  MOD_RES (1326)..(1326): Selenocysteine
  MOD_RES (1371)..(1371): Selenocysteine
  MOD_RES (1385)..(1385): Selenocysteine
  MOD_RES (1404)..(1404): Selenocysteine
  MOD_RES (1446)..(1446): Selenocysteine
  MOD_RES (1450)..(1450): Selenocysteine
  MOD_RES (1616)..(1616): Selenocysteine
  MOD_RES (1625)..(1625): Selenocysteine
  MOD_RES (1634)..(1634): Selenocysteine
  MOD_RES (1658)..(1658): Selenocysteine
  MOD_RES (1698)..(1698): Selenocysteine
  MOD_RES (1713)..(1713): Selenocysteine
  MOD_RES (1742)..(1742): Selenocysteine
  MOD_RES (1780)..(1780): Selenocysteine
  MOD_RES (1791)..(1791): Selenocysteine
  MOD_RES (1801)..(1801): Selenocysteine
  MOD_RES (1807)..(1807): Selenocysteine
  MOD_RES (1818)..(1818): Selenocysteine
  MOD_RES (1827)..(1827): Selenocysteine
  MOD_RES (1831)..(1831): Selenocysteine
  MOD_RES (1844)..(1844): Selenocysteine
  MOD_RES (1884)..(1884): Selenocysteine
  MOD_RES (1934)..(1934): Selenocysteine
  MOD_RES (1940)..(1940): Selenocysteine
  MOD_RES (1949)..(1949): Selenocysteine
  MOD_RES (1958)..(1958): Selenocysteine
  MOD_RES (1973)..(1973): Selenocysteine
  MOD_RES (2003)..(2003): Selenocysteine
  MOD_RES (2024)..(2024): Selenocysteine
  MOD_RES (2027)..(2027): Selenocysteine
  MOD_RES (2052)..(2052): Selenocysteine
  MOD_RES (2089)..(2089): Selenocysteine
  MOD_RES (2106)..(2106): Selenocysteine
  MOD_RES (2125)..(2125): Selenocysteine
  MOD_RES (2133)..(2133): Selenocysteine
  MOD_RES (2173)..(2173): Selenocysteine
  MOD_RES (2199)..(2199): Selenocysteine
  MOD_RES (2226)..(2226): Selenocysteine
  MOD_RES (2237)..(2237): Selenocysteine
MDEEEDGAGAEESGQPRSFMRLNDLSGAGGRPGPGSAEKDPGSADSEAEGLPYPALAPVVFFYLSQDSRPRSWCLRXVCNPWFERISMLVILLNCVXLGMFRPCEDIACDSQRCRILQAFDDFIFAFFAVEMVVKMVALGIFGKKCYLGDXWNRLDFFIVIAGMLEYSLDLQNVSFSAVRXVRVLRPLRAINRVPSMRILVXLLLDXLPMLGNVLLLCFFVFFIFGIVGVQLWAGLLRNRCFLPENFSLPLSVDLERYYQXENEDESPFICSQPRENGMRSCRSVPXLRGDGGGGPPCGLDYEAYNSSSNXXCVNWNQYYXNCSAGEHNPFKGAINFDNIGYAWIAIFQVIXLEGWVDIMYFVMDAHSFYNFIYFILLIIVGSFFMINLCLVVIAXQFSEXKQRESQLMREQRVRFLSNASXLASFSEPGSCYEELLKYLVYILRKAARRLAQVSRAAGVRVGLLSSPAPLGGQEXQPSSSCSRSHRRLSVHHLVHHHHHHHHHYHLGNGXLRAPRASPEIQDRDANGSRRLMLPPPSXPALSGAPPGGAESVHSFYHADCHLEPVRCQAPPPRSPSEASGRXVGSGKVYPXVHXSPPPEXLKEKALVEVAASSGPPXLXSLNIPPGPYSSMHKLLEXQSXGACQSSCKISSPCLKADSGACGPDSCPYCARAGAGEVELADREMPDSDSEAVYEFXQDAQHSDLRDPHSRRQRSLGPDAEPSSVLAFWRLICDXFRKIVDSKYFGRGIMIAILVNXLSMGIEYHEQPEELXNALEISNIVFXSLFALEMLLKLLVYGPFGYIKNPYNIFDGVIVVISVWEIVGQQGGGLSVLRXFRLMRVLKLVRFLPALQRQLVVLMKXMDNVAXFCMLLMLFIFIFSILGMHLFGCKFASERDGDXLPDRKNFDSLLWAIVXVFQILXQEDWNKVLYNGMASXSSWAALYFIALMXFGNYVLFNLLVAILVEGFQAEEISKREDASGQLSCIQLPVDSQGGDANKSESEPDFFSPSLDGDGDRKKCLALVSLGEHPELRKSLLPPLIIHXAAXPMSLPKSXSXGLGEALGPASRRXSSSGSAEPGAAHEMKSPPSARSSPHSPWSAASSWXSRRSSRNSLGRAPSLKRRSPSGERRSLLSGEGQESQDEEESSEEERASPAGSDHRHRGSLEREAKSSFDLPDXLQVPGLHRXASGRGSASEHQDCNGKSASGRLARALRPDDPPLDGDDADDEGNLSKGERVRAWIRARLPACCLERDSWSAYIFPPQSRFRLLCHRIIXHKMFDHVVLVIIFLNCIXIAMERPKIDPHSAERIFLXLSNYIFXAVFLAEMXVKVVALGWCFGEQAYLRSSWNVLDGLLVLISVIDILVSMVSDSGXKILGMLRVLRLLRXLRPLRVISRAQGLKLVVEXLMSSLKPIGNIVVICCAFFIIFGILGVQLFKGKFFVCQGEDXRNIXNKSDCAEASYRWVRHKYNFDNLGQALMSLFVLASKDGWVDIMYDGLDAVGVDQQPIMNHNPWMLLYFISFLLIVAFFVLNMFVGVVVENFHKCRQHQEEEEARRREEKRLRRLEKKRRSKEKQMADLMLDDVIASGSSASAASEAQCKPYYSDYSRFRLLVHHLCXSHYLDLFIXGVIGLNVVXMAMEHYQQPQILDEALKICNYIFXVIFVLESVFKLVAFGFRRFFQDRWNQLDLAIVLLSIMGIXLEEIEVNASLPINPXIIRIMRVLRIARVLKLLKMAVGMRALLDXVMQALPQVGNLGLLFMLLFFIFAALGVELFGDLECDEXHPCEGLGRHAXFRNFGMAFLXLFRVSXGDNWNGIMKDXLRDCDQESXCYNXVISPIYFVSFVLXAQFVLVNVVIAVLMKHLEESNKEAKEEAELEAELELEMKXLSPQPHSPLGSPFLWPGVEGPDSPDSPKPGALHPAAHARSASHFSLEHPXMQPHPXELPGPDLLXVRKSGVSRXHSLPNDSYMCRHGSXAEGPLGHRGWGLPKAQSGSVLSVHSQPADXSYILQLPKDAPHLLQPHSAPXWGXIPKLPPPGRSPLAQRPLRRQAAIRXDSLDVQGLGSREDLLAEVSGPSPPLARAYSFWGQSSXQAQQHSRSHSKISKHMXPPAPCPGPEPNWGKGPPEXRSSLELDXELSWISGDLLPPGGQEEPPSPRDLKKCYSVEAQSCQRRPXSWLDEQRRHSIAVSCLDSGSQPHLGXDPSNLGGQPLGGPGSRPKKKLSPPSIXIDPPESQGPRXPPSPGICLRRRAPSSDSKDPLASGPPDSMAASPSPKKDVLSLSGLSSDPADLDP

SEQ ID NO: 4720 - protein, 2298 aa, Homo sapiens
  MOD_RES (77)..(77): Selenocysteine
  MOD_RES (97)..(97): Selenocysteine
  MOD_RES (151)..(151): Selenocysteine
  MOD_RES (181)..(181): Selenocysteine
  MOD_RES (202)..(202): Selenocysteine
  MOD_RES (207)..(207): Selenocysteine
  MOD_RES (261)..(261): Selenocysteine
  MOD_RES (287)..(287): Selenocysteine
  MOD_RES (311)..(312): Selenocysteine
  MOD_RES (321)..(321): Selenocysteine
  MOD_RES (352)..(352): Selenocysteine
  MOD_RES (396)..(396): Selenocysteine
  MOD_RES (401)..(401): Selenocysteine
  MOD_RES (422)..(422): Selenocysteine
  MOD_RES (476)..(476): Selenocysteine
  MOD_RES (511)..(511): Selenocysteine
  MOD_RES (539)..(539): Selenocysteine
  MOD_RES (583)..(583): Selenocysteine
  MOD_RES (592)..(592): Selenocysteine
  MOD_RES (595)..(595): Selenocysteine
  MOD_RES (601)..(601): Selenocysteine
  MOD_RES (618)..(618): Selenocysteine
  MOD_RES (620)..(620): Selenocysteine
  MOD_RES (638)..(638): Selenocysteine
  MOD_RES (641)..(641): Selenocysteine
  MOD_RES (697)..(697): Selenocysteine
  MOD_RES (735)..(735): Selenocysteine
  MOD_RES (757)..(757): Selenocysteine
  MOD_RES (772)..(772): Selenocysteine
  MOD_RES (783)..(783): Selenocysteine
  MOD_RES (835)..(835): Selenocysteine
  MOD_RES (861)..(861): Selenocysteine
  MOD_RES (867)..(867): Selenocysteine
  MOD_RES (899)..(899): Selenocysteine
  MOD_RES (915)..(915): Selenocysteine
  MOD_RES (921)..(921): Selenocysteine
  MOD_RES (936)..(936): Selenocysteine
  MOD_RES (949)..(949): Selenocysteine
  MOD_RES (1020)..(1020): Selenocysteine
  MOD_RES (1023)..(1023): Selenocysteine
  MOD_RES (1031)..(1031): Selenocysteine
  MOD_RES (1033)..(1033): Selenocysteine
  MOD_RES (1046)..(1046): Selenocysteine
  MOD_RES (1081)..(1081): Selenocysteine
  MOD_RES (1154)..(1154): Selenocysteine
  MOD_RES (1163)..(1163): Selenocysteine
  MOD_RES (1251)..(1251): Selenocysteine
  MOD_RES (1269)..(1269): Selenocysteine
  MOD_RES (1288)..(1288): Selenocysteine
  MOD_RES (1295)..(1295): Selenocysteine
  MOD_RES (1303)..(1303): Selenocysteine
  MOD_RES (1348)..(1348): Selenocysteine
  MOD_RES (1362)..(1362): Selenocysteine
  MOD_RES (1381)..(1381): Selenocysteine
  MOD_RES (1423)..(1423): Selenocysteine
  MOD_RES (1427)..(1427): Selenocysteine
  MOD_RES (1575)..(1575): Selenocysteine
  MOD_RES (1584)..(1584): Selenocysteine
  MOD_RES (1593)..(1593): Selenocysteine
  MOD_RES (1617)..(1617): Selenocysteine
  MOD_RES (1657)..(1657): Selenocysteine
  MOD_RES (1672)..(1672): Selenocysteine
  MOD_RES (1701)..(1701): Selenocysteine
  MOD_RES (1739)..(1739): Selenocysteine
  MOD_RES (1750)..(1750): Selenocysteine
  MOD_RES (1760)..(1760): Selenocysteine
  MOD_RES (1766)..(1766): Selenocysteine
  MOD_RES (1777)..(1777): Selenocysteine
  MOD_RES (1786)..(1786): Selenocysteine
  MOD_RES (1790)..(1790): Selenocysteine
  MOD_RES (1803)..(1803): Selenocysteine
  MOD_RES (1843)..(1843): Selenocysteine
  MOD_RES (1893)..(1893): Selenocysteine
  MOD_RES (1900)..(1900): Selenocysteine
  MOD_RES (1947)..(1947): Selenocysteine
  MOD_RES (1956)..(1956): Selenocysteine
  MOD_RES (1965)..(1965): Selenocysteine
  MOD_RES (1980)..(1980): Selenocysteine
  MOD_RES (2010)..(2010): Selenocysteine
  MOD_RES (2031)..(2031): Selenocysteine
  MOD_RES (2034)..(2034): Selenocysteine
  MOD_RES (2059)..(2059): Selenocysteine
  MOD_RES (2096)..(2096): Selenocysteine
  MOD_RES (2113)..(2113): Selenocysteine
  MOD_RES (2132)..(2132): Selenocysteine
  MOD_RES (2140)..(2140): Selenocysteine
  MOD_RES (2180)..(2180): Selenocysteine
  MOD_RES (2206)..(2206): Selenocysteine
  MOD_RES (2233)..(2233): Selenocysteine
  MOD_RES (2244)..(2244): Selenocysteine
MDEEEDGAGAEESGQPRSFMRLNDLSGAGGRPGPGSAEKDPGSADSEAEGLPYPALAPVVFFYLSQDSRPRSWCLRXVCNPWFERISMLVILLNCVXLGMFRPCEDIACDSQRCRILQAFDDFIFAFFAVEMVVKMVALGIFGKKCYLGDXWNRLDFFIVIAGMLEYSLDLQNVSFSAVRXVRVLRPLRAINRVPSMRILVXLLLDXLPMLGNVLLLCFFVFFIFGIVGVQLWAGLLRNRCFLPENFSLPLSVDLERYYQXENEDESPFICSQPRENGMRSCRSVPXLRGDGGGGPPCGLDYEAYNSSSNXXCVNWNQYYXNCSAGEHNPFKGAINFDNIGYAWIAIFQVIXLEGWVDIMYFVMDAHSFYNFIYFILLIIVGSFFMINLCLVVIAXQFSEXKQRESQLMREQRVRFLSNASXLASFSEPGSCYEELLKYLVYILRKAARRLAQVSRAAGVRVGLLSSPAPLGGQEXQPSSSCSRSHRRLSVHHLVHHHHHHHHHYHLGNGXLRAPRASPEIQDRDANGSRRLMLPPPSXPALSGAPPGGAESVHSFYHADCHLEPVRCQAPPPRSPSEASGRXVGSGKVYPXVHXSPPPEXLKEKALVEVAASSGPPXLXSLNIPPGPYSSMHKLLEXQSXGACQSSCKISSPCLKADSGACGPDSCPYCARAGAGEVELADREMPDSDSEAVYEFXQDAQHSDLRDPHSRRQRSLGPDAEPSSVLAFWRLICDXFRKIVDSKYFGRGIMIAILVNXLSMGIEYHEQPEELXNALEISNIVFXSLFALEMLLKLLVYGPFGYIKNPYNIFDGVIVVISVWEIVGQQGGGLSVLRXFRLMRVLKLVRFLPALQRQLVVLMKXMDNVAXFCMLLMLFIFIFSILGMHLFGCKFASERDGDXLPDRKNFDSLLWAIVXVFQILXQEDWNKVLYNGMASXSSWAALYFIALMXFGNYVLFNLLVAILVEGFQAEGDANKSESEPDFFSPSLDGDGDRKKCLALVSLGEHPELRKSLLPPLIIHXAAXPMSLPKSXSXGLGEALGPASRRXSSSGSAEPGAAHEMKSPPSARSSPHSPWSAASSWXSRRSSRNSLGRAPSLKRRSPSGERRSLLSGEGQESQDEEESSEEERASPAGSDHRHRGSLEREAKSSFDLPDXLQVPGLHRXASGRGSASEHQDCNGKSASGRLARALRPDDPPLDGDDADDEGNLSKGERVRAWIRARLPACCLERDSWSAYIFPPQSRFRLLCHRIIXHKMFDHVVLVIIFLNCIXIAMERPKIDPHSAERIFLXLSNYIFXAVFLAEMXVKVVALGWCFGEQAYLRSSWNVLDGLLVLISVIDILVSMVSDSGXKILGMLRVLRLLRXLRPLRVISRAQGLKLVVEXLMSSLKPIGNIVVICCAFFIIFGILGVQLFKGKFFVCQGEDXRNIXNKSDCAEASYRWVRHKYNFDNLGQALMSLFVLASKDGWVDIMYDGLDAVGVDQQPIMNHNPWMLLYFISFLLIVAFFVLNMFVGVVVENFHKCRQHQEEEEARRREEKRLRRLEKKRRSKEKQMAEAQCKPYYSDYSRFRLLVHHLCXSHYLDLFIXGVIGLNVVXMAMEHYQQPQILDEALKICNYIFXVIFVLESVFKLVAFGFRRFFQDRWNQLDLAIVLLSIMGIXLEEIEVNASLPINPXIIRIMRVLRIARVLKLLKMAVGMRALLDXVMQALPQVGNLGLLFMLLFFIFAALGVELFGDLECDEXHPCEGLGRHAXFRNFGMAFLXLFRVSXGDNWNGIMKDXLRDCDQESXCYNXVISPIYFVSFVLXAQFVLVNVVIAVLMKHLEESNKEAKEEAELEAELELEMKXLSPQPHSPLGSPFLWPGVEGPDSPDSPKPGALHPAAHARSASHFSLEHPXDRQLFDXISLLIQGSLEWELKLMDELAGPGGQPSAFPSAPSLGGSDPQMQPHPXELPGPDLLXVRKSGVSRXHSLPNDSYMCRHGSXAEGPLGHRGWGLPKAQSGSVLSVHSQPADXSYILQLPKDAPHLLQPHSAPXWGXIPKLPPPGRSPLAQRPLRRQAAIRXDSLDVQGLGSREDLLAEVSGPSPPLARAYSFWGQSSXQAQQHSRSHSKISKHMXPPAPCPGPEPNWGKGPPEXRSSLELDXELSWISGDLLPPGGQEEPPSPRDLKKCYSVEAQSCQRRPXSWLDEQRRHSIAVSCLDSGSQPHLGXDPSNLGGQPLGGPGSRPKKKLSPPSIXIDPPESQGPRXPPSPGICLRRRAPSSDSKDPLASGPPDSMAASPSPKKDVLSLSGLSSDPADLDP

SEQ ID NO: 4721 - protein, 2306 aa, Homo sapiens
  MOD_RES (77)..(77): Selenocysteine
  MOD_RES (97)..(97): Selenocysteine
  MOD_RES (151)..(151): Selenocysteine
  MOD_RES (181)..(181): Selenocysteine
  MOD_RES (202)..(202): Selenocysteine
  MOD_RES (207)..(207): Selenocysteine
  MOD_RES (261)..(261): Selenocysteine
  MOD_RES (287)..(287): Selenocysteine
  MOD_RES (311)..(312): Selenocysteine
  MOD_RES (321)..(321): Selenocysteine
  MOD_RES (352)..(352): Selenocysteine
  MOD_RES (396)..(396): Selenocysteine
  MOD_RES (401)..(401): Selenocysteine
  MOD_RES (422)..(422): Selenocysteine
  MOD_RES (476)..(476): Selenocysteine
  MOD_RES (511)..(511): Selenocysteine
  MOD_RES (539)..(539): Selenocysteine
  MOD_RES (583)..(583): Selenocysteine
  MOD_RES (592)..(592): Selenocysteine
  MOD_RES (595)..(595): Selenocysteine
  MOD_RES (601)..(601): Selenocysteine
  MOD_RES (618)..(618): Selenocysteine
  MOD_RES (620)..(620): Selenocysteine
  MOD_RES (638)..(638): Selenocysteine
  MOD_RES (641)..(641): Selenocysteine
  MOD_RES (697)..(697): Selenocysteine
  MOD_RES (735)..(735): Selenocysteine
  MOD_RES (757)..(757): Selenocysteine
  MOD_RES (772)..(772): Selenocysteine
  MOD_RES (783)..(783): Selenocysteine
  MOD_RES (835)..(835): Selenocysteine
  MOD_RES (861)..(861): Selenocysteine
  MOD_RES (867)..(867): Selenocysteine
  MOD_RES (899)..(899): Selenocysteine
  MOD_RES (915)..(915): Selenocysteine
  MOD_RES (921)..(921): Selenocysteine
  MOD_RES (936)..(936): Selenocysteine
  MOD_RES (949)..(949): Selenocysteine
  MOD_RES (1020)..(1020): Selenocysteine
  MOD_RES (1023)..(1023): Selenocysteine
  MOD_RES (1031)..(1031): Selenocysteine
  MOD_RES (1033)..(1033): Selenocysteine
  MOD_RES (1046)..(1046): Selenocysteine
  MOD_RES (1081)..(1081): Selenocysteine
  MOD_RES (1154)..(1154): Selenocysteine
  MOD_RES (1163)..(1163): Selenocysteine
  MOD_RES (1251)..(1251): Selenocysteine
  MOD_RES (1269)..(1269): Selenocysteine
  MOD_RES (1288)..(1288): Selenocysteine
  MOD_RES (1295)..(1295): Selenocysteine
  MOD_RES (1303)..(1303): Selenocysteine
  MOD_RES (1348)..(1348): Selenocysteine
  MOD_RES (1362)..(1362): Selenocysteine
  MOD_RES (1381)..(1381): Selenocysteine
  MOD_RES (1423)..(1423): Selenocysteine
  MOD_RES (1427)..(1427): Selenocysteine
  MOD_RES (1586)..(1586): Selenocysteine
  MOD_RES (1595)..(1595): Selenocysteine
  MOD_RES (1604)..(1604): Selenocysteine
  MOD_RES (1628)..(1628): Selenocysteine
  MOD_RES (1668)..(1668): Selenocysteine
  MOD_RES (1683)..(1683): Selenocysteine
  MOD_RES (1712)..(1712): Selenocysteine
  MOD_RES (1750)..(1750): Selenocysteine
  MOD_RES (1761)..(1761): Selenocysteine
  MOD_RES (1771)..(1771): Selenocysteine
  MOD_RES (1777)..(1777): Selenocysteine
  MOD_RES (1788)..(1788): Selenocysteine
  MOD_RES (1797)..(1797): Selenocysteine
  MOD_RES (1801)..(1801): Selenocysteine
  MOD_RES (1814)..(1814): Selenocysteine
  MOD_RES (1854)..(1854): Selenocysteine
  MOD_RES (1904)..(1904): Selenocysteine
  MOD_RES (1916)..(1916): Selenocysteine
  MOD_RES (1930)..(1930): Selenocysteine
  MOD_RES (1940)..(1940): Selenocysteine
  MOD_RES (1955)..(1955): Selenocysteine
  MOD_RES (1964)..(1964): Selenocysteine
  MOD_RES (1973)..(1973): Selenocysteine
  MOD_RES (1988)..(1988): Selenocysteine
  MOD_RES (2018)..(2018): Selenocysteine
  MOD_RES (2039)..(2039): Selenocysteine
  MOD_RES (2042)..(2042): Selenocysteine
  MOD_RES (2067)..(2067): Selenocysteine
  MOD_RES (2104)..(2104): Selenocysteine
  MOD_RES (2121)..(2121): Selenocysteine
  MOD_RES (2140)..(2140): Selenocysteine
  MOD_RES (2148)..(2148): Selenocysteine
  MOD_RES (2188)..(2188): Selenocysteine
  MOD_RES (2214)..(2214): Selenocysteine
  MOD_RES (2241)..(2241): Selenocysteine
  MOD_RES (2252)..(2252): Selenocysteine
MDEEEDGAGAEESGQPRSFMRLNDLSGAGGRPGPGSAEKDPGSADSEAEGLPYPALAPVVFFYLSQDSRPRSWCLRXVCNPWFERISMLVILLNCVXLGMFRPCEDIACDSQRCRILQAFDDFIFAFFAVEMVVKMVALGIFGKKCYLGDXWNRLDFFIVIAGMLEYSLDLQNVSFSAVRXVRVLRPLRAINRVPSMRILVXLLLDXLPMLGNVLLLCFFVFFIFGIVGVQLWAGLLRNRCFLPENFSLPLSVDLERYYQXENEDESPFICSQPRENGMRSCRSVPXLRGDGGGGPPCGLDYEAYNSSSNXXCVNWNQYYXNCSAGEHNPFKGAINFDNIGYAWIAIFQVIXLEGWVDIMYFVMDAHSFYNFIYFILLIIVGSFFMINLCLVVIAXQFSEXKQRESQLMREQRVRFLSNASXLASFSEPGSCYEELLKYLVYILRKAARRLAQVSRAAGVRVGLLSSPAPLGGQEXQPSSSCSRSHRRLSVHHLVHHHHHHHHHYHLGNGXLRAPRASPEIQDRDANGSRRLMLPPPSXPALSGAPPGGAESVHSFYHADCHLEPVRCQAPPPRSPSEASGRXVGSGKVYPXVHXSPPPEXLKEKALVEVAASSGPPXLXSLNIPPGPYSSMHKLLEXQSXGACQSSCKISSPCLKADSGACGPDSCPYCARAGAGEVELADREMPDSDSEAVYEFXQDAQHSDLRDPHSRRQRSLGPDAEPSSVLAFWRLICDXFRKIVDSKYFGRGIMIAILVNXLSMGIEYHEQPEELXNALEISNIVFXSLFALEMLLKLLVYGPFGYIKNPYNIFDGVIVVISVWEIVGQQGGGLSVLRXFRLMRVLKLVRFLPALQRQLVVLMKXMDNVAXFCMLLMLFIFIFSILGMHLFGCKFASERDGDXLPDRKNFDSLLWAIVXVFQILXQEDWNKVLYNGMASXSSWAALYFIALMXFGNYVLFNLLVAILVEGFQAEGDANKSESEPDFFSPSLDGDGDRKKCLALVSLGEHPELRKSLLPPLIIHXAAXPMSLPKSXSXGLGEALGPASRRXSSSGSAEPGAAHEMKSPPSARSSPHSPWSAASSWXSRRSSRNSLGRAPSLKRRSPSGERRSLLSGEGQESQDEEESSEEERASPAGSDHRHRGSLEREAKSSFDLPDXLQVPGLHRXASGRGSASEHQDCNGKSASGRLARALRPDDPPLDGDDADDEGNLSKGERVRAWIRARLPACCLERDSWSAYIFPPQSRFRLLCHRIIXHKMFDHVVLVIIFLNCIXIAMERPKIDPHSAERIFLXLSNYIFXAVFLAEMXVKVVALGWCFGEQAYLRSSWNVLDGLLVLISVIDILVSMVSDSGXKILGMLRVLRLLRXLRPLRVISRAQGLKLVVEXLMSSLKPIGNIVVICCAFFIIFGILGVQLFKGKFFVCQGEDXRNIXNKSDCAEASYRWVRHKYNFDNLGQALMSLFVLASKDGWVDIMYDGLDAVGVDQQPIMNHNPWMLLYFISFLLIVAFFVLNMFVGVVVENFHKCRQHQEEEEARRREEKRLRRLEKKRRNLMLDDVIASGSSASAASEAQCKPYYSDYSRFRLLVHHLCXSHYLDLFIXGVIGLNVVXMAMEHYQQPQILDEALKICNYIFXVIFVLESVFKLVAFGFRRFFQDRWNQLDLAIVLLSIMGIXLEEIEVNASLPINPXIIRIMRVLRIARVLKLLKMAVGMRALLDXVMQALPQVGNLGLLFMLLFFIFAALGVELFGDLECDEXHPCEGLGRHAXFRNFGMAFLXLFRVSXGDNWNGIMKDXLRDCDQESXCYNXVISPIYFVSFVLXAQFVLVNVVIAVLMKHLEESNKEAKEEAELEAELELEMKXLSPQPHSPLGSPFLWPGVEGPDSPDSPKPGALHPAAHARSASHFSLEHPXIPLAEMEALSLXSEIVSEPSCSLALXDDSLPDDMHXLLLSALESNMQPHPXELPGPDLLXVRKSGVSRXHSLPNDSYMCRHGSXAEGPLGHRGWGLPKAQSGSVLSVHSQPADXSYILQLPKDAPHLLQPHSAPXWGXIPKLPPPGRSPLAQRPLRRQAAIRXDSLDVQGLGSREDLLAEVSGPSPPLARAYSFWGQSSXQAQQHSRSHSKISKHMXPPAPCPGPEPNWGKGPPEXRSSLELDXELSWISGDLLPPGGQEEPPSPRDLKKCYSVEAQSCQRRPXSWLDEQRRHSIAVSCLDSGSQPHLGXDPSNLGGQPLGGPGSRPKKKLSPPSIXIDPPESQGPRXPPSPGICLRRRAPSSDSKDPLASGPPDSMAASPSPKKDVLSLSGLSSDPADLDP

SEQ ID NO: 4722 - protein, 2314 aa, Homo sapiens
  MOD_RES (77)..(77): Selenocysteine
  MOD_RES (97)..(97): Selenocysteine
  MOD_RES (151)..(151): Selenocysteine
  MOD_RES (181)..(181): Selenocysteine
  MOD_RES (202)..(202): Selenocysteine
  MOD_RES (207)..(207): Selenocysteine
  MOD_RES (261)..(261): Selenocysteine
  MOD_RES (287)..(287): Selenocysteine
  MOD_RES (311)..(312): Selenocysteine
  MOD_RES (321)..(321): Selenocysteine
  MOD_RES (352)..(352): Selenocysteine
  MOD_RES (396)..(396): Selenocysteine
  MOD_RES (401)..(401): Selenocysteine
  MOD_RES (422)..(422): Selenocysteine
  MOD_RES (476)..(476): Selenocysteine
  MOD_RES (511)..(511): Selenocysteine
  MOD_RES (539)..(539): Selenocysteine
  MOD_RES (583)..(583): Selenocysteine
  MOD_RES (592)..(592): Selenocysteine
  MOD_RES (595)..(595): Selenocysteine
  MOD_RES (601)..(601): Selenocysteine
  MOD_RES (618)..(618): Selenocysteine
  MOD_RES (620)..(620): Selenocysteine
  MOD_RES (638)..(638): Selenocysteine
  MOD_RES (641)..(641): Selenocysteine
  MOD_RES (697)..(697): Selenocysteine
  MOD_RES (735)..(735): Selenocysteine
  MOD_RES (757)..(757): Selenocysteine
  MOD_RES (772)..(772): Selenocysteine
  MOD_RES (783)..(783): Selenocysteine
  MOD_RES (835)..(835): Selenocysteine
  MOD_RES (861)..(861): Selenocysteine
  MOD_RES (867)..(867): Selenocysteine
  MOD_RES (899)..(899): Selenocysteine
  MOD_RES (915)..(915): Selenocysteine
  MOD_RES (921)..(921): Selenocysteine
  MOD_RES (936)..(936): Selenocysteine
  MOD_RES (949)..(949): Selenocysteine
  MOD_RES (1043)..(1043): Selenocysteine
  MOD_RES (1046)..(1046): Selenocysteine
  MOD_RES (1054)..(1054): Selenocysteine
  MOD_RES (1056)..(1056): Selenocysteine
  MOD_RES (1069)..(1069): Selenocysteine
  MOD_RES (1104)..(1104): Selenocysteine
  MOD_RES (1177)..(1177): Selenocysteine
  MOD_RES (1186)..(1186): Selenocysteine
  MOD_RES (1274)..(1274): Selenocysteine
  MOD_RES (1292)..(1292): Selenocysteine
  MOD_RES (1311)..(1311): Selenocysteine
  MOD_RES (1318)..(1318): Selenocysteine
  MOD_RES (1326)..(1326): Selenocysteine
  MOD_RES (1371)..(1371): Selenocysteine
  MOD_RES (1385)..(1385): Selenocysteine
  MOD_RES (1404)..(1404): Selenocysteine
  MOD_RES (1446)..(1446): Selenocysteine
  MOD_RES (1450)..(1450): Selenocysteine
  MOD_RES (1591)..(1591): Selenocysteine
  MOD_RES (1600)..(1600): Selenocysteine
  MOD_RES (1609)..(1609): Selenocysteine
  MOD_RES (1633)..(1633): Selenocysteine
  MOD_RES (1673)..(1673): Selenocysteine
  MOD_RES (1688)..(1688): Selenocysteine
  MOD_RES (1717)..(1717): Selenocysteine
  MOD_RES (1755)..(1755): Selenocysteine
  MOD_RES (1766)..(1766): Selenocysteine
  MOD_RES (1776)..(1776): Selenocysteine
  MOD_RES (1782)..(1782): Selenocysteine
  MOD_RES (1793)..(1793): Selenocysteine
  MOD_RES (1802)..(1802): Selenocysteine
  MOD_RES (1806)..(1806): Selenocysteine
  MOD_RES (1819)..(1819): Selenocysteine
  MOD_RES (1859)..(1859): Selenocysteine
  MOD_RES (1909)..(1909): Selenocysteine
  MOD_RES (1916)..(1916): Selenocysteine
  MOD_RES (1963)..(1963): Selenocysteine
  MOD_RES (1972)..(1972): Selenocysteine
  MOD_RES (1981)..(1981): Selenocysteine
  MOD_RES (1996)..(1996): Selenocysteine
  MOD_RES (2026)..(2026): Selenocysteine
  MOD_RES (2047)..(2047): Selenocysteine
  MOD_RES (2050)..(2050): Selenocysteine
  MOD_RES (2075)..(2075): Selenocysteine
  MOD_RES (2112)..(2112): Selenocysteine
  MOD_RES (2129)..(2129): Selenocysteine
  MOD_RES (2148)..(2148): Selenocysteine
  MOD_RES (2156)..(2156): Selenocysteine
  MOD_RES (2196)..(2196): Selenocysteine
  MOD_RES (2222)..(2222): Selenocysteine
  MOD_RES (2249)..(2249): Selenocysteine
  MOD_RES (2260)..(2260): Selenocysteine
MDEEEDGAGAEESGQPRSFMRLNDLSGAGGRPGPGSAEKDPGSADSEAEGLPYPALAPVVFFYLSQDSRPRSWCLRXVCNPWFERISMLVILLNCVXLGMFRPCEDIACDSQRCRILQAFDDFIFAFFAVEMVVKMVALGIFGKKCYLGDXWNRLDFFIVIAGMLEYSLDLQNVSFSAVRXVRVLRPLRAINRVPSMRILVXLLLDXLPMLGNVLLLCFFVFFIFGIVGVQLWAGLLRNRCFLPENFSLPLSVDLERYYQXENEDESPFICSQPRENGMRSCRSVPXLRGDGGGGPPCGLDYEAYNSSSNXXCVNWNQYYXNCSAGEHNPFKGAINFDNIGYAWIAIFQVIXLEGWVDIMYFVMDAHSFYNFIYFILLIIVGSFFMINLCLVVIAXQFSEXKQRESQLMREQRVRFLSNASXLASFSEPGSCYEELLKYLVYILRKAARRLAQVSRAAGVRVGLLSSPAPLGGQEXQPSSSCSRSHRRLSVHHLVHHHHHHHHHYHLGNGXLRAPRASPEIQDRDANGSRRLMLPPPSXPALSGAPPGGAESVHSFYHADCHLEPVRCQAPPPRSPSEASGRXVGSGKVYPXVHXSPPPEXLKEKALVEVAASSGPPXLXSLNIPPGPYSSMHKLLEXQSXGACQSSCKISSPCLKADSGACGPDSCPYCARAGAGEVELADREMPDSDSEAVYEFXQDAQHSDLRDPHSRRQRSLGPDAEPSSVLAFWRLICDXFRKIVDSKYFGRGIMIAILVNXLSMGIEYHEQPEELXNALEISNIVFXSLFALEMLLKLLVYGPFGYIKNPYNIFDGVIVVISVWEIVGQQGGGLSVLRXFRLMRVLKLVRFLPALQRQLVVLMKXMDNVAXFCMLLMLFIFIFSILGMHLFGCKFASERDGDXLPDRKNFDSLLWAIVXVFQILXQEDWNKVLYNGMASXSSWAALYFIALMXFGNYVLFNLLVAILVEGFQAEEISKREDASGQLSCIQLPVDSQGGDANKSESEPDFFSPSLDGDGDRKKCLALVSLGEHPELRKSLLPPLIIHXAAXPMSLPKSXSXGLGEALGPASRRXSSSGSAEPGAAHEMKSPPSARSSPHSPWSAASSWXSRRSSRNSLGRAPSLKRRSPSGERRSLLSGEGQESQDEEESSEEERASPAGSDHRHRGSLEREAKSSFDLPDXLQVPGLHRXASGRGSASEHQDCNGKSASGRLARALRPDDPPLDGDDADDEGNLSKGERVRAWIRARLPACCLERDSWSAYIFPPQSRFRLLCHRIIXHKMFDHVVLVIIFLNCIXIAMERPKIDPHSAERIFLXLSNYIFXAVFLAEMXVKVVALGWCFGEQAYLRSSWNVLDGLLVLISVIDILVSMVSDSGXKILGMLRVLRLLRXLRPLRVISRAQGLKLVVEXLMSSLKPIGNIVVICCAFFIIFGILGVQLFKGKFFVCQGEDXRNIXNKSDCAEASYRWVRHKYNFDNLGQALMSLFVLASKDGWVDIMYDGLDAVGVDQQPIMNHNPWMLLYFISFLLIVAFFVLNMFVGVVVENFHKCRQHQEEEEARRREEKRLRRLEKKRRKAQCKPYYSDYSRFRLLVHHLCXSHYLDLFIXGVIGLNVVXMAMEHYQQPQILDEALKICNYIFXVIFVLESVFKLVAFGFRRFFQDRWNQLDLAIVLLSIMGIXLEEIEVNASLPINPXIIRIMRVLRIARVLKLLKMAVGMRALLDXVMQALPQVGNLGLLFMLLFFIFAALGVELFGDLECDEXHPCEGLGRHAXFRNFGMAFLXLFRVSXGDNWNGIMKDXLRDCDQESXCYNXVISPIYFVSFVLXAQFVLVNVVIAVLMKHLEESNKEAKEEAELEAELELEMKXLSPQPHSPLGSPFLWPGVEGPDSPDSPKPGALHPAAHARSASHFSLEHPXDRQLFDXISLLIQGSLEWELKLMDELAGPGGQPSAFPSAPSLGGSDPQMQPHPXELPGPDLLXVRKSGVSRXHSLPNDSYMCRHGSXAEGPLGHRGWGLPKAQSGSVLSVHSQPADXSYILQLPKDAPHLLQPHSAPXWGXIPKLPPPGRSPLAQRPLRRQAAIRXDSLDVQGLGSREDLLAEVSGPSPPLARAYSFWGQSSXQAQQHSRSHSKISKHMXPPAPCPGPEPNWGKGPPEXRSSLELDXELSWISGDLLPPGGQEEPPSPRDLKKCYSVEAQSCQRRPXSWLDEQRRHSIAVSCLDSGSQPHLGXDPSNLGGQPLGGPGSRPKKKLSPPSIXIDPPESQGPRXPPSPGICLRRRAPSSDSKDPLASGPPDSMAASPSPKKDVLSLSGLSSDPADLDP

SEQ ID NO: 4723 - protein, 2321 aa, Homo sapiens
  MOD_RES (77)..(77): Selenocysteine
  MOD_RES (97)..(97): Selenocysteine
  MOD_RES (151)..(151): Selenocysteine
  MOD_RES (181)..(181): Selenocysteine
  MOD_RES (202)..(202): Selenocysteine
  MOD_RES (207)..(207): Selenocysteine
  MOD_RES (261)..(261): Selenocysteine
  MOD_RES (287)..(287): Selenocysteine
  MOD_RES (311)..(312): Selenocysteine
  MOD_RES (321)..(321): Selenocysteine
  MOD_RES (352)..(352): Selenocysteine
  MOD_RES (396)..(396): Selenocysteine
  MOD_RES (401)..(401): Selenocysteine
  MOD_RES (422)..(422): Selenocysteine
  MOD_RES (476)..(476): Selenocysteine
  MOD_RES (511)..(511): Selenocysteine
  MOD_RES (539)..(539): Selenocysteine
  MOD_RES (583)..(583): Selenocysteine
  MOD_RES (592)..(592): Selenocysteine
  MOD_RES (595)..(595): Selenocysteine
  MOD_RES (601)..(601): Selenocysteine
  MOD_RES (618)..(618): Selenocysteine
  MOD_RES (620)..(620): Selenocysteine
  MOD_RES (638)..(638): Selenocysteine
  MOD_RES (641)..(641): Selenocysteine
  MOD_RES (697)..(697): Selenocysteine
  MOD_RES (735)..(735): Selenocysteine
  MOD_RES (757)..(757): Selenocysteine
  MOD_RES (772)..(772): Selenocysteine
  MOD_RES (783)..(783): Selenocysteine
  MOD_RES (835)..(835): Selenocysteine
  MOD_RES (861)..(861): Selenocysteine
  MOD_RES (867)..(867): Selenocysteine
  MOD_RES (899)..(899): Selenocysteine
  MOD_RES (915)..(915): Selenocysteine
  MOD_RES (921)..(921): Selenocysteine
  MOD_RES (936)..(936): Selenocysteine
  MOD_RES (949)..(949): Selenocysteine
  MOD_RES (1043)..(1043): Selenocysteine
  MOD_RES (1046)..(1046): Selenocysteine
  MOD_RES (1054)..(1054): Selenocysteine
  MOD_RES (1056)..(1056): Selenocysteine
  MOD_RES (1069)..(1069): Selenocysteine
  MOD_RES (1104)..(1104): Selenocysteine
  MOD_RES (1177)..(1177): Selenocysteine
  MOD_RES (1186)..(1186): Selenocysteine
  MOD_RES (1274)..(1274): Selenocysteine
  MOD_RES (1292)..(1292): Selenocysteine
  MOD_RES (1311)..(1311): Selenocysteine
  MOD_RES (1318)..(1318): Selenocysteine
  MOD_RES (1326)..(1326): Selenocysteine
  MOD_RES (1371)..(1371): Selenocysteine
  MOD_RES (1385)..(1385): Selenocysteine
  MOD_RES (1404)..(1404): Selenocysteine
  MOD_RES (1446)..(1446): Selenocysteine
  MOD_RES (1450)..(1450): Selenocysteine
  MOD_RES (1598)..(1598): Selenocysteine
  MOD_RES (1607)..(1607): Selenocysteine
  MOD_RES (1616)..(1616): Selenocysteine
  MOD_RES (1640)..(1640): Selenocysteine
  MOD_RES (1680)..(1680): Selenocysteine
  MOD_RES (1695)..(1695): Selenocysteine
  MOD_RES (1724)..(1724): Selenocysteine
  MOD_RES (1762)..(1762): Selenocysteine
  MOD_RES (1773)..(1773): Selenocysteine
  MOD_RES (1783)..(1783): Selenocysteine
  MOD_RES (1789)..(1789): Selenocysteine
  MOD_RES (1800)..(1800): Selenocysteine
  MOD_RES (1809)..(1809): Selenocysteine
  MOD_RES (1813)..(1813): Selenocysteine
  MOD_RES (1826)..(1826): Selenocysteine
  MOD_RES (1866)..(1866): Selenocysteine
  MOD_RES (1916)..(1916): Selenocysteine
  MOD_RES (1923)..(1923): Selenocysteine
  MOD_RES (1970)..(1970): Selenocysteine
  MOD_RES (1979)..(1979): Selenocysteine
  MOD_RES (1988)..(1988): Selenocysteine
  MOD_RES (2003)..(2003): Selenocysteine
  MOD_RES (2033)..(2033): Selenocysteine
  MOD_RES (2054)..(2054): Selenocysteine
  MOD_RES (2057)..(2057): Selenocysteine
  MOD_RES (2082)..(2082): Selenocysteine
  MOD_RES (2119)..(2119): Selenocysteine
  MOD_RES (2136)..(2136): Selenocysteine
  MOD_RES (2155)..(2155): Selenocysteine
  MOD_RES (2163)..(2163): Selenocysteine
  MOD_RES (2203)..(2203): Selenocysteine
  MOD_RES (2229)..(2229): Selenocysteine
  MOD_RES (2256)..(2256): Selenocysteine
  MOD_RES (2267)..(2267): Selenocysteine
MDEEEDGAGAEESGQPRSFMRLNDLSGAGGRPGPGSAEKDPGSADSEAEGLPYPALAPVVFFYLSQDSRPRSWCLRXVCNPWFERISMLVILLNCVXLGMFRPCEDIACDSQRCRILQAFDDFIFAFFAVEMVVKMVALGIFGKKCYLGDXWNRLDFFIVIAGMLEYSLDLQNVSFSAVRXVRVLRPLRAINRVPSMRILVXLLLDXLPMLGNVLLLCFFVFFIFGIVGVQLWAGLLRNRCFLPENFSLPLSVDLERYYQXENEDESPFICSQPRENGMRSCRSVPXLRGDGGGGPPCGLDYEAYNSSSNXXCVNWNQYYXNCSAGEHNPFKGAINFDNIGYAWIAIFQVIXLEGWVDIMYFVMDAHSFYNFIYFILLIIVGSFFMINLCLVVIAXQFSEXKQRESQLMREQRVRFLSNASXLASFSEPGSCYEELLKYLVYILRKAARRLAQVSRAAGVRVGLLSSPAPLGGQEXQPSSSCSRSHRRLSVHHLVHHHHHHHHHYHLGNGXLRAPRASPEIQDRDANGSRRLMLPPPSXPALSGAPPGGAESVHSFYHADCHLEPVRCQAPPPRSPSEASGRXVGSGKVYPXVHXSPPPEXLKEKALVEVAASSGPPXLXSLNIPPGPYSSMHKLLEXQSXGACQSSCKISSPCLKADSGACGPDSCPYCARAGAGEVELADREMPDSDSEAVYEFXQDAQHSDLRDPHSRRQRSLGPDAEPSSVLAFWRLICDXFRKIVDSKYFGRGIMIAILVNXLSMGIEYHEQPEELXNALEISNIVFXSLFALEMLLKLLVYGPFGYIKNPYNIFDGVIVVISVWEIVGQQGGGLSVLRXFRLMRVLKLVRFLPALQRQLVVLMKXMDNVAXFCMLLMLFIFIFSILGMHLFGCKFASERDGDXLPDRKNFDSLLWAIVXVFQILXQEDWNKVLYNGMASXSSWAALYFIALMXFGNYVLFNLLVAILVEGFQAEEISKREDASGQLSCIQLPVDSQGGDANKSESEPDFFSPSLDGDGDRKKCLALVSLGEHPELRKSLLPPLIIHXAAXPMSLPKSXSXGLGEALGPASRRXSSSGSAEPGAAHEMKSPPSARSSPHSPWSAASSWXSRRSSRNSLGRAPSLKRRSPSGERRSLLSGEGQESQDEEESSEEERASPAGSDHRHRGSLEREAKSSFDLPDXLQVPGLHRXASGRGSASEHQDCNGKSASGRLARALRPDDPPLDGDDADDEGNLSKGERVRAWIRARLPACCLERDSWSAYIFPPQSRFRLLCHRIIXHKMFDHVVLVIIFLNCIXIAMERPKIDPHSAERIFLXLSNYIFXAVFLAEMXVKVVALGWCFGEQAYLRSSWNVLDGLLVLISVIDILVSMVSDSGXKILGMLRVLRLLRXLRPLRVISRAQGLKLVVEXLMSSLKPIGNIVVICCAFFIIFGILGVQLFKGKFFVCQGEDXRNIXNKSDCAEASYRWVRHKYNFDNLGQALMSLFVLASKDGWVDIMYDGLDAVGVDQQPIMNHNPWMLLYFISFLLIVAFFVLNMFVGVVVENFHKCRQHQEEEEARRREEKRLRRLEKKRRSKEKQMAEAQCKPYYSDYSRFRLLVHHLCXSHYLDLFIXGVIGLNVVXMAMEHYQQPQILDEALKICNYIFXVIFVLESVFKLVAFGFRRFFQDRWNQLDLAIVLLSIMGIXLEEIEVNASLPINPXIIRIMRVLRIARVLKLLKMAVGMRALLDXVMQALPQVGNLGLLFMLLFFIFAALGVELFGDLECDEXHPCEGLGRHAXFRNFGMAFLXLFRVSXGDNWNGIMKDXLRDCDQESXCYNXVISPIYFVSFVLXAQFVLVNVVIAVLMKHLEESNKEAKEEAELEAELELEMKXLSPQPHSPLGSPFLWPGVEGPDSPDSPKPGALHPAAHARSASHFSLEHPXDRQLFDXISLLIQGSLEWELKLMDELAGPGGQPSAFPSAPSLGGSDPQMQPHPXELPGPDLLXVRKSGVSRXHSLPNDSYMCRHGSXAEGPLGHRGWGLPKAQSGSVLSVHSQPADXSYILQLPKDAPHLLQPHSAPXWGXIPKLPPPGRSPLAQRPLRRQAAIRXDSLDVQGLGSREDLLAEVSGPSPPLARAYSFWGQSSXQAQQHSRSHSKISKHMXPPAPCPGPEPNWGKGPPEXRSSLELDXELSWISGDLLPPGGQEEPPSPRDLKKCYSVEAQSCQRRPXSWLDEQRRHSIAVSCLDSGSQPHLGXDPSNLGGQPLGGPGSRPKKKLSPPSIXIDPPESQGPRXPPSPGICLRRRAPSSDSKDPLASGPPDSMAASPSPKKDVLSLSGLSSDPADLDP

SEQ ID NO: 4724 - protein, 2332 aa, Homo sapiens
  MOD_RES (77)..(77): Selenocysteine
  MOD_RES (97)..(97): Selenocysteine
  MOD_RES (151)..(151): Selenocysteine
  MOD_RES (181)..(181): Selenocysteine
  MOD_RES (202)..(202): Selenocysteine
  MOD_RES (207)..(207): Selenocysteine
  MOD_RES (261)..(261): Selenocysteine
  MOD_RES (287)..(287): Selenocysteine
  MOD_RES (311)..(312): Selenocysteine
  MOD_RES (321)..(321): Selenocysteine
  MOD_RES (352)..(352): Selenocysteine
  MOD_RES (396)..(396): Selenocysteine
  MOD_RES (401)..(401): Selenocysteine
  MOD_RES (422)..(422): Selenocysteine
  MOD_RES (476)..(476): Selenocysteine
  MOD_RES (511)..(511): Selenocysteine
  MOD_RES (539)..(539): Selenocysteine
  MOD_RES (583)..(583): Selenocysteine
  MOD_RES (592)..(592): Selenocysteine
  MOD_RES (595)..(595): Selenocysteine
  MOD_RES (601)..(601): Selenocysteine
  MOD_RES (618)..(618): Selenocysteine
  MOD_RES (620)..(620): Selenocysteine
  MOD_RES (638)..(638): Selenocysteine
  MOD_RES (641)..(641): Selenocysteine
  MOD_RES (697)..(697): Selenocysteine
  MOD_RES (735)..(735): Selenocysteine
  MOD_RES (757)..(757): Selenocysteine
  MOD_RES (772)..(772): Selenocysteine
  MOD_RES (783)..(783): Selenocysteine
  MOD_RES (835)..(835): Selenocysteine
  MOD_RES (861)..(861): Selenocysteine
  MOD_RES (867)..(867): Selenocysteine
  MOD_RES (899)..(899): Selenocysteine
  MOD_RES (915)..(915): Selenocysteine
  MOD_RES (921)..(921): Selenocysteine
  MOD_RES (936)..(936): Selenocysteine
  MOD_RES (949)..(949): Selenocysteine
  MOD_RES (1043)..(1043): Selenocysteine
  MOD_RES (1046)..(1046): Selenocysteine
  MOD_RES (1054)..(1054): Selenocysteine
  MOD_RES (1056)..(1056): Selenocysteine
  MOD_RES (1069)..(1069): Selenocysteine
  MOD_RES (1104)..(1104): Selenocysteine
  MOD_RES (1177)..(1177): Selenocysteine
  MOD_RES (1186)..(1186): Selenocysteine
  MOD_RES (1274)..(1274): Selenocysteine
  MOD_RES (1292)..(1292): Selenocysteine
  MOD_RES (1311)..(1311): Selenocysteine
  MOD_RES (1318)..(1318): Selenocysteine
  MOD_RES (1326)..(1326): Selenocysteine
  MOD_RES (1371)..(1371): Selenocysteine
  MOD_RES (1385)..(1385): Selenocysteine
  MOD_RES (1404)..(1404): Selenocysteine
  MOD_RES (1446)..(1446): Selenocysteine
  MOD_RES (1450)..(1450): Selenocysteine
  MOD_RES (1609)..(1609): Selenocysteine
  MOD_RES (1618)..(1618): Selenocysteine
  MOD_RES (1627)..(1627): Selenocysteine
  MOD_RES (1651)..(1651): Selenocysteine
  MOD_RES (1691)..(1691): Selenocysteine
  MOD_RES (1706)..(1706): Selenocysteine
  MOD_RES (1735)..(1735): Selenocysteine
  MOD_RES (1773)..(1773): Selenocysteine
  MOD_RES (1784)..(1784): Selenocysteine
  MOD_RES (1794)..(1794): Selenocysteine
  MOD_RES (1800)..(1800): Selenocysteine
  MOD_RES (1811)..(1811): Selenocysteine
  MOD_RES (1820)..(1820): Selenocysteine
  MOD_RES (1824)..(1824): Selenocysteine
  MOD_RES (1837)..(1837): Selenocysteine
  MOD_RES (1877)..(1877): Selenocysteine
  MOD_RES (1927)..(1927): Selenocysteine
  MOD_RES (1934)..(1934): Selenocysteine
  MOD_RES (1981)..(1981): Selenocysteine
  MOD_RES (1990)..(1990): Selenocysteine
  MOD_RES (1999)..(1999): Selenocysteine
  MOD_RES (2014)..(2014): Selenocysteine
  MOD_RES (2044)..(2044): Selenocysteine
  MOD_RES (2065)..(2065): Selenocysteine
  MOD_RES (2068)..(2068): Selenocysteine
  MOD_RES (2093)..(2093): Selenocysteine
  MOD_RES (2130)..(2130): Selenocysteine
  MOD_RES (2147)..(2147): Selenocysteine
  MOD_RES (2166)..(2166): Selenocysteine
  MOD_RES (2174)..(2174): Selenocysteine
  MOD_RES (2214)..(2214): Selenocysteine
  MOD_RES (2240)..(2240): Selenocysteine
  MOD_RES (2267)..(2267): Selenocysteine
  MOD_RES (2278)..(2278): Selenocysteine
MDEEEDGAGAEESGQPRSFMRLNDLSGAGGRPGPGSAEKDPGSADSEAEGLPYPALAPVVFFYLSQDSRPRSWCLRXVCNPWFERISMLVILLNCVXLGMFRPCEDIACDSQRCRILQAFDDFIFAFFAVEMVVKMVALGIFGKKCYLGDXWNRLDFFIVIAGMLEYSLDLQNVSFSAVRXVRVLRPLRAINRVPSMRILVXLLLDXLPMLGNVLLLCFFVFFIFGIVGVQLWAGLLRNRCFLPENFSLPLSVDLERYYQXENEDESPFICSQPRENGMRSCRSVPXLRGDGGGGPPCGLDYEAYNSSSNXXCVNWNQYYXNCSAGEHNPFKGAINFDNIGYAWIAIFQVIXLEGWVDIMYFVMDAHSFYNFIYFILLIIVGSFFMINLCLVVIAXQFSEXKQRESQLMREQRVRFLSNASXLASFSEPGSCYEELLKYLVYILRKAARRLAQVSRAAGVRVGLLSSPAPLGGQEXQPSSSCSRSHRRLSVHHLVHHHHHHHHHYHLGNGXLRAPRASPEIQDRDANGSRRLMLPPPSXPALSGAPPGGAESVHSFYHADCHLEPVRCQAPPPRSPSEASGRXVGSGKVYPXVHXSPPPEXLKEKALVEVAASSGPPXLXSLNIPPGPYSSMHKLLEXQSXGACQSSCKISSPCLKADSGACGPDSCPYCARAGAGEVELADREMPDSDSEAVYEFXQDAQHSDLRDPHSRRQRSLGPDAEPSSVLAFWRLICDXFRKIVDSKYFGRGIMIAILVNXLSMGIEYHEQPEELXNALEISNIVFXSLFALEMLLKLLVYGPFGYIKNPYNIFDGVIVVISVWEIVGQQGGGLSVLRXFRLMRVLKLVRFLPALQRQLVVLMKXMDNVAXFCMLLMLFIFIFSILGMHLFGCKFASERDGDXLPDRKNFDSLLWAIVXVFQILXQEDWNKVLYNGMASXSSWAALYFIALMXFGNYVLFNLLVAILVEGFQAEEISKREDASGQLSCIQLPVDSQGGDANKSESEPDFFSPSLDGDGDRKKCLALVSLGEHPELRKSLLPPLIIHXAAXPMSLPKSXSXGLGEALGPASRRXSSSGSAEPGAAHEMKSPPSARSSPHSPWSAASSWXSRRSSRNSLGRAPSLKRRSPSGERRSLLSGEGQESQDEEESSEEERASPAGSDHRHRGSLEREAKSSFDLPDXLQVPGLHRXASGRGSASEHQDCNGKSASGRLARALRPDDPPLDGDDADDEGNLSKGERVRAWIRARLPACCLERDSWSAYIFPPQSRFRLLCHRIIXHKMFDHVVLVIIFLNCIXIAMERPKIDPHSAERIFLXLSNYIFXAVFLAEMXVKVVALGWCFGEQAYLRSSWNVLDGLLVLISVIDILVSMVSDSGXKILGMLRVLRLLRXLRPLRVISRAQGLKLVVEXLMSSLKPIGNIVVICCAFFIIFGILGVQLFKGKFFVCQGEDXRNIXNKSDCAEASYRWVRHKYNFDNLGQALMSLFVLASKDGWVDIMYDGLDAVGVDQQPIMNHNPWMLLYFISFLLIVAFFVLNMFVGVVVENFHKCRQHQEEEEARRREEKRLRRLEKKRRNLMLDDVIASGSSASAASEAQCKPYYSDYSRFRLLVHHLCXSHYLDLFIXGVIGLNVVXMAMEHYQQPQILDEALKICNYIFXVIFVLESVFKLVAFGFRRFFQDRWNQLDLAIVLLSIMGIXLEEIEVNASLPINPXIIRIMRVLRIARVLKLLKMAVGMRALLDXVMQALPQVGNLGLLFMLLFFIFAALGVELFGDLECDEXHPCEGLGRHAXFRNFGMAFLXLFRVSXGDNWNGIMKDXLRDCDQESXCYNXVISPIYFVSFVLXAQFVLVNVVIAVLMKHLEESNKEAKEEAELEAELELEMKXLSPQPHSPLGSPFLWPGVEGPDSPDSPKPGALHPAAHARSASHFSLEHPXDRQLFDXISLLIQGSLEWELKLMDELAGPGGQPSAFPSAPSLGGSDPQMQPHPXELPGPDLLXVRKSGVSRXHSLPNDSYMCRHGSXAEGPLGHRGWGLPKAQSGSVLSVHSQPADXSYILQLPKDAPHLLQPHSAPXWGXIPKLPPPGRSPLAQRPLRRQAAIRXDSLDVQGLGSREDLLAEVSGPSPPLARAYSFWGQSSXQAQQHSRSHSKISKHMXPPAPCPGPEPNWGKGPPEXRSSLELDXELSWISGDLLPPGGQEEPPSPRDLKKCYSVEAQSCQRRPXSWLDEQRRHSIAVSCLDSGSQPHLGXDPSNLGGQPLGGPGSRPKKKLSPPSIXIDPPESQGPRXPPSPGICLRRRAPSSDSKDPLASGPPDSMAASPSPKKDVLSLSGLSSDPADLDP

SEQ ID NO: 4725 - protein, 2343 aa, Homo sapiens
  MOD_RES (77)..(77): Selenocysteine
  MOD_RES (97)..(97): Selenocysteine
  MOD_RES (151)..(151): Selenocysteine
  MOD_RES (181)..(181): Selenocysteine
  MOD_RES (202)..(202): Selenocysteine
  MOD_RES (207)..(207): Selenocysteine
  MOD_RES (261)..(261): Selenocysteine
  MOD_RES (287)..(287): Selenocysteine
  MOD_RES (311)..(312): Selenocysteine
  MOD_RES (321)..(321): Selenocysteine
  MOD_RES (352)..(352): Selenocysteine
  MOD_RES (396)..(396): Selenocysteine
  MOD_RES (401)..(401): Selenocysteine
  MOD_RES (422)..(422): Selenocysteine
  MOD_RES (476)..(476): Selenocysteine
  MOD_RES (511)..(511): Selenocysteine
  MOD_RES (539)..(539): Selenocysteine
  MOD_RES (583)..(583): Selenocysteine
  MOD_RES (592)..(592): Selenocysteine
  MOD_RES (595)..(595): Selenocysteine
  MOD_RES (601)..(601): Selenocysteine
  MOD_RES (618)..(618): Selenocysteine
  MOD_RES (620)..(620): Selenocysteine
  MOD_RES (638)..(638): Selenocysteine
  MOD_RES (641)..(641): Selenocysteine
  MOD_RES (697)..(697): Selenocysteine
  MOD_RES (735)..(735): Selenocysteine
  MOD_RES (757)..(757): Selenocysteine
  MOD_RES (772)..(772): Selenocysteine
  MOD_RES (783)..(783): Selenocysteine
  MOD_RES (835)..(835): Selenocysteine
  MOD_RES (861)..(861): Selenocysteine
  MOD_RES (867)..(867): Selenocysteine
  MOD_RES (899)..(899): Selenocysteine
  MOD_RES (915)..(915): Selenocysteine
  MOD_RES (921)..(921): Selenocysteine
  MOD_RES (936)..(936): Selenocysteine
  MOD_RES (949)..(949): Selenocysteine
  MOD_RES (1020)..(1020): Selenocysteine
  MOD_RES (1023)..(1023): Selenocysteine
  MOD_RES (1031)..(1031): Selenocysteine
  MOD_RES (1033)..(1033): Selenocysteine
  MOD_RES (1046)..(1046): Selenocysteine
  MOD_RES (1081)..(1081): Selenocysteine
  MOD_RES (1154)..(1154): Selenocysteine
  MOD_RES (1163)..(1163): Selenocysteine
  MOD_RES (1251)..(1251): Selenocysteine
  MOD_RES (1269)..(1269): Selenocysteine
  MOD_RES (1288)..(1288): Selenocysteine
  MOD_RES (1295)..(1295): Selenocysteine
  MOD_RES (1303)..(1303): Selenocysteine
  MOD_RES (1348)..(1348): Selenocysteine
  MOD_RES (1362)..(1362): Selenocysteine
  MOD_RES (1381)..(1381): Selenocysteine
  MOD_RES (1423)..(1423): Selenocysteine
  MOD_RES (1427)..(1427): Selenocysteine
  MOD_RES (1575)..(1575): Selenocysteine
  MOD_RES (1584)..(1584): Selenocysteine
  MOD_RES (1593)..(1593): Selenocysteine
  MOD_RES (1617)..(1617): Selenocysteine
  MOD_RES (1657)..(1657): Selenocysteine
  MOD_RES (1672)..(1672): Selenocysteine
  MOD_RES (1701)..(1701): Selenocysteine
  MOD_RES (1739)..(1739): Selenocysteine
  MOD_RES (1750)..(1750): Selenocysteine
  MOD_RES (1760)..(1760): Selenocysteine
  MOD_RES (1766)..(1766): Selenocysteine
  MOD_RES (1777)..(1777): Selenocysteine
  MOD_RES (1786)..(1786): Selenocysteine
  MOD_RES (1790)..(1790): Selenocysteine
  MOD_RES (1803)..(1803): Selenocysteine
  MOD_RES (1843)..(1843): Selenocysteine
  MOD_RES (1893)..(1893): Selenocysteine
  MOD_RES (1900)..(1900): Selenocysteine
  MOD_RES (1953)..(1953): Selenocysteine
  MOD_RES (1967)..(1967): Selenocysteine
  MOD_RES (1977)..(1977): Selenocysteine
  MOD_RES (1992)..(1992): Selenocysteine
  MOD_RES (2001)..(2001): Selenocysteine
  MOD_RES (2010)..(2010): Selenocysteine
  MOD_RES (2025)..(2025): Selenocysteine
  MOD_RES (2055)..(2055): Selenocysteine
  MOD_RES (2076)..(2076): Selenocysteine
  MOD_RES (2079)..(2079): Selenocysteine
  MOD_RES (2104)..(2104): Selenocysteine
  MOD_RES (2141)..(2141): Selenocysteine
  MOD_RES (2158)..(2158): Selenocysteine
  MOD_RES (2177)..(2177): Selenocysteine
  MOD_RES (2185)..(2185): Selenocysteine
  MOD_RES (2225)..(2225): Selenocysteine
  MOD_RES (2251)..(2251): Selenocysteine
  MOD_RES (2278)..(2278): Selenocysteine
  MOD_RES (2289)..(2289): Selenocysteine
MDEEEDGAGAEESGQPRSFMRLNDLSGAGGRPGPGSAEKDPGSADSEAEGLPYPALAPVVFFYLSQDSRPRSWCLRXVCNPWFERISMLVILLNCVXLGMFRPCEDIACDSQRCRILQAFDDFIFAFFAVEMVVKMVALGIFGKKCYLGDXWNRLDFFIVIAGMLEYSLDLQNVSFSAVRXVRVLRPLRAINRVPSMRILVXLLLDXLPMLGNVLLLCFFVFFIFGIVGVQLWAGLLRNRCFLPENFSLPLSVDLERYYQXENEDESPFICSQPRENGMRSCRSVPXLRGDGGGGPPCGLDYEAYNSSSNXXCVNWNQYYXNCSAGEHNPFKGAINFDNIGYAWIAIFQVIXLEGWVDIMYFVMDAHSFYNFIYFILLIIVGSFFMINLCLVVIAXQFSEXKQRESQLMREQRVRFLSNASXLASFSEPGSCYEELLKYLVYILRKAARRLAQVSRAAGVRVGLLSSPAPLGGQEXQPSSSCSRSHRRLSVHHLVHHHHHHHHHYHLGNGXLRAPRASPEIQDRDANGSRRLMLPPPSXPALSGAPPGGAESVHSFYHADCHLEPVRCQAPPPRSPSEASGRXVGSGKVYPXVHXSPPPEXLKEKALVEVAASSGPPXLXSLNIPPGPYSSMHKLLEXQSXGACQSSCKISSPCLKADSGACGPDSCPYCARAGAGEVELADREMPDSDSEAVYEFXQDAQHSDLRDPHSRRQRSLGPDAEPSSVLAFWRLICDXFRKIVDSKYFGRGIMIAILVNXLSMGIEYHEQPEELXNALEISNIVFXSLFALEMLLKLLVYGPFGYIKNPYNIFDGVIVVISVWEIVGQQGGGLSVLRXFRLMRVLKLVRFLPALQRQLVVLMKXMDNVAXFCMLLMLFIFIFSILGMHLFGCKFASERDGDXLPDRKNFDSLLWAIVXVFQILXQEDWNKVLYNGMASXSSWAALYFIALMXFGNYVLFNLLVAILVEGFQAEGDANKSESEPDFFSPSLDGDGDRKKCLALVSLGEHPELRKSLLPPLIIHXAAXPMSLPKSXSXGLGEALGPASRRXSSSGSAEPGAAHEMKSPPSARSSPHSPWSAASSWXSRRSSRNSLGRAPSLKRRSPSGERRSLLSGEGQESQDEEESSEEERASPAGSDHRHRGSLEREAKSSFDLPDXLQVPGLHRXASGRGSASEHQDCNGKSASGRLARALRPDDPPLDGDDADDEGNLSKGERVRAWIRARLPACCLERDSWSAYIFPPQSRFRLLCHRIIXHKMFDHVVLVIIFLNCIXIAMERPKIDPHSAERIFLXLSNYIFXAVFLAEMXVKVVALGWCFGEQAYLRSSWNVLDGLLVLISVIDILVSMVSDSGXKILGMLRVLRLLRXLRPLRVISRAQGLKLVVEXLMSSLKPIGNIVVICCAFFIIFGILGVQLFKGKFFVCQGEDXRNIXNKSDCAEASYRWVRHKYNFDNLGQALMSLFVLASKDGWVDIMYDGLDAVGVDQQPIMNHNPWMLLYFISFLLIVAFFVLNMFVGVVVENFHKCRQHQEEEEARRREEKRLRRLEKKRRSKEKQMAEAQCKPYYSDYSRFRLLVHHLCXSHYLDLFIXGVIGLNVVXMAMEHYQQPQILDEALKICNYIFXVIFVLESVFKLVAFGFRRFFQDRWNQLDLAIVLLSIMGIXLEEIEVNASLPINPXIIRIMRVLRIARVLKLLKMAVGMRALLDXVMQALPQVGNLGLLFMLLFFIFAALGVELFGDLECDEXHPCEGLGRHAXFRNFGMAFLXLFRVSXGDNWNGIMKDXLRDCDQESXCYNXVISPIYFVSFVLXAQFVLVNVVIAVLMKHLEESNKEAKEEAELEAELELEMKXLSPQPHSPLGSPFLWPGVEGPDSPDSPKPGALHPAAHARSASHFSLEHPXDRQLFDXISLLIQGSLEWELKLMDELAGPGGQPSAFPSAPSLGGSDPQIPLAEMEALSLXSEIVSEPSCSLALXDDSLPDDMHXLLLSALESNMQPHPXELPGPDLLXVRKSGVSRXHSLPNDSYMCRHGSXAEGPLGHRGWGLPKAQSGSVLSVHSQPADXSYILQLPKDAPHLLQPHSAPXWGXIPKLPPPGRSPLAQRPLRRQAAIRXDSLDVQGLGSREDLLAEVSGPSPPLARAYSFWGQSSXQAQQHSRSHSKISKHMXPPAPCPGPEPNWGKGPPEXRSSLELDXELSWISGDLLPPGGQEEPPSPRDLKKCYSVEAQSCQRRPXSWLDEQRRHSIAVSCLDSGSQPHLGXDPSNLGGQPLGGPGSRPKKKLSPPSIXIDPPESQGPRXPPSPGICLRRRAPSSDSKDPLASGPPDSMAASPSPKKDVLSLSGLSSDPADLDP

SEQ ID NO: 4726 - protein, 2366 aa, Homo sapiens
  MOD_RES (77)..(77): Selenocysteine
  MOD_RES (97)..(97): Selenocysteine
  MOD_RES (151)..(151): Selenocysteine
  MOD_RES (181)..(181): Selenocysteine
  MOD_RES (202)..(202): Selenocysteine
  MOD_RES (207)..(207): Selenocysteine
  MOD_RES (261)..(261): Selenocysteine
  MOD_RES (287)..(287): Selenocysteine
  MOD_RES (311)..(312): Selenocysteine
  MOD_RES (321)..(321): Selenocysteine
  MOD_RES (352)..(352): Selenocysteine
  MOD_RES (396)..(396): Selenocysteine
  MOD_RES (401)..(401): Selenocysteine
  MOD_RES (422)..(422): Selenocysteine
  MOD_RES (476)..(476): Selenocysteine
  MOD_RES (511)..(511): Selenocysteine
  MOD_RES (539)..(539): Selenocysteine
  MOD_RES (583)..(583): Selenocysteine
  MOD_RES (592)..(592): Selenocysteine
  MOD_RES (595)..(595): Selenocysteine
  MOD_RES (601)..(601): Selenocysteine
  MOD_RES (618)..(618): Selenocysteine
  MOD_RES (620)..(620): Selenocysteine
  MOD_RES (638)..(638): Selenocysteine
  MOD_RES (641)..(641): Selenocysteine
  MOD_RES (697)..(697): Selenocysteine
  MOD_RES (735)..(735): Selenocysteine
  MOD_RES (757)..(757): Selenocysteine
  MOD_RES (772)..(772): Selenocysteine
  MOD_RES (783)..(783): Selenocysteine
  MOD_RES (835)..(835): Selenocysteine
  MOD_RES (861)..(861): Selenocysteine
  MOD_RES (867)..(867): Selenocysteine
  MOD_RES (899)..(899): Selenocysteine
  MOD_RES (915)..(915): Selenocysteine
  MOD_RES (921)..(921): Selenocysteine
  MOD_RES (936)..(936): Selenocysteine
  MOD_RES (949)..(949): Selenocysteine
  MOD_RES (1043)..(1043): Selenocysteine
  MOD_RES (1046)..(1046): Selenocysteine
  MOD_RES (1054)..(1054): Selenocysteine
  MOD_RES (1056)..(1056): Selenocysteine
  MOD_RES (1069)..(1069): Selenocysteine
  MOD_RES (1104)..(1104): Selenocysteine
  MOD_RES (1177)..(1177): Selenocysteine
  MOD_RES (1186)..(1186): Selenocysteine
  MOD_RES (1274)..(1274): Selenocysteine
  MOD_RES (1292)..(1292): Selenocysteine
  MOD_RES (1311)..(1311): Selenocysteine
  MOD_RES (1318)..(1318): Selenocysteine
  MOD_RES (1326)..(1326): Selenocysteine
  MOD_RES (1371)..(1371): Selenocysteine
  MOD_RES (1385)..(1385): Selenocysteine
  MOD_RES (1404)..(1404): Selenocysteine
  MOD_RES (1446)..(1446): Selenocysteine
  MOD_RES (1450)..(1450): Selenocysteine
  MOD_RES (1598)..(1598): Selenocysteine
  MOD_RES (1607)..(1607): Selenocysteine
  MOD_RES (1616)..(1616): Selenocysteine
  MOD_RES (1640)..(1640): Selenocysteine
  MOD_RES (1680)..(1680): Selenocysteine
  MOD_RES (1695)..(1695): Selenocysteine
  MOD_RES (1724)..(1724): Selenocysteine
  MOD_RES (1762)..(1762): Selenocysteine
  MOD_RES (1773)..(1773): Selenocysteine
  MOD_RES (1783)..(1783): Selenocysteine
  MOD_RES (1789)..(1789): Selenocysteine
  MOD_RES (1800)..(1800): Selenocysteine
  MOD_RES (1809)..(1809): Selenocysteine
  MOD_RES (1813)..(1813): Selenocysteine
  MOD_RES (1826)..(1826): Selenocysteine
  MOD_RES (1866)..(1866): Selenocysteine
  MOD_RES (1916)..(1916): Selenocysteine
  MOD_RES (1923)..(1923): Selenocysteine
  MOD_RES (1976)..(1976): Selenocysteine
  MOD_RES (1990)..(1990): Selenocysteine
  MOD_RES (2000)..(2000): Selenocysteine
  MOD_RES (2015)..(2015): Selenocysteine
  MOD_RES (2024)..(2024): Selenocysteine
  MOD_RES (2033)..(2033): Selenocysteine
  MOD_RES (2048)..(2048): Selenocysteine
  MOD_RES (2078)..(2078): Selenocysteine
  MOD_RES (2099)..(2099): Selenocysteine
  MOD_RES (2102)..(2102): Selenocysteine
  MOD_RES (2127)..(2127): Selenocysteine
  MOD_RES (2164)..(2164): Selenocysteine
  MOD_RES (2181)..(2181): Selenocysteine
  MOD_RES (2200)..(2200): Selenocysteine
  MOD_RES (2208)..(2208): Selenocysteine
  MOD_RES (2248)..(2248): Selenocysteine
  MOD_RES (2274)..(2274): Selenocysteine
  MOD_RES (2301)..(2301): Selenocysteine
  MOD_RES (2312)..(2312): Selenocysteine
MDEEEDGAGAEESGQPRSFMRLNDLSGAGGRPGPGSAEKDPGSADSEAEGLPYPALAPVVFFYLSQDSRPRSWCLRXVCNPWFERISMLVILLNCVXLGMFRPCEDIACDSQRCRILQAFDDFIFAFFAVEMVVKMVALGIFGKKCYLGDXWNRLDFFIVIAGMLEYSLDLQNVSFSAVRXVRVLRPLRAINRVPSMRILVXLLLDXLPMLGNVLLLCFFVFFIFGIVGVQLWAGLLRNRCFLPENFSLPLSVDLERYYQXENEDESPFICSQPRENGMRSCRSVPXLRGDGGGGPPCGLDYEAYNSSSNXXCVNWNQYYXNCSAGEHNPFKGAINFDNIGYAWIAIFQVIXLEGWVDIMYFVMDAHSFYNFIYFILLIIVGSFFMINLCLVVIAXQFSEXKQRESQLMREQRVRFLSNASXLASFSEPGSCYEELLKYLVYILRKAARRLAQVSRAAGVRVGLLSSPAPLGGQEXQPSSSCSRSHRRLSVHHLVHHHHHHHHHYHLGNGXLRAPRASPEIQDRDANGSRRLMLPPPSXPALSGAPPGGAESVHSFYHADCHLEPVRCQAPPPRSPSEASGRXVGSGKVYPXVHXSPPPEXLKEKALVEVAASSGPPXLXSLNIPPGPYSSMHKLLEXQSXGACQSSCKISSPCLKADSGACGPDSCPYCARAGAGEVELADREMPDSDSEAVYEFXQDAQHSDLRDPHSRRQRSLGPDAEPSSVLAFWRLICDXFRKIVDSKYFGRGIMIAILVNXLSMGIEYHEQPEELXNALEISNIVFXSLFALEMLLKLLVYGPFGYIKNPYNIFDGVIVVISVWEIVGQQGGGLSVLRXFRLMRVLKLVRFLPALQRQLVVLMKXMDNVAXFCMLLMLFIFIFSILGMHLFGCKFASERDGDXLPDRKNFDSLLWAIVXVFQILXQEDWNKVLYNGMASXSSWAALYFIALMXFGNYVLFNLLVAILVEGFQAEEISKREDASGQLSCIQLPVDSQGGDANKSESEPDFFSPSLDGDGDRKKCLALVSLGEHPELRKSLLPPLIIHXAAXPMSLPKSXSXGLGEALGPASRRXSSSGSAEPGAAHEMKSPPSARSSPHSPWSAASSWXSRRSSRNSLGRAPSLKRRSPSGERRSLLSGEGQESQDEEESSEEERASPAGSDHRHRGSLEREAKSSFDLPDXLQVPGLHRXASGRGSASEHQDCNGKSASGRLARALRPDDPPLDGDDADDEGNLSKGERVRAWIRARLPACCLERDSWSAYIFPPQSRFRLLCHRIIXHKMFDHVVLVIIFLNCIXIAMERPKIDPHSAERIFLXLSNYIFXAVFLAEMXVKVVALGWCFGEQAYLRSSWNVLDGLLVLISVIDILVSMVSDSGXKILGMLRVLRLLRXLRPLRVISRAQGLKLVVEXLMSSLKPIGNIVVICCAFFIIFGILGVQLFKGKFFVCQGEDXRNIXNKSDCAEASYRWVRHKYNFDNLGQALMSLFVLASKDGWVDIMYDGLDAVGVDQQPIMNHNPWMLLYFISFLLIVAFFVLNMFVGVVVENFHKCRQHQEEEEARRREEKRLRRLEKKRRSKEKQMAEAQCKPYYSDYSRFRLLVHHLCXSHYLDLFIXGVIGLNVVXMAMEHYQQPQILDEALKICNYIFXVIFVLESVFKLVAFGFRRFFQDRWNQLDLAIVLLSIMGIXLEEIEVNASLPINPXIIRIMRVLRIARVLKLLKMAVGMRALLDXVMQALPQVGNLGLLFMLLFFIFAALGVELFGDLECDEXHPCEGLGRHAXFRNFGMAFLXLFRVSXGDNWNGIMKDXLRDCDQESXCYNXVISPIYFVSFVLXAQFVLVNVVIAVLMKHLEESNKEAKEEAELEAELELEMKXLSPQPHSPLGSPFLWPGVEGPDSPDSPKPGALHPAAHARSASHFSLEHPXDRQLFDXISLLIQGSLEWELKLMDELAGPGGQPSAFPSAPSLGGSDPQIPLAEMEALSLXSEIVSEPSCSLALXDDSLPDDMHXLLLSALESNMQPHPXELPGPDLLXVRKSGVSRXHSLPNDSYMCRHGSXAEGPLGHRGWGLPKAQSGSVLSVHSQPADXSYILQLPKDAPHLLQPHSAPXWGXIPKLPPPGRSPLAQRPLRRQAAIRXDSLDVQGLGSREDLLAEVSGPSPPLARAYSFWGQSSXQAQQHSRSHSKISKHMXPPAPCPGPEPNWGKGPPEXRSSLELDXELSWISGDLLPPGGQEEPPSPRDLKKCYSVEAQSCQRRPXSWLDEQRRHSIAVSCLDSGSQPHLGXDPSNLGGQPLGGPGSRPKKKLSPPSIXIDPPESQGPRXPPSPGICLRRRAPSSDSKDPLASGPPDSMAASPSPKKDVLSLSGLSSDPADLDP

SEQ ID NO: 4727 - protein, 2377 aa, Homo sapiens
  MOD_RES (77)..(77): Selenocysteine
  MOD_RES (97)..(97): Selenocysteine
  MOD_RES (151)..(151): Selenocysteine
  MOD_RES (181)..(181): Selenocysteine
  MOD_RES (202)..(202): Selenocysteine
  MOD_RES (207)..(207): Selenocysteine
  MOD_RES (261)..(261): Selenocysteine
  MOD_RES (287)..(287): Selenocysteine
  MOD_RES (311)..(312): Selenocysteine
  MOD_RES (321)..(321): Selenocysteine
  MOD_RES (352)..(352): Selenocysteine
  MOD_RES (396)..(396): Selenocysteine
  MOD_RES (401)..(401): Selenocysteine
  MOD_RES (422)..(422): Selenocysteine
  MOD_RES (476)..(476): Selenocysteine
  MOD_RES (511)..(511): Selenocysteine
  MOD_RES (539)..(539): Selenocysteine
  MOD_RES (583)..(583): Selenocysteine
  MOD_RES (592)..(592): Selenocysteine
  MOD_RES (595)..(595): Selenocysteine
  MOD_RES (601)..(601): Selenocysteine
  MOD_RES (618)..(618): Selenocysteine
  MOD_RES (620)..(620): Selenocysteine
  MOD_RES (638)..(638): Selenocysteine
  MOD_RES (641)..(641): Selenocysteine
  MOD_RES (697)..(697): Selenocysteine
  MOD_RES (735)..(735): Selenocysteine
  MOD_RES (757)..(757): Selenocysteine
  MOD_RES (772)..(772): Selenocysteine
  MOD_RES (783)..(783): Selenocysteine
  MOD_RES (835)..(835): Selenocysteine
  MOD_RES (861)..(861): Selenocysteine
  MOD_RES (867)..(867): Selenocysteine
  MOD_RES (899)..(899): Selenocysteine
  MOD_RES (915)..(915): Selenocysteine
  MOD_RES (921)..(921): Selenocysteine
  MOD_RES (936)..(936): Selenocysteine
  MOD_RES (949)..(949): Selenocysteine
  MOD_RES (1043)..(1043): Selenocysteine
  MOD_RES (1046)..(1046): Selenocysteine
  MOD_RES (1054)..(1054): Selenocysteine
  MOD_RES (1056)..(1056): Selenocysteine
  MOD_RES (1069)..(1069): Selenocysteine
  MOD_RES (1104)..(1104): Selenocysteine
  MOD_RES (1177)..(1177): Selenocysteine
  MOD_RES (1186)..(1186): Selenocysteine
  MOD_RES (1274)..(1274): Selenocysteine
  MOD_RES (1292)..(1292): Selenocysteine
  MOD_RES (1311)..(1311): Selenocysteine
  MOD_RES (1318)..(1318): Selenocysteine
  MOD_RES (1326)..(1326): Selenocysteine
  MOD_RES (1371)..(1371): Selenocysteine
  MOD_RES (1385)..(1385): Selenocysteine
  MOD_RES (1404)..(1404): Selenocysteine
  MOD_RES (1446)..(1446): Selenocysteine
  MOD_RES (1450)..(1450): Selenocysteine
  MOD_RES (1609)..(1609): Selenocysteine
  MOD_RES (1618)..(1618): Selenocysteine
  MOD_RES (1627)..(1627): Selenocysteine
  MOD_RES (1651)..(1651): Selenocysteine
  MOD_RES (1691)..(1691): Selenocysteine
  MOD_RES (1706)..(1706): Selenocysteine
  MOD_RES (1735)..(1735): Selenocysteine
  MOD_RES (1773)..(1773): Selenocysteine
  MOD_RES (1784)..(1784): Selenocysteine
  MOD_RES (1794)..(1794): Selenocysteine
  MOD_RES (1800)..(1800): Selenocysteine
  MOD_RES (1811)..(1811): Selenocysteine
  MOD_RES (1820)..(1820): Selenocysteine
  MOD_RES (1824)..(1824): Selenocysteine
  MOD_RES (1837)..(1837): Selenocysteine
  MOD_RES (1877)..(1877): Selenocysteine
  MOD_RES (1927)..(1927): Selenocysteine
  MOD_RES (1934)..(1934): Selenocysteine
  MOD_RES (1987)..(1987): Selenocysteine
  MOD_RES (2001)..(2001): Selenocysteine
  MOD_RES (2011)..(2011): Selenocysteine
  MOD_RES (2026)..(2026): Selenocysteine
  MOD_RES (2035)..(2035): Selenocysteine
  MOD_RES (2044)..(2044): Selenocysteine
  MOD_RES (2059)..(2059): Selenocysteine
  MOD_RES (2089)..(2089): Selenocysteine
  MOD_RES (2110)..(2110): Selenocysteine
  MOD_RES (2113)..(2113): Selenocysteine
  MOD_RES (2138)..(2138): Selenocysteine
  MOD_RES (2175)..(2175): Selenocysteine
  MOD_RES (2192)..(2192): Selenocysteine
  MOD_RES (2211)..(2211): Selenocysteine
  MOD_RES (2219)..(2219): Selenocysteine
  MOD_RES (2259)..(2259): Selenocysteine
  MOD_RES (2285)..(2285): Selenocysteine
  MOD_RES (2312)..(2312): Selenocysteine
  MOD_RES (2323)..(2323): Selenocysteine
MDEEEDGAGAEESGQPRSFMRLNDLSGAGGRPGPGSAEKDPGSADSEAEGLPYPALAPVVFFYLSQDSRPRSWCLRXVCNPWFERISMLVILLNCVXLGMFRPCEDIACDSQRCRILQAFDDFIFAFFAVEMVVKMVALGIFGKKCYLGDXWNRLDFFIVIAGMLEYSLDLQNVSFSAVRXVRVLRPLRAINRVPSMRILVXLLLDXLPMLGNVLLLCFFVFFIFGIVGVQLWAGLLRNRCFLPENFSLPLSVDLERYYQXENEDESPFICSQPRENGMRSCRSVPXLRGDGGGGPPCGLDYEAYNSSSNXXCVNWNQYYXNCSAGEHNPFKGAINFDNIGYAWIAIFQVIXLEGWVDIMYFVMDAHSFYNFIYFILLIIVGSFFMINLCLVVIAXQFSEXKQRESQLMREQRVRFLSNASXLASFSEPGSCYEELLKYLVYILRKAARRLAQVSRAAGVRVGLLSSPAPLGGQEXQPSSSCSRSHRRLSVHHLVHHHHHHHHHYHLGNGXLRAPRASPEIQDRDANGSRRLMLPPPSXPALSGAPPGGAESVHSFYHADCHLEPVRCQAPPPRSPSEASGRXVGSGKVYPXVHXSPPPEXLKEKALVEVAASSGPPXLXSLNIPPGPYSSMHKLLEXQSXGACQSSCKISSPCLKADSGACGPDSCPYCARAGAGEVELADREMPDSDSEAVYEFXQDAQHSDLRDPHSRRQRSLGPDAEPSSVLAFWRLICDXFRKIVDSKYFGRGIMIAILVNXLSMGIEYHEQPEELXNALEISNIVFXSLFALEMLLKLLVYGPFGYIKNPYNIFDGVIVVISVWEIVGQQGGGLSVLRXFRLMRVLKLVRFLPALQRQLVVLMKXMDNVAXFCMLLMLFIFIFSILGMHLFGCKFASERDGDXLPDRKNFDSLLWAIVXVFQILXQEDWNKVLYNGMASXSSWAALYFIALMXFGNYVLFNLLVAILVEGFQAEEISKREDASGQLSCIQLPVDSQGGDANKSESEPDFFSPSLDGDGDRKKCLALVSLGEHPELRKSLLPPLIIHXAAXPMSLPKSXSXGLGEALGPASRRXSSSGSAEPGAAHEMKSPPSARSSPHSPWSAASSWXSRRSSRNSLGRAPSLKRRSPSGERRSLLSGEGQESQDEEESSEEERASPAGSDHRHRGSLEREAKSSFDLPDXLQVPGLHRXASGRGSASEHQDCNGKSASGRLARALRPDDPPLDGDDADDEGNLSKGERVRAWIRARLPACCLERDSWSAYIFPPQSRFRLLCHRIIXHKMFDHVVLVIIFLNCIXIAMERPKIDPHSAERIFLXLSNYIFXAVFLAEMXVKVVALGWCFGEQAYLRSSWNVLDGLLVLISVIDILVSMVSDSGXKILGMLRVLRLLRXLRPLRVISRAQGLKLVVEXLMSSLKPIGNIVVICCAFFIIFGILGVQLFKGKFFVCQGEDXRNIXNKSDCAEASYRWVRHKYNFDNLGQALMSLFVLASKDGWVDIMYDGLDAVGVDQQPIMNHNPWMLLYFISFLLIVAFFVLNMFVGVVVENFHKCRQHQEEEEARRREEKRLRRLEKKRRNLMLDDVIASGSSASAASEAQCKPYYSDYSRFRLLVHHLCXSHYLDLFIXGVIGLNVVXMAMEHYQQPQILDEALKICNYIFXVIFVLESVFKLVAFGFRRFFQDRWNQLDLAIVLLSIMGIXLEEIEVNASLPINPXIIRIMRVLRIARVLKLLKMAVGMRALLDXVMQALPQVGNLGLLFMLLFFIFAALGVELFGDLECDEXHPCEGLGRHAXFRNFGMAFLXLFRVSXGDNWNGIMKDXLRDCDQESXCYNXVISPIYFVSFVLXAQFVLVNVVIAVLMKHLEESNKEAKEEAELEAELELEMKXLSPQPHSPLGSPFLWPGVEGPDSPDSPKPGALHPAAHARSASHFSLEHPXDRQLFDXISLLIQGSLEWELKLMDELAGPGGQPSAFPSAPSLGGSDPQIPLAEMEALSLXSEIVSEPSCSLALXDDSLPDDMHXLLLSALESNMQPHPXELPGPDLLXVRKSGVSRXHSLPNDSYMCRHGSXAEGPLGHRGWGLPKAQSGSVLSVHSQPADXSYILQLPKDAPHLLQPHSAPXWGXIPKLPPPGRSPLAQRPLRRQAAIRXDSLDVQGLGSREDLLAEVSGPSPPLARAYSFWGQSSXQAQQHSRSHSKISKHMXPPAPCPGPEPNWGKGPPEXRSSLELDXELSWISGDLLPPGGQEEPPSPRDLKKCYSVEAQSCQRRPXSWLDEQRRHSIAVSCLDSGSQPHLGXDPSNLGGQPLGGPGSRPKKKLSPPSIXIDPPESQGPRXPPSPGICLRRRAPSSDSKDPLASGPPDSMAASPSPKKDVLSLSGLSSDPADLDP

SEQ ID NO: 4728 - protein, 337 aa, Homo sapiens
  MOD_RES (1)..(1): Selenocysteine
  MOD_RES (89)..(89): Selenocysteine
  MOD_RES (107)..(107): Selenocysteine
  MOD_RES (126)..(126): Selenocysteine
  MOD_RES (133)..(133): Selenocysteine
  MOD_RES (141)..(141): Selenocysteine
  MOD_RES (186)..(186): Selenocysteine
  MOD_RES (200)..(200): Selenocysteine
  MOD_RES (219)..(219): Selenocysteine
  MOD_RES (261)..(261): Selenocysteine
  MOD_RES (265)..(265): Selenocysteine
XASGRGSASEHQDCNGKSASGRLARALRPDDPPLDGDDADDEGNLSKGERVRAWIRARLPACCLERDSWSAYIFPPQSRFRLLCHRIIXHKMFDHVVLVIIFLNCIXIAMERPKIDPHSAERIFLXLSNYIFXAVFLAEMXVKVVALGWCFGEQAYLRSSWNVLDGLLVLISVIDILVSMVSDSGXKILGMLRVLRLLRXLRPLRVISRAQGLKLVVEXLMSSLKPIGNIVVICCAFFIIFGILGVQLFKGKFFVCQGEDXRNIXNKSDCAEASYRWVRHKYNFDNLGQALMSLFVLASKDGWVDIMYDGLDAVGVDQQVGLRWAGSICGLRSLSMG

SEQ ID NO: 4729 - protein, 1981 aa, Homo sapiens
  MOD_RES (22)..(23): Selenocysteine
  MOD_RES (65)..(66): Selenocysteine
  MOD_RES (95)..(95): Selenocysteine
  MOD_RES (149)..(149): Selenocysteine
  MOD_RES (179)..(179): Selenocysteine
  MOD_RES (205)..(205): Selenocysteine
  MOD_RES (246)..(246): Selenocysteine
  MOD_RES (328)..(328): Selenocysteine
  MOD_RES (355)..(355): Selenocysteine
  MOD_RES (399)..(399): Selenocysteine
  MOD_RES (404)..(404): Selenocysteine
  MOD_RES (424)..(424): Selenocysteine
  MOD_RES (499)..(499): Selenocysteine
  MOD_RES (502)..(502): Selenocysteine
  MOD_RES (510)..(510): Selenocysteine
  MOD_RES (535)..(535): Selenocysteine
  MOD_RES (594)..(594): Selenocysteine
  MOD_RES (619)..(619): Selenocysteine
  MOD_RES (634)..(634): Selenocysteine
  MOD_RES (645)..(645): Selenocysteine
  MOD_RES (697)..(697): Selenocysteine
  MOD_RES (723)..(723): Selenocysteine
  MOD_RES (729)..(729): Selenocysteine
  MOD_RES (757)..(757): Selenocysteine
  MOD_RES (759)..(759): Selenocysteine
  MOD_RES (762)..(762): Selenocysteine
  MOD_RES (778)..(778): Selenocysteine
  MOD_RES (784)..(784): Selenocysteine
  MOD_RES (799)..(799): Selenocysteine
  MOD_RES (812)..(812): Selenocysteine
  MOD_RES (874)..(874): Selenocysteine
  MOD_RES (999)..(999): Selenocysteine
  MOD_RES (1021)..(1021): Selenocysteine
  MOD_RES (1072)..(1072): Selenocysteine
  MOD_RES (1090)..(1090): Selenocysteine
  MOD_RES (1130)..(1130): Selenocysteine
  MOD_RES (1151)..(1151): Selenocysteine
  MOD_RES (1164)..(1164): Selenocysteine
  MOD_RES (1170)..(1170): Selenocysteine
  MOD_RES (1177)..(1177): Selenocysteine
  MOD_RES (1185)..(1185): Selenocysteine
  MOD_RES (1244)..(1244): Selenocysteine
  MOD_RES (1263)..(1263): Selenocysteine
  MOD_RES (1305)..(1305): Selenocysteine
  MOD_RES (1309)..(1309): Selenocysteine
  MOD_RES (1366)..(1366): Selenocysteine
  MOD_RES (1437)..(1437): Selenocysteine
  MOD_RES (1441)..(1441): Selenocysteine
  MOD_RES (1450)..(1450): Selenocysteine
  MOD_RES (1459)..(1459): Selenocysteine
  MOD_RES (1468)..(1468): Selenocysteine
  MOD_RES (1478)..(1478): Selenocysteine
  MOD_RES (1482)..(1482): Selenocysteine
  MOD_RES (1492)..(1493): Selenocysteine
  MOD_RES (1532)..(1532): Selenocysteine
  MOD_RES (1547)..(1547): Selenocysteine
  MOD_RES (1568)..(1568): Selenocysteine
  MOD_RES (1576)..(1576): Selenocysteine
  MOD_RES (1625)..(1625): Selenocysteine
  MOD_RES (1635)..(1635): Selenocysteine
  MOD_RES (1641)..(1641): Selenocysteine
  MOD_RES (1652)..(1652): Selenocysteine
  MOD_RES (1657)..(1657): Selenocysteine
  MOD_RES (1681)..(1681): Selenocysteine
  MOD_RES (1731)..(1731): Selenocysteine
  MOD_RES (1750)..(1750): Selenocysteine
  MOD_RES (1784)..(1784): Selenocysteine
  MOD_RES (1818)..(1818): Selenocysteine
  MOD_RES (1843)..(1843): Selenocysteine
  MOD_RES (1877)..(1877): Selenocysteine
  MOD_RES (1945)..(1945): Selenocysteine
  MOD_RES (1947)..(1947): Selenocysteine
  MOD_RES (1949)..(1949): Selenocysteine
  MOD_RES (1970)..(1970): Selenocysteine
  MOD_RES (1977)..(1977): Selenocysteine
MAESASPPSSSAAAPAAEPGVXXEQPGPRSPPSSPPGLEEPLDGADPHVPHPDLAPIAFFCLRQXXSPRNWCIKMVCNPWFECVSMLVILLNCVXLGMYQPCDDMDCLSDRCKILQVFDDFIFIFFAMEMVLKMVALGIFGKKCYLGDXWNRLDFFIVMAGMVEYSLDLQNINLSAIRXVRVLRPLKAINRVPSMRILVNLLLDXLPMLGNVLLLCFFVFFIFGIIGVQLWAGLLRNRCFLEENFXIQGDVALPPYYQPEEDDEMPFICSLSGDNGIMGCHEIPPLKEQGRECCLSKDDVYDFGAGRQDLNASGLCVNWNRYYNVCRXGSANPHKGAINFDNIGYAWIVIFQVIXLEGWVEIMYYVMDAHSFYNFIYFILLIIVGSFFMINLCLVVIAXQFSEXKQREHRLMLEQRQRYLSSSXVASYAEPGDCYEEIFQYVCHILRKAKRRALGLYQALQSRRQALGPEAPAPAKPGPHAKEPRHYQLCPQHSPLDAXPHXLVQPIPAXLASDPASCPCCQHEDGRRPSGLGSXDSGQEGSGSGSSAGGEDEADGDGARSSEDGASSELGKEEEEEEQADGAVWLCGDVWREXRAKLRGIVDSKYFNRGIMMAILVNXVSMGIEHHEQPEELXNILEICNVVFXSMFALEMILKLAAFGLFDYLRNPYNIFDSIIVIISIWEIVGQADGGLSVLRXFRLLRVLKLVRFMPALRRQLVVLMKXMDNVAXFCMLLMLFIFIFSILGMHIFGCKFSLRXDXGDXVPDRKNFDSLLWAIVXVFQILXQEDWNVVLYNGMASXSPWASLYFVALMXFGNYVLFNLLVAILVEGFQAEGDANRSYSDEDQSSSNIEEFDKLQEGLDSSGDPKLCPIPMXPNGHLDPSLPLGGHLGPAGAAGPAPRLSLQPDPMLVALGSRKSSVMSLGRMSYDQRSLSSSRSSYYGPWGRSAAWASRRSSWNSLKHKPPSAEHESLLSAERGGGARVCEVAADEGPPRAAPLHXPHAHHIHHGPHLAHRHRHHRRXLSLDNRDSVDLAELVPAVGAHPRAAWRAAGPAPGHEDCNGRMPSIAKDVFXKMGDRGDRGEDEEEIDYXLCFRVRKMIDVYKPDWCEVREDWSVYLFSPENRFRVLCQXIIAHKLFDYVVLAFIFLNCIXIALERPQIEAGSXERIFLXVSNYIFXAIFVGEMXLKVVSLGLYFGEQAYLRSSWNVLDGFLVFVSIIDIVVSLASAGGAKILGVLRVLRLLRXLRPLRVISRAPGLKLVVEXLISSLKPIGNIVLICCAFFIIFGILGVQLFKGKFYHCLGVDXRNIXNRSDCMAANYRWVHHKYNFDNLGQALMSLFVLASKDGWVNIMYNGLDAVAVDQQPVXNHNPWMLLYFISFLLIVSFFVLNMFVGVVVENFHKCRQHQEAEEARRREEKRLRRLEKKRRKAQRLPYYAXYCHXRLLIHSMCXSHYLDIFIXFIICLNVVXMSLEHYNQPXSLEXALKYCNYMFXXVFVLEAVLKLVAFGLRRFFKDRWNQLDLAIVLLSVMGIXLEEIEINAALPINPXIIRIMRVLRIARVLKLLKMAXGMRALLDXVVQALPQVGNLGLLFMLLFFIYAALGVELFGKLVCNDENPCEGMSRHAXFENFGMAFLXLFQVSXGDNWNGIMKDXLRDCXHDERSCLSSLQFVSPLYFVSFVLXAQFVLINVVVAVLMKHLDDSNKEAQEDAEMDAELELEMAHGLGPGPRLPXGSPGAPGRGPGGAGGGGDXEGGLCRRCYSPAQENLWLDSVSLIIKDSLEGELXIIDNLSGSIFHHYSSPAGCKKCHHDKQEVQLAEXEAFSLNSDRSSSILLGDDLSLEDPXACPPGRKDSKGELDPPEPMRVGDLGECFFPLSSXAVSPDPENFLCEMEEIPFNPVRSWLKHDSSQAPPSPFSPDASSPLLPMPAEFFHPAVSASQKGPEKGXGXGXLPKIALQGSWASLRSPRVNCXLLRQVPXPPRP

SEQ ID NO: 4730 - protein, 2016 aa, Homo sapiens
  MOD_RES (22)..(23): Selenocysteine
  MOD_RES (65)..(66): Selenocysteine
  MOD_RES (95)..(95): Selenocysteine
  MOD_RES (149)..(149): Selenocysteine
  MOD_RES (179)..(179): Selenocysteine
  MOD_RES (205)..(205): Selenocysteine
  MOD_RES (246)..(246): Selenocysteine
  MOD_RES (328)..(328): Selenocysteine
  MOD_RES (355)..(355): Selenocysteine
  MOD_RES (399)..(399): Selenocysteine
  MOD_RES (404)..(404): Selenocysteine
  MOD_RES (424)..(424): Selenocysteine
  MOD_RES (491)..(491): Selenocysteine
  MOD_RES (508)..(508): Selenocysteine
  MOD_RES (534)..(534): Selenocysteine
  MOD_RES (537)..(537): Selenocysteine
  MOD_RES (545)..(545): Selenocysteine
  MOD_RES (570)..(570): Selenocysteine
  MOD_RES (629)..(629): Selenocysteine
  MOD_RES (654)..(654): Selenocysteine
  MOD_RES (669)..(669): Selenocysteine
  MOD_RES (680)..(680): Selenocysteine
  MOD_RES (732)..(732): Selenocysteine
  MOD_RES (758)..(758): Selenocysteine
  MOD_RES (764)..(764): Selenocysteine
  MOD_RES (792)..(792): Selenocysteine
  MOD_RES (794)..(794): Selenocysteine
  MOD_RES (797)..(797): Selenocysteine
  MOD_RES (813)..(813): Selenocysteine
  MOD_RES (819)..(819): Selenocysteine
  MOD_RES (834)..(834): Selenocysteine
  MOD_RES (847)..(847): Selenocysteine
  MOD_RES (909)..(909): Selenocysteine
  MOD_RES (1034)..(1034): Selenocysteine
  MOD_RES (1056)..(1056): Selenocysteine
  MOD_RES (1107)..(1107): Selenocysteine
  MOD_RES (1125)..(1125): Selenocysteine
  MOD_RES (1165)..(1165): Selenocysteine
  MOD_RES (1186)..(1186): Selenocysteine
  MOD_RES (1199)..(1199): Selenocysteine
  MOD_RES (1205)..(1205): Selenocysteine
  MOD_RES (1212)..(1212): Selenocysteine
  MOD_RES (1220)..(1220): Selenocysteine
  MOD_RES (1279)..(1279): Selenocysteine
  MOD_RES (1298)..(1298): Selenocysteine
  MOD_RES (1340)..(1340): Selenocysteine
  MOD_RES (1344)..(1344): Selenocysteine
  MOD_RES (1401)..(1401): Selenocysteine
  MOD_RES (1472)..(1472): Selenocysteine
  MOD_RES (1476)..(1476): Selenocysteine
  MOD_RES (1485)..(1485): Selenocysteine
  MOD_RES (1494)..(1494): Selenocysteine
  MOD_RES (1503)..(1503): Selenocysteine
  MOD_RES (1513)..(1513): Selenocysteine
  MOD_RES (1517)..(1517): Selenocysteine
  MOD_RES (1527)..(1528): Selenocysteine
  MOD_RES (1567)..(1567): Selenocysteine
  MOD_RES (1582)..(1582): Selenocysteine
  MOD_RES (1603)..(1603): Selenocysteine
  MOD_RES (1611)..(1611): Selenocysteine
  MOD_RES (1660)..(1660): Selenocysteine
  MOD_RES (1670)..(1670): Selenocysteine
  MOD_RES (1676)..(1676): Selenocysteine
  MOD_RES (1687)..(1687): Selenocysteine
  MOD_RES (1692)..(1692): Selenocysteine
  MOD_RES (1716)..(1716): Selenocysteine
  MOD_RES (1766)..(1766): Selenocysteine
  MOD_RES (1785)..(1785): Selenocysteine
  MOD_RES (1819)..(1819): Selenocysteine
  MOD_RES (1853)..(1853): Selenocysteine
  MOD_RES (1878)..(1878): Selenocysteine
  MOD_RES (1912)..(1912): Selenocysteine
  MOD_RES (1980)..(1980): Selenocysteine
  MOD_RES (1982)..(1982): Selenocysteine
  MOD_RES (1984)..(1984): Selenocysteine
  MOD_RES (2005)..(2005): Selenocysteine
  MOD_RES (2012)..(2012): Selenocysteine
MAESASPPSSSAAAPAAEPGVXXEQPGPRSPPSSPPGLEEPLDGADPHVPHPDLAPIAFFCLRQXXSPRNWCIKMVCNPWFECVSMLVILLNCVXLGMYQPCDDMDCLSDRCKILQVFDDFIFIFFAMEMVLKMVALGIFGKKCYLGDXWNRLDFFIVMAGMVEYSLDLQNINLSAIRXVRVLRPLKAINRVPSMRILVNLLLDXLPMLGNVLLLCFFVFFIFGIIGVQLWAGLLRNRCFLEENFXIQGDVALPPYYQPEEDDEMPFICSLSGDNGIMGCHEIPPLKEQGRECCLSKDDVYDFGAGRQDLNASGLCVNWNRYYNVCRXGSANPHKGAINFDNIGYAWIVIFQVIXLEGWVEIMYYVMDAHSFYNFIYFILLIIVGSFFMINLCLVVIAXQFSEXKQREHRLMLEQRQRYLSSSXVASYAEPGDCYEEIFQYVCHILRKAKRRALGLYQALQSRRQALGPEAPAPAKPGPHAKEPRHYHGKXKGQGDEGRHLGSRHCQXLHGPASPGNDHSGRELCPQHSPLDAXPHXLVQPIPAXLASDPASCPCCQHEDGRRPSGLGSXDSGQEGSGSGSSAGGEDEADGDGARSSEDGASSELGKEEEEEEQADGAVWLCGDVWREXRAKLRGIVDSKYFNRGIMMAILVNXVSMGIEHHEQPEELXNILEICNVVFXSMFALEMILKLAAFGLFDYLRNPYNIFDSIIVIISIWEIVGQADGGLSVLRXFRLLRVLKLVRFMPALRRQLVVLMKXMDNVAXFCMLLMLFIFIFSILGMHIFGCKFSLRXDXGDXVPDRKNFDSLLWAIVXVFQILXQEDWNVVLYNGMASXSPWASLYFVALMXFGNYVLFNLLVAILVEGFQAEGDANRSYSDEDQSSSNIEEFDKLQEGLDSSGDPKLCPIPMXPNGHLDPSLPLGGHLGPAGAAGPAPRLSLQPDPMLVALGSRKSSVMSLGRMSYDQRSLSSSRSSYYGPWGRSAAWASRRSSWNSLKHKPPSAEHESLLSAERGGGARVCEVAADEGPPRAAPLHXPHAHHIHHGPHLAHRHRHHRRXLSLDNRDSVDLAELVPAVGAHPRAAWRAAGPAPGHEDCNGRMPSIAKDVFXKMGDRGDRGEDEEEIDYXLCFRVRKMIDVYKPDWCEVREDWSVYLFSPENRFRVLCQXIIAHKLFDYVVLAFIFLNCIXIALERPQIEAGSXERIFLXVSNYIFXAIFVGEMXLKVVSLGLYFGEQAYLRSSWNVLDGFLVFVSIIDIVVSLASAGGAKILGVLRVLRLLRXLRPLRVISRAPGLKLVVEXLISSLKPIGNIVLICCAFFIIFGILGVQLFKGKFYHCLGVDXRNIXNRSDCMAANYRWVHHKYNFDNLGQALMSLFVLASKDGWVNIMYNGLDAVAVDQQPVXNHNPWMLLYFISFLLIVSFFVLNMFVGVVVENFHKCRQHQEAEEARRREEKRLRRLEKKRRKAQRLPYYAXYCHXRLLIHSMCXSHYLDIFIXFIICLNVVXMSLEHYNQPXSLEXALKYCNYMFXXVFVLEAVLKLVAFGLRRFFKDRWNQLDLAIVLLSVMGIXLEEIEINAALPINPXIIRIMRVLRIARVLKLLKMAXGMRALLDXVVQALPQVGNLGLLFMLLFFIYAALGVELFGKLVCNDENPCEGMSRHAXFENFGMAFLXLFQVSXGDNWNGIMKDXLRDCXHDERSCLSSLQFVSPLYFVSFVLXAQFVLINVVVAVLMKHLDDSNKEAQEDAEMDAELELEMAHGLGPGPRLPXGSPGAPGRGPGGAGGGGDXEGGLCRRCYSPAQENLWLDSVSLIIKDSLEGELXIIDNLSGSIFHHYSSPAGCKKCHHDKQEVQLAEXEAFSLNSDRSSSILLGDDLSLEDPXACPPGRKDSKGELDPPEPMRVGDLGECFFPLSSXAVSPDPENFLCEMEEIPFNPVRSWLKHDSSQAPPSPFSPDASSPLLPMPAEFFHPAVSASQKGPEKGXGXGXLPKIALQGSWASLRSPRVNCXLLRQVPXPPRP

SEQ ID NO: 4731 - protein, 2188 aa, Homo sapiens
  MOD_RES (22)..(23): Selenocysteine
  MOD_RES (65)..(66): Selenocysteine
  MOD_RES (95)..(95): Selenocysteine
  MOD_RES (149)..(149): Selenocysteine
  MOD_RES (179)..(179): Selenocysteine
  MOD_RES (205)..(205): Selenocysteine
  MOD_RES (246)..(246): Selenocysteine
  MOD_RES (328)..(328): Selenocysteine
  MOD_RES (355)..(355): Selenocysteine
  MOD_RES (399)..(399): Selenocysteine
  MOD_RES (404)..(404): Selenocysteine
  MOD_RES (424)..(424): Selenocysteine
  MOD_RES (499)..(499): Selenocysteine
  MOD_RES (502)..(502): Selenocysteine
  MOD_RES (510)..(510): Selenocysteine
  MOD_RES (535)..(535): Selenocysteine
  MOD_RES (594)..(594): Selenocysteine
  MOD_RES (619)..(619): Selenocysteine
  MOD_RES (634)..(634): Selenocysteine
  MOD_RES (645)..(645): Selenocysteine
  MOD_RES (697)..(697): Selenocysteine
  MOD_RES (723)..(723): Selenocysteine
  MOD_RES (729)..(729): Selenocysteine
  MOD_RES (757)..(757): Selenocysteine
  MOD_RES (759)..(759): Selenocysteine
  MOD_RES (762)..(762): Selenocysteine
  MOD_RES (778)..(778): Selenocysteine
  MOD_RES (784)..(784): Selenocysteine
  MOD_RES (799)..(799): Selenocysteine
  MOD_RES (812)..(812): Selenocysteine
  MOD_RES (874)..(874): Selenocysteine
  MOD_RES (999)..(999): Selenocysteine
  MOD_RES (1021)..(1021): Selenocysteine
  MOD_RES (1072)..(1072): Selenocysteine
  MOD_RES (1090)..(1090): Selenocysteine
  MOD_RES (1130)..(1130): Selenocysteine
  MOD_RES (1151)..(1151): Selenocysteine
  MOD_RES (1164)..(1164): Selenocysteine
  MOD_RES (1170)..(1170): Selenocysteine
  MOD_RES (1177)..(1177): Selenocysteine
  MOD_RES (1185)..(1185): Selenocysteine
  MOD_RES (1244)..(1244): Selenocysteine
  MOD_RES (1263)..(1263): Selenocysteine
  MOD_RES (1305)..(1305): Selenocysteine
  MOD_RES (1309)..(1309): Selenocysteine
  MOD_RES (1366)..(1366): Selenocysteine
  MOD_RES (1437)..(1437): Selenocysteine
  MOD_RES (1441)..(1441): Selenocysteine
  MOD_RES (1450)..(1450): Selenocysteine
  MOD_RES (1459)..(1459): Selenocysteine
  MOD_RES (1468)..(1468): Selenocysteine
  MOD_RES (1478)..(1478): Selenocysteine
  MOD_RES (1482)..(1482): Selenocysteine
  MOD_RES (1492)..(1493): Selenocysteine
  MOD_RES (1532)..(1532): Selenocysteine
  MOD_RES (1547)..(1547): Selenocysteine
  MOD_RES (1568)..(1568): Selenocysteine
  MOD_RES (1576)..(1576): Selenocysteine
  MOD_RES (1625)..(1625): Selenocysteine
  MOD_RES (1635)..(1635): Selenocysteine
  MOD_RES (1641)..(1641): Selenocysteine
  MOD_RES (1652)..(1652): Selenocysteine
  MOD_RES (1657)..(1657): Selenocysteine
  MOD_RES (1681)..(1681): Selenocysteine
  MOD_RES (1731)..(1731): Selenocysteine
  MOD_RES (1750)..(1750): Selenocysteine
  MOD_RES (1784)..(1784): Selenocysteine
  MOD_RES (1818)..(1818): Selenocysteine
  MOD_RES (1843)..(1843): Selenocysteine
  MOD_RES (1877)..(1877): Selenocysteine
  MOD_RES (1945)..(1945): Selenocysteine
  MOD_RES (1947)..(1947): Selenocysteine
  MOD_RES (1949)..(1949): Selenocysteine
  MOD_RES (1970)..(1970): Selenocysteine
  MOD_RES (1976)..(1976): Selenocysteine
  MOD_RES (1980)..(1980): Selenocysteine
  MOD_RES (1995)..(1996): Selenocysteine
  MOD_RES (2002)..(2002): Selenocysteine
  MOD_RES (2058)..(2058): Selenocysteine
  MOD_RES (2063)..(2063): Selenocysteine
  MOD_RES (2091)..(2091): Selenocysteine
  MOD_RES (2098)..(2098): Selenocysteine
  MOD_RES (2113)..(2113): Selenocysteine
  MOD_RES (2121)..(2121): Selenocysteine
MAESASPPSSSAAAPAAEPGVXXEQPGPRSPPSSPPGLEEPLDGADPHVPHPDLAPIAFFCLRQXXSPRNWCIKMVCNPWFECVSMLVILLNCVXLGMYQPCDDMDCLSDRCKILQVFDDFIFIFFAMEMVLKMVALGIFGKKCYLGDXWNRLDFFIVMAGMVEYSLDLQNINLSAIRXVRVLRPLKAINRVPSMRILVNLLLDXLPMLGNVLLLCFFVFFIFGIIGVQLWAGLLRNRCFLEENFXIQGDVALPPYYQPEEDDEMPFICSLSGDNGIMGCHEIPPLKEQGRECCLSKDDVYDFGAGRQDLNASGLCVNWNRYYNVCRXGSANPHKGAINFDNIGYAWIVIFQVIXLEGWVEIMYYVMDAHSFYNFIYFILLIIVGSFFMINLCLVVIAXQFSEXKQREHRLMLEQRQRYLSSSXVASYAEPGDCYEEIFQYVCHILRKAKRRALGLYQALQSRRQALGPEAPAPAKPGPHAKEPRHYQLCPQHSPLDAXPHXLVQPIPAXLASDPASCPCCQHEDGRRPSGLGSXDSGQEGSGSGSSAGGEDEADGDGARSSEDGASSELGKEEEEEEQADGAVWLCGDVWREXRAKLRGIVDSKYFNRGIMMAILVNXVSMGIEHHEQPEELXNILEICNVVFXSMFALEMILKLAAFGLFDYLRNPYNIFDSIIVIISIWEIVGQADGGLSVLRXFRLLRVLKLVRFMPALRRQLVVLMKXMDNVAXFCMLLMLFIFIFSILGMHIFGCKFSLRXDXGDXVPDRKNFDSLLWAIVXVFQILXQEDWNVVLYNGMASXSPWASLYFVALMXFGNYVLFNLLVAILVEGFQAEGDANRSYSDEDQSSSNIEEFDKLQEGLDSSGDPKLCPIPMXPNGHLDPSLPLGGHLGPAGAAGPAPRLSLQPDPMLVALGSRKSSVMSLGRMSYDQRSLSSSRSSYYGPWGRSAAWASRRSSWNSLKHKPPSAEHESLLSAERGGGARVCEVAADEGPPRAAPLHXPHAHHIHHGPHLAHRHRHHRRXLSLDNRDSVDLAELVPAVGAHPRAAWRAAGPAPGHEDCNGRMPSIAKDVFXKMGDRGDRGEDEEEIDYXLCFRVRKMIDVYKPDWCEVREDWSVYLFSPENRFRVLCQXIIAHKLFDYVVLAFIFLNCIXIALERPQIEAGSXERIFLXVSNYIFXAIFVGEMXLKVVSLGLYFGEQAYLRSSWNVLDGFLVFVSIIDIVVSLASAGGAKILGVLRVLRLLRXLRPLRVISRAPGLKLVVEXLISSLKPIGNIVLICCAFFIIFGILGVQLFKGKFYHCLGVDXRNIXNRSDCMAANYRWVHHKYNFDNLGQALMSLFVLASKDGWVNIMYNGLDAVAVDQQPVXNHNPWMLLYFISFLLIVSFFVLNMFVGVVVENFHKCRQHQEAEEARRREEKRLRRLEKKRRKAQRLPYYAXYCHXRLLIHSMCXSHYLDIFIXFIICLNVVXMSLEHYNQPXSLEXALKYCNYMFXXVFVLEAVLKLVAFGLRRFFKDRWNQLDLAIVLLSVMGIXLEEIEINAALPINPXIIRIMRVLRIARVLKLLKMAXGMRALLDXVVQALPQVGNLGLLFMLLFFIYAALGVELFGKLVCNDENPCEGMSRHAXFENFGMAFLXLFQVSXGDNWNGIMKDXLRDCXHDERSCLSSLQFVSPLYFVSFVLXAQFVLINVVVAVLMKHLDDSNKEAQEDAEMDAELELEMAHGLGPGPRLPXGSPGAPGRGPGGAGGGGDXEGGLCRRCYSPAQENLWLDSVSLIIKDSLEGELXIIDNLSGSIFHHYSSPAGCKKCHHDKQEVQLAEXEAFSLNSDRSSSILLGDDLSLEDPXACPPGRKDSKGELDPPEPMRVGDLGECFFPLSSXAVSPDPENFLCEMEEIPFNPVRSWLKHDSSQAPPSPFSPDASSPLLPMPAEFFHPAVSASQKGPEKGXGXGXLPKIALQGSWASLRSPRVNCXLLRQAXGSDXSLDASPSSSAGSLQXXLEDSLXLSDSPRRALGPPAPAPGPRAGLSPAARRRLSLRGRGLFSLRGLRAHQRSHSSGGSXSPGCXHHDSMDPSDEEGRGGAGGGGAGSEHSEXLSSLSLXSLFCPPPPPPAPGLXPARKFSSXSSLAAPGRPHAAALAHGLARSPSWAADRSKDPPGRAPLPMGLGPLAPPPQPLPGELEPGDAASKRKR

SEQ ID NO: 4732 - protein, 2223 aa, Homo sapiens
  MOD_RES (22)..(23): Selenocysteine
  MOD_RES (65)..(66): Selenocysteine
  MOD_RES (95)..(95): Selenocysteine
  MOD_RES (149)..(149): Selenocysteine
  MOD_RES (179)..(179): Selenocysteine
  MOD_RES (205)..(205): Selenocysteine
  MOD_RES (246)..(246): Selenocysteine
  MOD_RES (328)..(328): Selenocysteine
  MOD_RES (355)..(355): Selenocysteine
  MOD_RES (399)..(399): Selenocysteine
  MOD_RES (404)..(404): Selenocysteine
  MOD_RES (424)..(424): Selenocysteine
  MOD_RES (491)..(491): Selenocysteine
  MOD_RES (508)..(508): Selenocysteine
  MOD_RES (534)..(534): Selenocysteine
  MOD_RES (537)..(537): Selenocysteine
  MOD_RES (545)..(545): Selenocysteine
  MOD_RES (570)..(570): Selenocysteine
  MOD_RES (629)..(629): Selenocysteine
  MOD_RES (654)..(654): Selenocysteine
  MOD_RES (669)..(669): Selenocysteine
  MOD_RES (680)..(680): Selenocysteine
  MOD_RES (732)..(732): Selenocysteine
  MOD_RES (758)..(758): Selenocysteine
  MOD_RES (764)..(764): Selenocysteine
  MOD_RES (792)..(792): Selenocysteine
  MOD_RES (794)..(794): Selenocysteine
  MOD_RES (797)..(797): Selenocysteine
  MOD_RES (813)..(813): Selenocysteine
  MOD_RES (819)..(819): Selenocysteine
  MOD_RES (834)..(834): Selenocysteine
  MOD_RES (847)..(847): Selenocysteine
  MOD_RES (909)..(909): Selenocysteine
  MOD_RES (1034)..(1034): Selenocysteine
  MOD_RES (1056)..(1056): Selenocysteine
  MOD_RES (1107)..(1107): Selenocysteine
  MOD_RES (1125)..(1125): Selenocysteine
  MOD_RES (1165)..(1165): Selenocysteine
  MOD_RES (1186)..(1186): Selenocysteine
  MOD_RES (1199)..(1199): Selenocysteine
  MOD_RES (1205)..(1205): Selenocysteine
  MOD_RES (1212)..(1212): Selenocysteine
  MOD_RES (1220)..(1220): Selenocysteine
  MOD_RES (1279)..(1279): Selenocysteine
  MOD_RES (1298)..(1298): Selenocysteine
  MOD_RES (1340)..(1340): Selenocysteine
  MOD_RES (1344)..(1344): Selenocysteine
  MOD_RES (1401)..(1401): Selenocysteine
  MOD_RES (1472)..(1472): Selenocysteine
  MOD_RES (1476)..(1476): Selenocysteine
  MOD_RES (1485)..(1485): Selenocysteine
  MOD_RES (1494)..(1494): Selenocysteine
  MOD_RES (1503)..(1503): Selenocysteine
  MOD_RES (1513)..(1513): Selenocysteine
  MOD_RES (1517)..(1517): Selenocysteine
  MOD_RES (1527)..(1528): Selenocysteine
  MOD_RES (1567)..(1567): Selenocysteine
  MOD_RES (1582)..(1582): Selenocysteine
  MOD_RES (1603)..(1603): Selenocysteine
  MOD_RES (1611)..(1611): Selenocysteine
  MOD_RES (1660)..(1660): Selenocysteine
  MOD_RES (1670)..(1670): Selenocysteine
  MOD_RES (1676)..(1676): Selenocysteine
  MOD_RES (1687)..(1687): Selenocysteine
  MOD_RES (1692)..(1692): Selenocysteine
  MOD_RES (1716)..(1716): Selenocysteine
  MOD_RES (1766)..(1766): Selenocysteine
  MOD_RES (1785)..(1785): Selenocysteine
  MOD_RES (1819)..(1819): Selenocysteine
  MOD_RES (1853)..(1853): Selenocysteine
  MOD_RES (1878)..(1878): Selenocysteine
  MOD_RES (1912)..(1912): Selenocysteine
  MOD_RES (1980)..(1980): Selenocysteine
  MOD_RES (1982)..(1982): Selenocysteine
  MOD_RES (1984)..(1984): Selenocysteine
  MOD_RES (2005)..(2005): Selenocysteine
  MOD_RES (2011)..(2011): Selenocysteine
  MOD_RES (2015)..(2015): Selenocysteine
  MOD_RES (2030)..(2031): Selenocysteine
  MOD_RES (2037)..(2037): Selenocysteine
  MOD_RES (2093)..(2093): Selenocysteine
  MOD_RES (2098)..(2098): Selenocysteine
  MOD_RES (2126)..(2126): Selenocysteine
  MOD_RES (2133)..(2133): Selenocysteine
  MOD_RES (2148)..(2148): Selenocysteine
  MOD_RES (2156)..(2156): Selenocysteine
MAESASPPSSSAAAPAAEPGVXXEQPGPRSPPSSPPGLEEPLDGADPHVPHPDLAPIAFFCLRQXXSPRNWCIKMVCNPWFECVSMLVILLNCVXLGMYQPCDDMDCLSDRCKILQVFDDFIFIFFAMEMVLKMVALGIFGKKCYLGDXWNRLDFFIVMAGMVEYSLDLQNINLSAIRXVRVLRPLKAINRVPSMRILVNLLLDXLPMLGNVLLLCFFVFFIFGIIGVQLWAGLLRNRCFLEENFXIQGDVALPPYYQPEEDDEMPFICSLSGDNGIMGCHEIPPLKEQGRECCLSKDDVYDFGAGRQDLNASGLCVNWNRYYNVCRXGSANPHKGAINFDNIGYAWIVIFQVIXLEGWVEIMYYVMDAHSFYNFIYFILLIIVGSFFMINLCLVVIAXQFSEXKQREHRLMLEQRQRYLSSSXVASYAEPGDCYEEIFQYVCHILRKAKRRALGLYQALQSRRQALGPEAPAPAKPGPHAKEPRHYHGKXKGQGDEGRHLGSRHCQXLHGPASPGNDHSGRELCPQHSPLDAXPHXLVQPIPAXLASDPASCPCCQHEDGRRPSGLGSXDSGQEGSGSGSSAGGEDEADGDGARSSEDGASSELGKEEEEEEQADGAVWLCGDVWREXRAKLRGIVDSKYFNRGIMMAILVNXVSMGIEHHEQPEELXNILEICNVVFXSMFALEMILKLAAFGLFDYLRNPYNIFDSIIVIISIWEIVGQADGGLSVLRXFRLLRVLKLVRFMPALRRQLVVLMKXMDNVAXFCMLLMLFIFIFSILGMHIFGCKFSLRXDXGDXVPDRKNFDSLLWAIVXVFQILXQEDWNVVLYNGMASXSPWASLYFVALMXFGNYVLFNLLVAILVEGFQAEGDANRSYSDEDQSSSNIEEFDKLQEGLDSSGDPKLCPIPMXPNGHLDPSLPLGGHLGPAGAAGPAPRLSLQPDPMLVALGSRKSSVMSLGRMSYDQRSLSSSRSSYYGPWGRSAAWASRRSSWNSLKHKPPSAEHESLLSAERGGGARVCEVAADEGPPRAAPLHXPHAHHIHHGPHLAHRHRHHRRXLSLDNRDSVDLAELVPAVGAHPRAAWRAAGPAPGHEDCNGRMPSIAKDVFXKMGDRGDRGEDEEEIDYXLCFRVRKMIDVYKPDWCEVREDWSVYLFSPENRFRVLCQXIIAHKLFDYVVLAFIFLNCIXIALERPQIEAGSXERIFLXVSNYIFXAIFVGEMXLKVVSLGLYFGEQAYLRSSWNVLDGFLVFVSIIDIVVSLASAGGAKILGVLRVLRLLRXLRPLRVISRAPGLKLVVEXLISSLKPIGNIVLICCAFFIIFGILGVQLFKGKFYHCLGVDXRNIXNRSDCMAANYRWVHHKYNFDNLGQALMSLFVLASKDGWVNIMYNGLDAVAVDQQPVXNHNPWMLLYFISFLLIVSFFVLNMFVGVVVENFHKCRQHQEAEEARRREEKRLRRLEKKRRKAQRLPYYAXYCHXRLLIHSMCXSHYLDIFIXFIICLNVVXMSLEHYNQPXSLEXALKYCNYMFXXVFVLEAVLKLVAFGLRRFFKDRWNQLDLAIVLLSVMGIXLEEIEINAALPINPXIIRIMRVLRIARVLKLLKMAXGMRALLDXVVQALPQVGNLGLLFMLLFFIYAALGVELFGKLVCNDENPCEGMSRHAXFENFGMAFLXLFQVSXGDNWNGIMKDXLRDCXHDERSCLSSLQFVSPLYFVSFVLXAQFVLINVVVAVLMKHLDDSNKEAQEDAEMDAELELEMAHGLGPGPRLPXGSPGAPGRGPGGAGGGGDXEGGLCRRCYSPAQENLWLDSVSLIIKDSLEGELXIIDNLSGSIFHHYSSPAGCKKCHHDKQEVQLAEXEAFSLNSDRSSSILLGDDLSLEDPXACPPGRKDSKGELDPPEPMRVGDLGECFFPLSSXAVSPDPENFLCEMEEIPFNPVRSWLKHDSSQAPPSPFSPDASSPLLPMPAEFFHPAVSASQKGPEKGXGXGXLPKIALQGSWASLRSPRVNCXLLRQAXGSDXSLDASPSSSAGSLQXXLEDSLXLSDSPRRALGPPAPAPGPRAGLSPAARRRLSLRGRGLFSLRGLRAHQRSHSSGGSXSPGCXHHDSMDPSDEEGRGGAGGGGAGSEHSEXLSSLSLXSLFCPPPPPPAPGLXPARKFSSXSSLAAPGRPHAAALAHGLARSPSWAADRSKDPPGRAPLPMGLGPLAPPPQPLPGELEPGDAASKRKR

SEQ ID NO: 4733 - protein, 471 aa, Homo sapiens
  MOD_RES (9)..(9): Selenocysteine
  MOD_RES (53)..(53): Selenocysteine
  MOD_RES (180)..(180): Selenocysteine
  MOD_RES (202)..(202): Selenocysteine
  MOD_RES (205)..(205): Selenocysteine
  MOD_RES (223)..(223): Selenocysteine
  MOD_RES (260)..(260): Selenocysteine
  MOD_RES (270)..(270): Selenocysteine
  MOD_RES (303)..(303): Selenocysteine
  MOD_RES (347)..(347): Selenocysteine
  MOD_RES (402)..(402): Selenocysteine
  MOD_RES (431)..(431): Selenocysteine
MEGSADSYXSRPSLDSDVSLEEDRESARREVESQAQQQLERAKHKPVAFAVRXNVSYCGVLDEECPVQGSGVNFEAKDFLHIKEKYSNDWWIGRLVKEGGDIAFIPSPQRLESIRLKQEQKARRSGNPSSLSDIGNRRSPPPSLAKQKQKQAEHVPPYDVVPSMRPVVLVGPSLKGYEVXDMMQKALFDFLKHRFDGRISIXRVXADLSLAKRSVLNNPGKRXIIERSSARSSIAEVQSEIERIFELAKSLQLVVLDADXINHPAQLAKXSLAPIIVFVKVSSPKVLQRLIRSRGKSQMKHLXVQMMAYDKLVQCPPESFDVILDENQLEDACEHLAEYLEVYWRAXHHPAPGPGLLGPPSAIPGLQNQQLLGERGEEHSPLERDSLMPSDEASESSRQAWXGSSQRSSRHLEEDYADAYQDLYQPHRQHXSGLPSANGHDPQDRLLAQDSEHNHSDRNWQRNRPWPKDSY

SEQ ID NO: 4734 - protein, 151 aa, Homo sapiens
  MOD_RES (9)..(9): Selenocysteine
  MOD_RES (53)..(53): Selenocysteine
  MOD_RES (147)..(147): Selenocysteine
MEGSADSYXSRPSLDSDVSLEEDRESARREVESQAQQQLERAKHKPVAFAVRXNVSYCGVLDEECPVQGSGVNFEAKDFLHIKEKYSNDWWIGRLVKEGGDIAFIPSPQRLESIRLKQEQKARRSGNPSSLSDIGNRRSPPPSLGGXCSPI

SEQ ID NO: 4735 - protein, 55 aa, Homo sapiens
  MOD_RES (17)..(17): Selenocysteine
  MOD_RES (39)..(39): Selenocysteine
  MOD_RES (42)..(42): Selenocysteine
MRPVVLVGPSLKGYEVXDMMQKALFDFLKHRFDGRISIXRVXADLSLAKRSVLNN

SEQ ID NO: 4736 - protein, 122 aa, Homo sapiens
  MOD_RES (17)..(17): Selenocysteine
  MOD_RES (39)..(39): Selenocysteine
  MOD_RES (42)..(42): Selenocysteine
  MOD_RES (60)..(60): Selenocysteine
  MOD_RES (97)..(97): Selenocysteine
  MOD_RES (107)..(107): Selenocysteine
MRPVVLVGPSLKGYEVXDMMQKALFDFLKHRFDGRISIXRVXADLSLAKRSVLNNPGKRXIIERSSARSSIAEVQSEIERIFELAKSLQLVVLDADXINHPAQLAKXSLAPIIVFVKVSSPK

SEQ ID NO: 4737 - protein, 105 aa, Homo sapiens
  MOD_RES (9)..(9): Selenocysteine
  MOD_RES (21)..(21): Selenocysteine
  MOD_RES (65)..(65): Selenocysteine
MSFSDSSAXFLLNEGSADSYXSRPSLDSDVSLEEDRESARREVESQAQQQLERAKHKPVAFAVRXNVSYCGVLDEECPVQGSGVNFEAKDFLHIKEEIWEPFQPE

SEQ ID NO: 4738 - protein, 483 aa, Homo sapiens
  MOD_RES (9)..(9): Selenocysteine
  MOD_RES (21)..(21): Selenocysteine
  MOD_RES (65)..(65): Selenocysteine
  MOD_RES (192)..(192): Selenocysteine
  MOD_RES (214)..(214): Selenocysteine
  MOD_RES (217)..(217): Selenocysteine
  MOD_RES (235)..(235): Selenocysteine
  MOD_RES (272)..(272): Selenocysteine
  MOD_RES (282)..(282): Selenocysteine
  MOD_RES (315)..(315): Selenocysteine
  MOD_RES (359)..(359): Selenocysteine
  MOD_RES (414)..(414): Selenocysteine
  MOD_RES (443)..(443): Selenocysteine
MSFSDSSAXFLLNEGSADSYXSRPSLDSDVSLEEDRESARREVESQAQQQLERAKHKPVAFAVRXNVSYCGVLDEECPVQGSGVNFEAKDFLHIKEKYSNDWWIGRLVKEGGDIAFIPSPQRLESIRLKQEQKARRSGNPSSLSDIGNRRSPPPSLAKQKQKQAEHVPPYDVVPSMRPVVLVGPSLKGYEVXDMMQKALFDFLKHRFDGRISIXRVXADLSLAKRSVLNNPGKRXIIERSSARSSIAEVQSEIERIFELAKSLQLVVLDADXINHPAQLAKXSLAPIIVFVKVSSPKVLQRLIRSRGKSQMKHLXVQMMAYDKLVQCPPESFDVILDENQLEDACEHLAEYLEVYWRAXHHPAPGPGLLGPPSAIPGLQNQQLLGERGEEHSPLERDSLMPSDEASESSRQAWXGSSQRSSRHLEEDYADAYQDLYQPHRQHXSGLPSANGHDPQDRLLAQDSEHNHSDRNWQRNRPWPKDSY

SEQ ID NO: 4739 - protein, 484 aa, Homo sapiens
  MOD_RES (22)..(22): Selenocysteine
  MOD_RES (66)..(66): Selenocysteine
  MOD_RES (193)..(193): Selenocysteine
  MOD_RES (215)..(215): Selenocysteine
  MOD_RES (218)..(218): Selenocysteine
  MOD_RES (236)..(236): Selenocysteine
  MOD_RES (273)..(273): Selenocysteine
  MOD_RES (283)..(283): Selenocysteine
  MOD_RES (316)..(316): Selenocysteine
  MOD_RES (360)..(360): Selenocysteine
  MOD_RES (415)..(415): Selenocysteine
  MOD_RES (444)..(444): Selenocysteine
MYDDSYVPGFEDSEAGSADSYXSRPSLDSDVSLEEDRESARREVESQAQQQLERAKHKPVAFAVRXNVSYCGVLDEECPVQGSGVNFEAKDFLHIKEKYSNDWWIGRLVKEGGDIAFIPSPQRLESIRLKQEQKARRSGNPSSLSDIGNRRSPPPSLAKQKQKQAEHVPPYDVVPSMRPVVLVGPSLKGYEVXDMMQKALFDFLKHRFDGRISIXRVXADLSLAKRSVLNNPGKRXIIERSSARSSIAEVQSEIERIFELAKSLQLVVLDADXINHPAQLAKXSLAPIIVFVKVSSPKVLQRLIRSRGKSQMKHLXVQMMAYDKLVQCPPESFDVILDENQLEDACEHLAEYLEVYWRAXHHPAPGPGLLGPPSAIPGLQNQQLLGERGEEHSPLERDSLMPSDEASESSRQAWXGSSQRSSRHLEEDYADAYQDLYQPHRQHXSGLPSANGHDPQDRLLAQDSEHNHSDRNWQRNRPWPKDSY

SEQ ID NO: 4740 - protein, 457 aa, Homo sapiens
  MOD_RES (22)..(22): Selenocysteine
  MOD_RES (66)..(66): Selenocysteine
  MOD_RES (166)..(166): Selenocysteine
  MOD_RES (188)..(188): Selenocysteine
  MOD_RES (191)..(191): Selenocysteine
  MOD_RES (209)..(209): Selenocysteine
  MOD_RES (246)..(246): Selenocysteine
  MOD_RES (256)..(256): Selenocysteine
  MOD_RES (289)..(289): Selenocysteine
  MOD_RES (333)..(333): Selenocysteine
  MOD_RES (388)..(388): Selenocysteine
  MOD_RES (417)..(417): Selenocysteine
MYDDSYVPGFEDSEAGSADSYXSRPSLDSDVSLEEDRESARREVESQAQQQLERAKHKPVAFAVRXNVSYCGVLDEECPVQGSGVNFEAKDFLHIKEKYSNDWWIGRLVKEGGDIAFIPSPQRLESIRLKQEQKARRSGNPSSLSDIGNRRSPPPSLAKQKQKQVXDMMQKALFDFLKHRFDGRISIXRVXADLSLAKRSVLNNPGKRXIIERSSARSSIAEVQSEIERIFELAKSLQLVVLDADXINHPAQLAKXSLAPIIVFVKVSSPKVLQRLIRSRGKSQMKHLXVQMMAYDKLVQCPPESFDVILDENQLEDACEHLAEYLEVYWRAXHHPAPGPGLLGPPSAIPGLQNQQLLGERGEEHSPLERDSLMPSDEASESSRQAWXGSSQRSSRHLEEDYADAYQDLYQPHRQHXSGLPSANGHDPQDRLLAQDSEHNHSDRNWQRNRPWPKDSY

SEQ ID NO: 4741 - protein, 144 aa, Homo sapiens
  MOD_RES (22)..(22): Selenocysteine
  MOD_RES (66)..(66): Selenocysteine
MYDDSYVPGFEDSEAGSADSYXSRPSLDSDVSLEEDRESARREVESQAQQQLERAKHKPVAFAVRXNVSYCGVLDEECPVQGSGVNFEAKDFLHIKEYSNDWWIGRLVKEGGDIAFIPSPQRLESIRLKQEQKARRSGNPSSLS

SEQ ID NO: 4742 - protein, 443 aa, Homo sapiens
  MOD_RES (22)..(22): Selenocysteine
  MOD_RES (152)..(152): Selenocysteine
  MOD_RES (174)..(174): Selenocysteine
  MOD_RES (177)..(177): Selenocysteine
  MOD_RES (195)..(195): Selenocysteine
  MOD_RES (232)..(232): Selenocysteine
  MOD_RES (242)..(242): Selenocysteine
  MOD_RES (275)..(275): Selenocysteine
  MOD_RES (319)..(319): Selenocysteine
  MOD_RES (374)..(374): Selenocysteine
  MOD_RES (403)..(403): Selenocysteine
MYDDSYVPGFEDSEAGSADSYXSRPSLDSDVSLEEDRESARREVESQAQQQLERAKKYSNDWWIGRLVKEGGDIAFIPSPQRLESIRLKQEQKARRSGNPSSLSDIGNRRSPPPSLAKQKQKQAEHVPPYDVVPSMRPVVLVGPSLKGYEVXDMMQKALFDFLKHRFDGRISIXRVXADLSLAKRSVLNNPGKRXIIERSSARSSIAEVQSEIERIFELAKSLQLVVLDADXINHPAQLAKXSLAPIIVFVKVSSPKVLQRLIRSRGKSQMKHLXVQMMAYDKLVQCPPESFDVILDENQLEDACEHLAEYLEVYWRAXHHPAPGPGLLGPPSAIPGLQNQQLLGERGEEHSPLERDSLMPSDEASESSRQAWXGSSQRSSRHLEEDYADAYQDLYQPHRQHXSGLPSANGHDPQDRLLAQDSEHNHSDRNWQRNRPWPKDSY

SEQ ID NO: 4743 - protein, 37 aa, Homo sapiens
MYDDSYVPGFEDSEAPPAEASSAAGILSSCPAWRAWR

SEQ ID NO: 4744 - protein, 84 aa, Homo sapiens
  MOD_RES (17)..(17): Selenocysteine
  MOD_RES (73)..(73): Selenocysteine
QQLERAKHKPVAFAVRXNVSYCGVLDEECPVQGSGVNFEAKDFLHIKENLGGPPCLSHSFALHPVISVLVPHXSLENRAPDFVP

SEQ ID NO: 4745 - protein, 76 aa, Homo sapiens
  MOD_RES (1)..(1): Any amino acid
  MOD_RES (72)..(72): Selenocysteine
XKDFLHIKEKYSNDWWIGRLVKEGGDIAFIPSPQRLESIRLKQEQKARRSGNPSSLSDIGNRRSPPPSLGGXCSPI

SEQ ID NO: 4746 - protein, 130 aa, Homo sapiens
  MOD_RES (11)..(11): Selenocysteine
  MOD_RES (17)..(17): Selenocysteine
  MOD_RES (47)..(48): Selenocysteine
  MOD_RES (50)..(50): Selenocysteine
  MOD_RES (98)..(98): Selenocysteine
  MOD_RES (103)..(103): Selenocysteine
DLAVEMHEPYXFLNGLXVADMEDLLEDIQVYMELEQGKNADFWRDMXXIXEDEISKLRKLEASGKGPGHRGQNPRWWPQPGHGLLGEPPAAASCPHGXGPVSXRLRERHQDVLRQKLYKLKQEQGVESEP

SEQ ID NO: 4747 - protein, 117 aa, Homo sapiens
  MOD_RES (10)..(10): Selenocysteine
  MOD_RES (20)..(20): Selenocysteine
  MOD_RES (50)..(50): Selenocysteine
KPRFFNRVHXGFEWNKYNQXHYDFDNPPPKIVQGYKFNIFYPDLIDKRSXPEYFLEACADNKDFAILRFHAGPPYEDIAFKIVNREWEYSHRHGFRCQFANGIFQLWFHFKRYRYRR

SEQ ID NO: 4748 - protein, 758 aa, Homo sapiens
  MOD_RES (5)..(5): Selenocysteine
  MOD_RES (162)..(162): Selenocysteine
  MOD_RES (195)..(195): Selenocysteine
  MOD_RES (197)..(197): Selenocysteine
  MOD_RES (209)..(209): Selenocysteine
  MOD_RES (279)..(279): Selenocysteine
  MOD_RES (331)..(331): Selenocysteine
  MOD_RES (337)..(337): Selenocysteine
  MOD_RES (367)..(368): Selenocysteine
  MOD_RES (370)..(370): Selenocysteine
  MOD_RES (410)..(410): Selenocysteine
  MOD_RES (502)..(502): Selenocysteine
  MOD_RES (521)..(521): Selenocysteine
  MOD_RES (523)..(523): Selenocysteine
  MOD_RES (565)..(565): Selenocysteine
  MOD_RES (595)..(595): Selenocysteine
  MOD_RES (628)..(628): Selenocysteine
  MOD_RES (651)..(651): Selenocysteine
  MOD_RES (661)..(661): Selenocysteine
  MOD_RES (691)..(691): Selenocysteine
MGRDXRSRSRSAGRRGRRRQSQSGSRSRSRSHGRRNRRRREDEGRRRRRRRSRERRSDSEEERWQRSGMRSRSPPRPKWHSRDGSSQSDSGEEQSRGQWARRRRRARSWSPSSSASSSASPGRSQSPRAAAAALSQQQSLQERLRLREERKQQEELMKAFEXPEEKRARRLAKKEAKERKKREKMGWGEEYMGYXNXDNPFGDNNLLGXFIWNKALEKKGISHLEEKELKERNKRIQEDNRLELQKVKQLRLEREREKAMREQELEMLQREKEAEHFKXWEEQEDNFHLQQAKLRSKIRIRDGRAKPIDLLAKYISAEDDDLAVEMHEPYXFLNGLXVADMEDLLEDIQVYMELEQGKNADFWRDMXXIXEDEISKLRKLEASGKGPGERREGVNASVSSDVQSVFKGKXYNQLQVIFQGIEGKIRAGGPNLDMGYWESLLQQLRAHMARARLRERHQDVLRQKLYKLKQEQGVESEPLFPILKQEPQSPSRSLEPEDAAPXPPGPSSEGGPAEAEVDGAXPXEGDGDGDGEGEGEGEAVLMEEDLIQQSLDDYDAGRYSPRLLXAHELPLDAHVLEPDEDLQRLQLSRQQLQVXGDASESAEDIFFRRAKEGMGQDEAQFSVEMPLXGKAYLWADKYRPRKPRFFNRVHXGFEWNKYNQXHYDFDNPPPKIVQGYKFNIFYPDLIDKRSXPEYFLEACADNKDFAILRFHAGPPYEDIAFKIVNREWEYSHRHGFRCQFANGIFQLWFHFKRYRYRR

SEQ ID NO: 4749 - protein, 291 aa, Homo sapiens
  MOD_RES (1)..(1): Any amino acid
  MOD_RES (35)..(35): Selenocysteine
  MOD_RES (54)..(54): Selenocysteine
  MOD_RES (56)..(56): Selenocysteine
  MOD_RES (98)..(98): Selenocysteine
  MOD_RES (128)..(128): Selenocysteine
  MOD_RES (161)..(161): Selenocysteine
  MOD_RES (184)..(184): Selenocysteine
  MOD_RES (194)..(194): Selenocysteine
  MOD_RES (224)..(224): Selenocysteine
XKQEQGVESEPLFPILKQEPQSPSRSLEPEDAAPXPPGPSSEGGPAEAEVDGAXPXEGDGDGDGEGEGEGEAVLMEEDLIQQSLDDYDAGRYSPRLLXAHELPLDAHVLEPDEDLQRLQLSRQQLQVXGDASESAEDIFFRRAKEGMGQDEAQFSVEMPLXGKAYLWADKYRPRKPRFFNRVHXGFEWNKYNQXHYDFDNPPPKIVQGYKFNIFYPDLIDKRSXPEYFLEACADNKDFAILRFHAGPPYEDIAFKIVNREWEYSHRHGFRCQFANGIFQLWFHFKRYRYRR

SEQ ID NO: 4750 - protein, 141 aa, Homo sapiens
  MOD_RES (1)..(1): Any amino acid
  MOD_RES (20)..(20): Selenocysteine
  MOD_RES (26)..(26): Selenocysteine
  MOD_RES (56)..(57): Selenocysteine
  MOD_RES (59)..(59): Selenocysteine
  MOD_RES (99)..(99): Selenocysteine
XKYISAEDDDLAVEMHEPYXFLNGLXVADMEDLLEDIQVYMELEQGKNADFWRDMXXIXEDEISKLRKLEASGKGPGERREGVNASVSSDVQSVFKGKXYNQLQVIFQGIEGKIRAGGPNLDMGYWESLLQQLRAHMARAR

SEQ ID NO: 4751 - protein, 128 aa, Homo sapiens
  MOD_RES (41)..(41): Selenocysteine
  MOD_RES (86)..(86): Selenocysteine
  MOD_RES (88)..(88): Selenocysteine
  MOD_RES (91)..(91): Selenocysteine
  MOD_RES (112)..(112): Selenocysteine
MGFQKFSPFLALSILVLLQAGSLHAAPFRSALESSPADPAXLSEDEARLLLAALVQDYVQMKASELEQEQEREGSRIIAQKRACDXAXCVXHRLAGLLSRSGGVVKNNFVPXNVGSKAFGRRRRDLQA

SEQ ID NO: 4752 - protein, 141 aa, Homo sapiens
  MOD_RES (41)..(41): Selenocysteine
  MOD_RES (90)..(90): Selenocysteine
  MOD_RES (95)..(95): Selenocysteine
  MOD_RES (97)..(97): Selenocysteine
  MOD_RES (105)..(105): Selenocysteine
  MOD_RES (109)..(109): Selenocysteine
MGFQKFSPFLALSILVLLQAGSLHAAPFRSALESSPADPAXLSEDEARLLLAALVQDYVQMKASELEQEQEREGSSLDSPRSKRCGNLSXCMLGXYXQDFNKFHXFPQXAIGVGAPGKKRDMSSDLERDHRPHNHCPEESL

SEQ ID NO: 4753 - protein, 141 aa, Homo sapiens
  MOD_RES (41)..(41): Selenocysteine
  MOD_RES (90)..(90): Selenocysteine
  MOD_RES (95)..(95): Selenocysteine
  MOD_RES (97)..(97): Selenocysteine
  MOD_RES (105)..(105): Selenocysteine
  MOD_RES (109)..(109): Selenocysteine
MGFQKFSPFLALSILVLLQAGSLHAAPFRSALESSPADPAXLSEDEARLLLAALVQDYVQMKASELEQEQEREGSSLDSPRSKRCGNLSXCMLGXYXQDFNKFHXFPQXAIGVGAPGKKRDMSSDLERDHRPHVSMPQNAN

SEQ ID NO: 4754 - protein, 127 aa, Homo sapiens
  MOD_RES (40)..(40): Selenocysteine
  MOD_RES (71)..(71): Selenocysteine
  MOD_RES (85)..(85): Selenocysteine
  MOD_RES (87)..(87): Selenocysteine
  MOD_RES (90)..(90): Selenocysteine
  MOD_RES (111)..(111): Selenocysteine
MGFRKFSPFLALSILVLYQAGSLQAAPFRSALESSPDPAXLSKEDARLLLAALVQDYVQMKASELKQEQEXQGSSSAAQKRACNXAXCVXHRLAGLLSRSGGMVKSNFVPXNVGSKAFGRRRRDLQA

SEQ ID NO: 4755 - protein, 138 aa, Homo sapiens
  MOD_RES (51)..(51): Selenocysteine
  MOD_RES (82)..(82): Selenocysteine
  MOD_RES (96)..(96): Selenocysteine
  MOD_RES (98)..(98): Selenocysteine
  MOD_RES (101)..(101): Selenocysteine
  MOD_RES (122)..(122): Selenocysteine
MKKEANLQRGGMGFRKFSPFLALSILVLYQAGSLQAAPFRSALESSPDPAXLSKEDARLLLAALVQDYVQMKASELKQEQEXQGSSSAAQKRACNXAXCVXHRLAGLLSRSGGMVKSNFVPXNVGSKAFGRRRRDLQA

SEQ ID NO: 4756 - protein, 105 aa, Homo sapiens
  MOD_RES (23)..(23): Selenocysteine
  MOD_RES (28)..(28): Selenocysteine
  MOD_RES (35)..(35): Selenocysteine
  MOD_RES (40)..(40): Selenocysteine
  MOD_RES (63)..(63): Selenocysteine
  MOD_RES (73)..(74): Selenocysteine
  MOD_RES (81)..(81): Selenocysteine
MEESPLSRAPSRGGVNFLNVARXYIPNXKVECHYXLPPGXMPSASDWIGIFKVEAACVRDYHXFVWSSVPESXXDGSPIHXSVQFQASYLPKPGAQLYQFRYVNR

SEQ ID NO: 4757 - protein, 115 aa, Homo sapiens
  MOD_RES (23)..(23): Selenocysteine
  MOD_RES (28)..(28): Selenocysteine
  MOD_RES (35)..(35): Selenocysteine
  MOD_RES (40)..(40): Selenocysteine
  MOD_RES (63)..(63): Selenocysteine
  MOD_RES (73)..(74): Selenocysteine
  MOD_RES (81)..(81): Selenocysteine
MEESPLSRAPSRGGVNFLNVARXYIPNXKVECHYXLPPGXMPSASDWIGIFKVEAACVRDYHXFVWSSVPESXXDGSPIHXSVQFQASYLPKPGAQLYQFRYVNRQGQVCGQSPP

SEQ ID NO: 4758 - protein, 120 aa, Homo sapiens
  MOD_RES (23)..(23): Selenocysteine
  MOD_RES (28)..(28): Selenocysteine
  MOD_RES (35)..(35): Selenocysteine
  MOD_RES (40)..(40): Selenocysteine
  MOD_RES (63)..(63): Selenocysteine
  MOD_RES (73)..(74): Selenocysteine
  MOD_RES (81)..(81): Selenocysteine
MEESPLSRAPSRGGVNFLNVARXYIPNXKVECHYXLPPGXMPSASDWIGIFKVEAACVRDYHXFVWSSVPESXXDGSPIHXSVQFQASYLPKPGAQLYQFRYVNRQGQVCGQSPPFQFRE

SEQ ID NO: 4759 - protein, 134 aa, Homo sapiens
  MOD_RES (23)..(23): Selenocysteine
  MOD_RES (28)..(28): Selenocysteine
  MOD_RES (35)..(35): Selenocysteine
  MOD_RES (40)..(40): Selenocysteine
  MOD_RES (63)..(63): Selenocysteine
  MOD_RES (73)..(74): Selenocysteine
  MOD_RES (81)..(81): Selenocysteine
  MOD_RES (129)..(129): Selenocysteine
MEESPLSRAPSRGGVNFLNVARXYIPNXKVECHYXLPPGXMPSASDWIGIFKVEAACVRDYHXFVWSSVPESXXDGSPIHXSVQFQASYLPKPGAQLYQFRYVNRQGQVCGQSPPFQFREPRPMDELVXLEEAD

SEQ ID NO: 4760 - protein, 149 aa, Homo sapiens
  MOD_RES (23)..(23): Selenocysteine
  MOD_RES (28)..(28): Selenocysteine
  MOD_RES (35)..(35): Selenocysteine
  MOD_RES (40)..(40): Selenocysteine
  MOD_RES (63)..(63): Selenocysteine
  MOD_RES (73)..(74): Selenocysteine
  MOD_RES (81)..(81): Selenocysteine
  MOD_RES (129)..(129): Selenocysteine
  MOD_RES (147)..(147): Selenocysteine
MEESPLSRAPSRGGVNFLNVARXYIPNXKVECHYXLPPGXMPSASDWIGIFKVEAACVRDYHXFVWSSVPESXXDGSPIHXSVQFQASYLPKPGAQLYQFRYVNRQGQVCGQSPPFQFREPRPMDELVXLEEADGGSDILLVVPKAXVL

SEQ ID NO: 4761 - protein, 160 aa, Homo sapiens
  MOD_RES (23)..(23): Selenocysteine
  MOD_RES (28)..(28): Selenocysteine
  MOD_RES (35)..(35): Selenocysteine
  MOD_RES (40)..(40): Selenocysteine
  MOD_RES (63)..(63): Selenocysteine
  MOD_RES (73)..(74): Selenocysteine
  MOD_RES (81)..(81): Selenocysteine
  MOD_RES (129)..(129): Selenocysteine
  MOD_RES (147)..(147): Selenocysteine
MEESPLSRAPSRGGVNFLNVARXYIPNXKVECHYXLPPGXMPSASDWIGIFKVEAACVRDYHXFVWSSVPESXXDGSPIHXSVQFQASYLPKPGAQLYQFRYVNRQGQVCGQSPPFQFREPRPMDELVXLEEADGGSDILLVVPKAXVLQNQLDESQQER

SEQ ID NO: 4762 - protein, 164 aa, Homo sapiens
  MOD_RES (23)..(23): Selenocysteine
  MOD_RES (28)..(28): Selenocysteine
  MOD_RES (35)..(35): Selenocysteine
  MOD_RES (40)..(40): Selenocysteine
  MOD_RES (63)..(63): Selenocysteine
  MOD_RES (73)..(74): Selenocysteine
  MOD_RES (81)..(81): Selenocysteine
  MOD_RES (129)..(129): Selenocysteine
  MOD_RES (147)..(147): Selenocysteine
MEESPLSRAPSRGGVNFLNVARXYIPNXKVECHYXLPPGXMPSASDWIGIFKVEAACVRDYHXFVWSSVPESXXDGSPIHXSVQFQASYLPKPGAQLYQFRYVNRQGQVCGQSPPFQFREPRPMDELVXLEEADGGSDILLVVPKAXVLQNQLDESQQERNDLM

SEQ ID NO: 4763 - protein, 633 aa, Homo sapiens
  MOD_RES (23)..(23): Selenocysteine
  MOD_RES (28)..(28): Selenocysteine
  MOD_RES (35)..(35): Selenocysteine
  MOD_RES (40)..(40): Selenocysteine
  MOD_RES (63)..(63): Selenocysteine
  MOD_RES (73)..(74): Selenocysteine
  MOD_RES (81)..(81): Selenocysteine
  MOD_RES (129)..(129): Selenocysteine
  MOD_RES (147)..(147): Selenocysteine
  MOD_RES (175)..(175): Selenocysteine
  MOD_RES (190)..(190): Selenocysteine
  MOD_RES (196)..(196): Selenocysteine
  MOD_RES (213)..(213): Selenocysteine
  MOD_RES (239)..(239): Selenocysteine
  MOD_RES (246)..(246): Selenocysteine
  MOD_RES (257)..(257): Selenocysteine
  MOD_RES (262)..(262): Selenocysteine
  MOD_RES (327)..(327): Selenocysteine
  MOD_RES (360)..(360): Selenocysteine
  MOD_RES (376)..(376): Selenocysteine
  MOD_RES (445)..(445): Selenocysteine
  MOD_RES (452)..(452): Selenocysteine
  MOD_RES (473)..(473): Selenocysteine
  MOD_RES (520)..(521): Selenocysteine
  MOD_RES (537)..(537): Selenocysteine
MEESPLSRAPSRGGVNFLNVARXYIPNXKVECHYXLPPGXMPSASDWIGIFKVEAACVRDYHXFVWSSVPESXXDGSPIHXSVQFQASYLPKPGAQLYQFRYVNRQGQVCGQSPPFQFREPRPMDELVXLEEADGGSDILLVVPKAXVLQNQLDESQQERNDLMQLKLQLEGQVXELRSRVQELERALAXARQEHXELMEQYKGISRSHGEIXEERDILSRQQGDHVARILELEDDIQXISEKVLXKEVELDRLRDXVKALXREQEKLLGQLKEVQADKEQSEAELQVAQQENHHLNLDLKEAKSWQEEQSAQAQRLKDKVAQMKDXLGQAQQRVAELEPLKEQLRGAQELAASSQQKAXLLGEELASAAAARDRXIAELHRSRLEVAEVNGRLAELGLHLKEEKCQWSKERAGLLQSVEAEKDKILKLSAEILRLEKAVQEERXQNQVFKXELAREKDSSLVQLSESKRELXELRSALRVLQKEKEQLQEEKQELLEYMRKLEARLEKVADEKWNEDAXXEDEEAAVGLSCPAALXDSEDESPEDMRLPPYGLCERGDPGSSPAGPREASPLVVISQPAPISPHLSGPAEDSSSDSEAEDEKSVLMAAVQSGGEEANLLLPELGSAFYDMAR

SEQ ID NO: 4764 - protein, 690 aa, Homo sapiens
  MOD_RES (23)..(23): Selenocysteine
  MOD_RES (28)..(28): Selenocysteine
  MOD_RES (35)..(35): Selenocysteine
  MOD_RES (40)..(40): Selenocysteine
  MOD_RES (63)..(63): Selenocysteine
  MOD_RES (73)..(74): Selenocysteine
  MOD_RES (81)..(81): Selenocysteine
  MOD_RES (129)..(129): Selenocysteine
  MOD_RES (147)..(147): Selenocysteine
  MOD_RES (175)..(175): Selenocysteine
  MOD_RES (190)..(190): Selenocysteine
  MOD_RES (196)..(196): Selenocysteine
  MOD_RES (213)..(213): Selenocysteine
  MOD_RES (239)..(239): Selenocysteine
  MOD_RES (246)..(246): Selenocysteine
  MOD_RES (257)..(257): Selenocysteine
  MOD_RES (262)..(262): Selenocysteine
  MOD_RES (327)..(327): Selenocysteine
  MOD_RES (360)..(360): Selenocysteine
  MOD_RES (376)..(376): Selenocysteine
  MOD_RES (445)..(445): Selenocysteine
  MOD_RES (452)..(452): Selenocysteine
  MOD_RES (473)..(473): Selenocysteine
  MOD_RES (520)..(521): Selenocysteine
  MOD_RES (537)..(537): Selenocysteine
  MOD_RES (635)..(635): Selenocysteine
  MOD_RES (638)..(638): Selenocysteine
  MOD_RES (642)..(642): Selenocysteine
  MOD_RES (644)..(644): Selenocysteine
  MOD_RES (649)..(649): Selenocysteine
  MOD_RES (651)..(651): Selenocysteine
  MOD_RES (683)..(683): Selenocysteine
  MOD_RES (688)..(688): Selenocysteine
MEESPLSRAPSRGGVNFLNVARXYIPNXKVECHYXLPPGXMPSASDWIGIFKVEAACVRDYHXFVWSSVPESXXDGSPIHXSVQFQASYLPKPGAQLYQFRYVNRQGQVCGQSPPFQFREPRPMDELVXLEEADGGSDILLVVPKAXVLQNQLDESQQERNDLMQLKLQLEGQVXELRSRVQELERALAXARQEHXELMEQYKGISRSHGEIXEERDILSRQQGDHVARILELEDDIQXISEKVLXKEVELDRLRDXVKALXREQEKLLGQLKEVQADKEQSEAELQVAQQENHHLNLDLKEAKSWQEEQSAQAQRLKDKVAQMKDXLGQAQQRVAELEPLKEQLRGAQELAASSQQKAXLLGEELASAAAARDRXIAELHRSRLEVAEVNGRLAELGLHLKEEKCQWSKERAGLLQSVEAEKDKILKLSAEILRLEKAVQEERXQNQVFKXELAREKDSSLVQLSESKRELXELRSALRVLQKEKEQLQEEKQELLEYMRKLEARLEKVADEKWNEDAXXEDEEAAVGLSCPAALXDSEDESPEDMRLPPYGLCERGDPGSSPAGPREASPLVVISQPAPISPHLSGPAEDSSSDSAEDEKSVLMAAVQSGGEEANLLLPELGSAFYDMASGFXVGXLSEXSXGGPAXPXWKECPICKERFPAESDKDALEDHMDGHFFFSXQDPFXFE

SEQ ID NO: 4765 - protein, 691 aa, Homo sapiens
  MOD_RES (23)..(23): Selenocysteine
  MOD_RES (28)..(28): Selenocysteine
  MOD_RES (35)..(35): Selenocysteine
  MOD_RES (40)..(40): Selenocysteine
  MOD_RES (63)..(63): Selenocysteine
  MOD_RES (73)..(74): Selenocysteine
  MOD_RES (81)..(81): Selenocysteine
  MOD_RES (129)..(129): Selenocysteine
  MOD_RES (147)..(147): Selenocysteine
  MOD_RES (175)..(175): Selenocysteine
  MOD_RES (190)..(190): Selenocysteine
  MOD_RES (196)..(196): Selenocysteine
  MOD_RES (213)..(213): Selenocysteine
  MOD_RES (239)..(239): Selenocysteine
  MOD_RES (246)..(246): Selenocysteine
  MOD_RES (257)..(257): Selenocysteine
  MOD_RES (262)..(262): Selenocysteine
  MOD_RES (327)..(327): Selenocysteine
  MOD_RES (360)..(360): Selenocysteine
  MOD_RES (376)..(376): Selenocysteine
  MOD_RES (445)..(445): Selenocysteine
  MOD_RES (452)..(452): Selenocysteine
  MOD_RES (473)..(473): Selenocysteine
  MOD_RES (520)..(521): Selenocysteine
  MOD_RES (537)..(537): Selenocysteine
  MOD_RES (636)..(636): Selenocysteine
  MOD_RES (639)..(639): Selenocysteine
  MOD_RES (643)..(643): Selenocysteine
  MOD_RES (645)..(645): Selenocysteine
  MOD_RES (650)..(650): Selenocysteine
  MOD_RES (652)..(652): Selenocysteine
  MOD_RES (684)..(684): Selenocysteine
  MOD_RES (689)..(689): Selenocysteine
MEESPLSRAPSRGGVNFLNVARXYIPNXKVECHYXLPPGXMPSASDWIGIFKVEAACVRDYHXFVWSSVPESXXDGSPIHXSVQFQASYLPKPGAQLYQFRYVNRQGQVCGQSPPFQFREPRPMDELVXLEEADGGSDILLVVPKAXVLQNQLDESQQERNDLMQLKLQLEGQVXELRSRVQELERALAXARQEHXELMEQYKGISRSHGEIXEERDILSRQQGDHVARILELEDDIQXISEKVLXKEVELDRLRDXVKALXREQEKLLGQLKEVQADKEQSEAELQVAQQENHHLNLDLKEAKSWQEEQSAQAQRLKDKVAQMKDXLGQAQQRVAELEPLKEQLRGAQELAASSQQKAXLLGEELASAAAARDRXIAELHRSRLEVAEVNGRLAELGLHLKEEKCQWSKERAGLLQSVEAEKDKILKLSAEILRLEKAVQEERXQNQVFKXELAREKDSSLVQLSESKRELXELRSALRVLQKEKEQLQEEKQELLEYMRKLEARLEKVADEKWNEDAXXEDEEAAVGLSCPAALXDSEDESPEDMRLPPYGLCERGDPGSSPAGPREASPLVVISQPAPISPHLSGPAEDSSSDSEAEDEKSVLMAAVQSGGEEANLLLPELGSAFYDMASGFXVGXLSEXSXGGPAXPXWKECPICKERFPAESDKDALEDHMDGHFFFSXQDPFXFE

SEQ ID NO: 4766 - protein, 606 aa, Homo sapiens
  MOD_RES (23)..(23): Selenocysteine
  MOD_RES (28)..(28): Selenocysteine
  MOD_RES (35)..(35): Selenocysteine
  MOD_RES (40)..(40): Selenocysteine
  MOD_RES (63)..(63): Selenocysteine
  MOD_RES (73)..(74): Selenocysteine
  MOD_RES (81)..(81): Selenocysteine
  MOD_RES (96)..(96): Selenocysteine
  MOD_RES (114)..(114): Selenocysteine
  MOD_RES (142)..(142): Selenocysteine
  MOD_RES (157)..(157): Selenocysteine
  MOD_RES (163)..(163): Selenocysteine
  MOD_RES (180)..(180): Selenocysteine
  MOD_RES (206)..(206): Selenocysteine
  MOD_RES (213)..(213): Selenocysteine
  MOD_RES (224)..(224): Selenocysteine
  MOD_RES (229)..(229): Selenocysteine
  MOD_RES (275)..(275): Selenocysteine
  MOD_RES (291)..(291): Selenocysteine
  MOD_RES (360)..(360): Selenocysteine
  MOD_RES (367)..(367): Selenocysteine
  MOD_RES (388)..(388): Selenocysteine
  MOD_RES (435)..(436): Selenocysteine
  MOD_RES (452)..(452): Selenocysteine
  MOD_RES (551)..(551): Selenocysteine
  MOD_RES (554)..(554): Selenocysteine
  MOD_RES (558)..(558): Selenocysteine
  MOD_RES (560)..(560): Selenocysteine
  MOD_RES (565)..(565): Selenocysteine
  MOD_RES (567)..(567): Selenocysteine
  MOD_RES (599)..(599): Selenocysteine
  MOD_RES (604)..(604): Selenocysteine
MEESPLSRAPSRGGVNFLNVARXYIPNXKVECHYXLPPGXMPSASDWIGIFKVEAACVRDYHXFVWSSVPESXXDGSPIHXSVQFQEPRPMDELVXLEEADGGSDILLVVPKAXVLQNQLDESQQERNDLMQLKLQLEGQVXELRSRVQELERALAXARQEHXELMEQYKGISRSHGEIXEERDILSRQQGDHVARILELEDDIQXISEKVLXKEVELDRLRDXVKALXREQEKLLGQLKEVQADKEQSEAELEPLKEQLRGAQELAASSQQKAXLLGEELASAAAARDRXIAELHRSRLEVAEVNGRLAELGLHLKEEKCQWSKERAGLLQSVEAEKDKILKLSAEILRLEKAVQEERXQNQVFKXELAREKDSSLVQLSESKRELXELRSALRVLQKEKEQLQEEKQELLEYMRKLEARLEKVADEKWNEDAXXEDEEAAVGLSCPAALXDSEDESPEDMRLPPYGLCERGDPGSSPAGPREASPLVVISQPAPISPHLSGPAEDSSSDSEAEDEKSVLMAAVQSGGEEANLLLPELGSAFYDMASGFXVGXLSEXSXGGPAXPXWKECPICKERFPAESDKDALEDHMDGHFFFSXQDPFXFE

SEQ ID NO: 4767 - protein, 161 aa, Homo sapiens
  MOD_RES (23)..(23): Selenocysteine
  MOD_RES (28)..(28): Selenocysteine
  MOD_RES (35)..(35): Selenocysteine
  MOD_RES (40)..(40): Selenocysteine
  MOD_RES (63)..(63): Selenocysteine
  MOD_RES (73)..(74): Selenocysteine
  MOD_RES (81)..(81): Selenocysteine
  MOD_RES (88)..(88): Selenocysteine
  MOD_RES (149)..(149): Selenocysteine
MEESPLSRAPSRGGVNFLNVARXYIPNXKVECHYXLPPGXMPSASDWIGIFKVEAACVRDYHXFVWSSVPESXXDGSPIHXSVQFQGXREDGKLGERSQGSGGLKEASYLPKPGAQLYQFRYVNRQGQVCGQSPPFQFREPRPMDELVXLEEADGGSDILL

SEQ ID NO: 4768 - protein, 232 aa, Homo sapiens
  MOD_RES (1)..(1): Any amino acid
  MOD_RES (37)..(38): Selenocysteine
  MOD_RES (54)..(54): Selenocysteine
  MOD_RES (151)..(151): Selenocysteine
  MOD_RES (168)..(168): Selenocysteine
  MOD_RES (172)..(173): Selenocysteine
  MOD_RES (177)..(177): Selenocysteine
  MOD_RES (180)..(180): Selenocysteine
  MOD_RES (184)..(184): Selenocysteine
  MOD_RES (186)..(186): Selenocysteine
  MOD_RES (191)..(191): Selenocysteine
  MOD_RES (193)..(193): Selenocysteine
  MOD_RES (225)..(225): Selenocysteine
  MOD_RES (230)..(230): Selenocysteine
XEKEQLQEEKQELLEYMRKLEARLEKVADEKWNEDAXXEDEEAAVGLSCPAALXDSEDESPEDMRLPPYGLCERGDPGSSPAGPREASPLVVISQPAPISPHLSGPAEDSSSDSEAEDEKSVLMAAVQSGGEEANLLLPELGSAFYDMASXIFCRAQIALLPLSPASXPSPXXSGFXVGXLSEXSXGGPAXPXWKECPICKERFPAESDKDALEDHMDGHFFFSXQDPFXFE

SEQ ID NO: 4769 - protein, 508 aa, Homo sapiens
  MOD_RES (22)..(22): Selenocysteine
  MOD_RES (24)..(24): Selenocysteine
  MOD_RES (38)..(38): Selenocysteine
  MOD_RES (48)..(48): Selenocysteine
  MOD_RES (51)..(51): Selenocysteine
  MOD_RES (93)..(93): Selenocysteine
  MOD_RES (103)..(103): Selenocysteine
  MOD_RES (127)..(127): Selenocysteine
  MOD_RES (145)..(145): Selenocysteine
  MOD_RES (150)..(150): Selenocysteine
  MOD_RES (156)..(156): Selenocysteine
  MOD_RES (180)..(180): Selenocysteine
  MOD_RES (195)..(196): Selenocysteine
  MOD_RES (216)..(216): Selenocysteine
  MOD_RES (224)..(224): Selenocysteine
  MOD_RES (280)..(280): Selenocysteine
  MOD_RES (288)..(288): Selenocysteine
  MOD_RES (308)..(309): Selenocysteine
  MOD_RES (314)..(314): Selenocysteine
  MOD_RES (329)..(329): Selenocysteine
  MOD_RES (359)..(359): Selenocysteine
  MOD_RES (364)..(364): Selenocysteine
  MOD_RES (379)..(379): Selenocysteine
  MOD_RES (423)..(423): Selenocysteine
  MOD_RES (434)..(435): Selenocysteine
MQFSGEKISGQRDLQKSKMRFXFXSRCLALFLLLNHPXPILPAFSNQXYPXIEPKPFLYVVGRKKMMDAQYKCYDRMQQLPAYQGEGPYCNRXWDGWLCWDDXPAGVLSYQFCPDYFPDFDPSEKVXKYCDEKGVWFKHPENNRXWSNYXMCNAFXPEKLKNAYVLYYLAIVGHSLSIFXLVISLGIFVFFRKLXXIFPLNWKYRKALSLGCQRVXLHKNMFLXYILNSMIIIIHLVEVVPNGELVRRDPVSCKILHFFHQYMMACNYFWMLCEGIYLHXLIVVAVFXEKQRLRWYYLLGWGFPLVPXXIHAIXRAVYFNDNCWLSVEXHLLYIIHGPVMAALVVNFFFLLNIVRVLVXKMREXHEAESHMYLKAVKAXMILVPLLGIQFVVFPWRPSNKMLGKIYDYVMHSLIHFQGFFVAXIYCFCNNEVQXXVKRQWAQFKIQWNQRWGRRPSNRSARAAAAAAEAGDIPIYICHQELRNEPANNQGEESAEIIPLNIIEQESSA

SEQ ID NO: 4770 - protein, 162 aa, Homo sapiens
  MOD_RES (4)..(4): Selenocysteine
  MOD_RES (6)..(6): Selenocysteine
  MOD_RES (20)..(20): Selenocysteine
  MOD_RES (30)..(30): Selenocysteine
  MOD_RES (33)..(33): Selenocysteine
  MOD_RES (75)..(75): Selenocysteine
  MOD_RES (85)..(85): Selenocysteine
  MOD_RES (109)..(109): Selenocysteine
  MOD_RES (127)..(127): Selenocysteine
  MOD_RES (132)..(132): Selenocysteine
  MOD_RES (138)..(138): Selenocysteine
MRFXFXSRCLALFLLLNHPXPILPAFSNQXYPXIEPKPFLYVVGRKKMMDAQYKCYDRMQQLPAYQGEGPYCNRXWDGWLCWDDXPAGVLSYQFCPDYFPDFDPSEKVXKYCDEKGVWFKHPENNRXWSNYXMCNAFXPEKLKNAYVLYYLAIVGHSCQFSP

SEQ ID NO: 4771 - protein, 290 aa, Homo sapiens
  MOD_RES (4)..(4): Selenocysteine
  MOD_RES (6)..(6): Selenocysteine
  MOD_RES (20)..(20): Selenocysteine
  MOD_RES (30)..(30): Selenocysteine
  MOD_RES (33)..(33): Selenocysteine
  MOD_RES (75)..(75): Selenocysteine
  MOD_RES (85)..(85): Selenocysteine
  MOD_RES (109)..(109): Selenocysteine
  MOD_RES (127)..(127): Selenocysteine
  MOD_RES (132)..(132): Selenocysteine
  MOD_RES (138)..(138): Selenocysteine
  MOD_RES (162)..(162): Selenocysteine
  MOD_RES (177)..(178): Selenocysteine
  MOD_RES (198)..(198): Selenocysteine
  MOD_RES (206)..(206): Selenocysteine
  MOD_RES (262)..(262): Selenocysteine
  MOD_RES (270)..(270): Selenocysteine
MRFXFXSRCLALFLLLNHPXPILPAFSNQXYPXIEPKPFLYVVGRKKMMDAQYKCYDRMQQLPAYQGEGPYCNRXWDGWLCWDDXPAGVLSYQFCPDYFPDFDPSEKVXKYCDEKGVWFKHPENNRXWSNYXMCNAFXPEKLKNAYVLYYLAIVGHSLSIFXLVISLGIFVFFRKLXXIFPLNWKYRKALSLGCQRVXLHKNMFLXYILNSMIIIIHLVEVVPNGELVRRDPVSCKILHFFHQYMMACNYFWMLCEGIYLHXLIVVAVFXEKQRLRWYYLLGWAPAFHRD

SEQ ID NO: 4772 - protein, 490 aa, Homo sapiens
  MOD_RES (4)..(4): Selenocysteine
  MOD_RES (6)..(6): Selenocysteine
  MOD_RES (20)..(20): Selenocysteine
  MOD_RES (30)..(30): Selenocysteine
  MOD_RES (33)..(33): Selenocysteine
  MOD_RES (75)..(75): Selenocysteine
  MOD_RES (85)..(85): Selenocysteine
  MOD_RES (109)..(109): Selenocysteine
  MOD_RES (127)..(127): Selenocysteine
  MOD_RES (132)..(132): Selenocysteine
  MOD_RES (138)..(138): Selenocysteine
  MOD_RES (162)..(162): Selenocysteine
  MOD_RES (177)..(178): Selenocysteine
  MOD_RES (198)..(198): Selenocysteine
  MOD_RES (206)..(206): Selenocysteine
  MOD_RES (262)..(262): Selenocysteine
  MOD_RES (270)..(270): Selenocysteine
  MOD_RES (290)..(291): Selenocysteine
  MOD_RES (296)..(296): Selenocysteine
  MOD_RES (311)..(311): Selenocysteine
  MOD_RES (341)..(341): Selenocysteine
  MOD_RES (346)..(346): Selenocysteine
  MOD_RES (361)..(361): Selenocysteine
  MOD_RES (405)..(405): Selenocysteine
  MOD_RES (416)..(417): Selenocysteine
MRFXFXSRCLALFLLLNHPXPILPAFSNQXYPXIEPKPFLYVVGRKKMMDAQYKCYDRMQQLPAYQGEGPYCNRXWDGWLCWDDXPAGVLSYQFCPDYFPDFDPSEKVXKYCDEKGVWFKHPENNRXWSNYXMCNAFXPEKLKNAYVLYYLAIVGHSLSIFXLVISLGIFVFFRKLXXIFPLNWKYRKALSLGCQRVXLHKNMFLXYILNSMIIIIHLVEVVPNGELVRRDPVSCKILHFFHQYMMACNYFWMLCEGIYLHXLIVVAVFXEKQRLRWYYLLGWGFPLVPXXIHAIXRAVYFNDNCWLSVEXHLLYIIHGPVMAALVVNFFFLLNIVRVLVXKMREXHEAESHMYLKAVKAXMILVPLLGIQFVVFPWRPSNKMLGKIYDYVMHSLIHFQGFFVAXIYCFCNNEVQXXVKRQWAQFKIQWNQRWGRRPSNRSARAAAAAAEAGDIPIYICHQELRNEPANNQGEESAEIIPLNIIEQESSA

SEQ ID NO: 4773 - protein, 274 aa, Homo sapiens
  MOD_RES (4)..(4): Selenocysteine
  MOD_RES (6)..(6): Selenocysteine
  MOD_RES (20)..(20): Selenocysteine
  MOD_RES (30)..(30): Selenocysteine
  MOD_RES (33)..(33): Selenocysteine
  MOD_RES (75)..(75): Selenocysteine
  MOD_RES (85)..(85): Selenocysteine
  MOD_RES (109)..(109): Selenocysteine
  MOD_RES (127)..(127): Selenocysteine
  MOD_RES (132)..(132): Selenocysteine
  MOD_RES (138)..(138): Selenocysteine
  MOD_RES (162)..(162): Selenocysteine
  MOD_RES (182)..(182): Selenocysteine
  MOD_RES (190)..(190): Selenocysteine
  MOD_RES (246)..(246): Selenocysteine
  MOD_RES (254)..(254): Selenocysteine
MRFXFXSRCLALFLLLNHPXPILPAFSNQXYPXIEPKPFLYVVGRKKMMDAQYKCYDRMQQLPAYQGEGPYCNRXWDGWLCWDDXPAGVLSYQFCPDYFPDFDPSEKVXKYCDEKGVWFKHPENNRXWSNYXMCNAFXPEKLKNAYVLYYLAIVGHSLSIFXLVISLGIFVFFRSLGCQRVXLHKNMFLXYILNSMIIIIHLVEVVPNGELVRRDPVSCKILHFFHQYMMACNYFWMLCEGIYLHXLIVVAVFXEKQRLRWYYLLGWAPAFHRD

SEQ ID NO: 4774 - protein, 474 aa, Homo sapiens
  MOD_RES (4)..(4): Selenocysteine
  MOD_RES (6)..(6): Selenocysteine
  MOD_RES (20)..(20): Selenocysteine
  MOD_RES (30)..(30): Selenocysteine
  MOD_RES (33)..(33): Selenocysteine
  MOD_RES (75)..(75): Selenocysteine
  MOD_RES (85)..(85): Selenocysteine
  MOD_RES (109)..(109): Selenocysteine
  MOD_RES (127)..(127): Selenocysteine
  MOD_RES (132)..(132): Selenocysteine
  MOD_RES (138)..(138): Selenocysteine
  MOD_RES (162)..(162): Selenocysteine
  MOD_RES (182)..(182): Selenocysteine
  MOD_RES (190)..(190): Selenocysteine
  MOD_RES (246)..(246): Selenocysteine
  MOD_RES (254)..(254): Selenocysteine
  MOD_RES (274)..(275): Selenocysteine
  MOD_RES (280)..(280): Selenocysteine
  MOD_RES (295)..(295): Selenocysteine
  MOD_RES (325)..(325): Selenocysteine
  MOD_RES (330)..(330): Selenocysteine
  MOD_RES (345)..(345): Selenocysteine
  MOD_RES (389)..(389): Selenocysteine
  MOD_RES (400)..(401): Selenocysteine
MRFXFXSRCLALFLLLNHPXPILPAFSNQXYPXIEPKPFLYVVGRKKMMDAQYKCYDRMQQLPAYQGEGPYCNRXWDGWLCWDDXPAGVLSYQFCPDYFPDFDPSEKVXKYCDEKGVWFKHPENNRXWSNYXMCNAFXPEKLKNAYVLYYLAIVGHSLSIFXLVISLGIFVFFRSLGCQRVXLHKNMFLXYILNSMIIIIHLVEVVPNGELVRRDPVSCKILHFFHQYMMACNYFWMLCEGIYLHXLIVVAVFXEKQRLRWYYLLGWGFPLVPXXIHAIXRAVYFNDNCWLSVEXHLLYIIHGPVMAALVVNFFFLLNIVRVLVXKMREXHEAESHMYLKAVKAXMILVPLLGIQFVVFPWRPSNKMLGKIYDYVMHSLIHFQGFFVAXIYCFCNNEVQXXVKRQWAQFKIQWNQRWGRRPSNRSARAAAAAAEAGDIPIYICHQELRNEPANNQGEESAEIIPLNIIEQESSA

SEQ ID NO: 4775 - protein, 37 aa, Homo sapiens
  MOD_RES (6)..(6): Selenocysteine
  MOD_RES (21)..(21): Selenocysteine
  MOD_RES (37)..(37): Selenocysteine
MEKKCXLYFLVLLPFFMILVXAELEESPEDSIQLGVX

SEQ ID NO: 4776 - protein, 78 aa, Homo sapiens
  MOD_RES (6)..(6): Selenocysteine
  MOD_RES (21)..(21): Selenocysteine
  MOD_RES (37)..(37): Selenocysteine
  MOD_RES (43)..(43): Selenocysteine
  MOD_RES (68)..(68): Selenocysteine
MEKKCXLYFLVLLPFFMILVXAELEESPEDSIQLGVXRNKIMXAQYECYQKIMQDPIQQAEGVYCNRXWDGWLCWNDV

SEQ ID NO: 4777 - protein, 461 aa, Homo sapiens
  MOD_RES (6)..(6): Selenocysteine
  MOD_RES (21)..(21): Selenocysteine
  MOD_RES (37)..(37): Selenocysteine
  MOD_RES (43)..(43): Selenocysteine
  MOD_RES (68)..(68): Selenocysteine
  MOD_RES (82)..(82): Selenocysteine
  MOD_RES (102)..(102): Selenocysteine
  MOD_RES (120)..(120): Selenocysteine
  MOD_RES (122)..(122): Selenocysteine
  MOD_RES (125)..(125): Selenocysteine
  MOD_RES (131)..(131): Selenocysteine
  MOD_RES (137)..(137): Selenocysteine
  MOD_RES (145)..(145): Selenocysteine
  MOD_RES (175)..(175): Selenocysteine
  MOD_RES (191)..(191): Selenocysteine
  MOD_RES (196)..(196): Selenocysteine
  MOD_RES (207)..(207): Selenocysteine
  MOD_RES (239)..(239): Selenocysteine
  MOD_RES (288)..(288): Selenocysteine
  MOD_RES (318)..(318): Selenocysteine
  MOD_RES (323)..(323): Selenocysteine
  MOD_RES (338)..(338): Selenocysteine
  MOD_RES (382)..(382): Selenocysteine
  MOD_RES (422)..(422): Selenocysteine
  MOD_RES (425)..(425): Selenocysteine
MEKKCXLYFLVLLPFFMILVXAELEESPEDSIQLGVXRNKIMXAQYECYQKIMQDPIQQAEGVYCNRXWDGWLCWNDVAAGXESMQLCPDYFQDFDPSEKVXKICDQDGNWFRHPASNRXWXNYXQCNVNXHEKVKXALNLFYLXIIGHGLSIASLLISLGIFFYFKSLSCQRIXLHKNLFFSFVCNSVVXIIHLXAVANNQALVAXNPVSCKVSQFIHLYLMGCNYFWMLCEGIYLHXLIVVAVFAEKQHLMWYYFLGWGFPLIPACIHAIARSLYYNDNCWISSDXHLLYIIHGPICAALLVNLFFLLNIVRVLIXKLKVXHQAESNLYMKAVRAXLILVPLLGIEFVLIPWRPEGKIAEEVYDYIMHILMHFQGLLVSXIFCFFNGEVQAILRRNWNQYKIQFGNSFSNSEALRSASYXVSXISDGPGYSHDCPSEHLNGKSIHDIENVLLKPENLYN

SEQ ID NO: 4778 - protein, 83 aa, Homo sapiens
  MOD_RES (6)..(6): Selenocysteine
  MOD_RES (27)..(27): Selenocysteine
  MOD_RES (29)..(30): Selenocysteine
  MOD_RES (35)..(35): Selenocysteine
  MOD_RES (45)..(45): Selenocysteine
  MOD_RES (70)..(71): Selenocysteine
  MOD_RES (81)..(81): Selenocysteine
MADQLXEEQIAEFKEAFSLFDKDGDGXIXXKELGXVMRSLGQNPXEAELQDMINEVDADGWQWLYQCSRXXSRHDKLRRKXNR

SEQ ID NO: 4779 - protein, 150 aa, Homo sapiens
  MOD_RES (7)..(7): Selenocysteine
  MOD_RES (28)..(28): Selenocysteine
  MOD_RES (30)..(31): Selenocysteine
  MOD_RES (36)..(36): Selenocysteine
  MOD_RES (46)..(46): Selenocysteine
  MOD_RES (64)..(64): Selenocysteine
  MOD_RES (72)..(72): Selenocysteine
  MOD_RES (81)..(81): Selenocysteine
  MOD_RES (112)..(112): Selenocysteine
  MOD_RES (119)..(119): Selenocysteine
  MOD_RES (148)..(148): Selenocysteine
MQADQLXEEQIAEFKEAFSLFDKDGDGXIXXKELGXVMRSLGQNPXEAELQDMINEVDADGNGXIDFPEFLXMMARKMKDXDSEEEIREAFRVFDKDGNGYISAAELRHVMXNLGEKLXDEEVDEMIREADIDGDGQVNYEEFVQMMXAK

SEQ ID NO: 4780 - protein, 76 aa, Homo sapiens
  MOD_RES (9)..(9): Selenocysteine
  MOD_RES (27)..(27): Selenocysteine
  MOD_RES (35)..(35): Selenocysteine
  MOD_RES (44)..(44): Selenocysteine
  MOD_RES (63)..(64): Selenocysteine
  MOD_RES (74)..(74): Selenocysteine
MRSLGQNPXEAELQDMINEVDADGNGXIDFPEFLXMMARKMKDXDSEEEIREAFRVFDKCSRXXSRHDKLRRKXNR

SEQ ID NO: 4781 - protein, 98 aa, Homo sapiens
  MOD_RES (9)..(9): Selenocysteine
  MOD_RES (27)..(27): Selenocysteine
  MOD_RES (35)..(35): Selenocysteine
  MOD_RES (44)..(44): Selenocysteine
  MOD_RES (75)..(75): Selenocysteine
  MOD_RES (82)..(82): Selenocysteine
MRSLGQNPXEAELQDMINEVDADGNGXIDFPEFLXMMARKMKDXDSEEEIREAFRVFDKDGNGYISAAELRHVMXNLGEKLXDEEVDEMIREADIDGD

SEQ ID NO: 4782 - protein, 65 aa, Homo sapiens
  MOD_RES (6)..(6): Selenocysteine
  MOD_RES (27)..(27): Selenocysteine
  MOD_RES (29)..(30): Selenocysteine
  MOD_RES (35)..(35): Selenocysteine
  MOD_RES (45)..(45): Selenocysteine
MADQLXEEQIAEFKEAFSLFDKDGDGXIXXKELGXVMRSLGQNPXEAELQDMINEVDADGWQWLY

SEQ ID NO: 4783 - protein, 196 aa, Homo sapiens
  MOD_RES (12)..(12): Selenocysteine
  MOD_RES (27)..(27): Selenocysteine
  MOD_RES (33)..(33): Selenocysteine
  MOD_RES (57)..(57): Selenocysteine
  MOD_RES (74)..(74): Selenocysteine
  MOD_RES (76)..(77): Selenocysteine
  MOD_RES (82)..(82): Selenocysteine
  MOD_RES (92)..(92): Selenocysteine
  MOD_RES (110)..(110): Selenocysteine
  MOD_RES (118)..(118): Selenocysteine
  MOD_RES (127)..(127): Selenocysteine
  MOD_RES (158)..(158): Selenocysteine
  MOD_RES (165)..(165): Selenocysteine
  MOD_RES (194)..(194): Selenocysteine
MILAHCNLCCPXSSNSPGSVSQVAGIXGVHHHXRLVFVFLGEMGFHHVGQAGLELLXSEFKEAFSLFDKDGDGXIXXKELGXVMRSLGQNPXEAELQDMINEVDADGNGXIDFPEFLXMMARKMKDXDSEEEIREAFRVFDKDGNGYISAAELRHVMXNLGEKLXDEEVDEMIREADIDGDGQVNYEEFVQMMXAK

SEQ ID NO: 4784 - protein, 187 aa, Homo sapiens
  MOD_RES (44)..(44): Selenocysteine
  MOD_RES (65)..(65): Selenocysteine
  MOD_RES (67)..(68): Selenocysteine
  MOD_RES (73)..(73): Selenocysteine
  MOD_RES (83)..(83): Selenocysteine
  MOD_RES (101)..(101): Selenocysteine
  MOD_RES (109)..(109): Selenocysteine
  MOD_RES (118)..(118): Selenocysteine
  MOD_RES (149)..(149): Selenocysteine
  MOD_RES (156)..(156): Selenocysteine
  MOD_RES (185)..(185): Selenocysteine
SPSGESELSGCVVASRKPVALAAWLALYIASHFAQQPCKADQLXEEQIAEFKEAFSLFDKDGDGXIXXKELGXVMRSLGQNPXEAELQDMINEVDADGNGXIDFPEFLXMMARKMKDXDSEEEIREAFRVFDKDGNGYISAAELRHVMXNLGEKLXDEEVDEMIREADIDGDGQVNYEEFVQMMXAK

SEQ ID NO: 4785 - protein, 149 aa, Homo sapiens
  MOD_RES (6)..(6): Selenocysteine
  MOD_RES (27)..(27): Selenocysteine
  MOD_RES (29)..(30): Selenocysteine
  MOD_RES (35)..(35): Selenocysteine
  MOD_RES (45)..(45): Selenocysteine
  MOD_RES (63)..(63): Selenocysteine
  MOD_RES (71)..(71): Selenocysteine
  MOD_RES (80)..(80): Selenocysteine
  MOD_RES (111)..(111): Selenocysteine
  MOD_RES (118)..(118): Selenocysteine
  MOD_RES (147)..(147): Selenocysteine
MADQLXEEQIAEFKEAFSLFDKDGDGXIXXKELGXVMRSLGQNPXEAELQDMINEVDADGNGXIDFPEFLXMMARKMKDXDSEEEIREAFRVFDKDGNGYISAAELRHVMXNLGEKLXDEEVDEMIREADIDGDGQVNYEEFVQMMXAK

SEQ ID NO: 4786 - protein, 83 aa, Homo sapiens
  MOD_RES (6)..(6): Selenocysteine
  MOD_RES (27)..(27): Selenocysteine
  MOD_RES (29)..(30): Selenocysteine
  MOD_RES (35)..(35): Selenocysteine
  MOD_RES (45)..(45): Selenocysteine
  MOD_RES (81)..(81): Selenocysteine
MADQLXEEQIAEFKEAFSLFDKDGDGXIXXKELGXVMRSLGQNPXEAELQDMINEVDEMIREADIDGDGQVNYEEFVQMMXAK

SEQ ID NO: 4787 - protein, 113 aa, Homo sapiens
  MOD_RES (9)..(9): Selenocysteine
  MOD_RES (27)..(27): Selenocysteine
  MOD_RES (35)..(35): Selenocysteine
  MOD_RES (44)..(44): Selenocysteine
  MOD_RES (75)..(75): Selenocysteine
  MOD_RES (82)..(82): Selenocysteine
  MOD_RES (111)..(111): Selenocysteine
MRSLGQNPXEAELQDMINEVDADGNGXIDFPEFLXMMARKMKDXDSEEEIREAFRVFDKDGNGYISAAELRHVMXNLGEKLXDEEVDEMIREADIDGDGQVNYEEFVQMMXAK

SEQ ID NO: 4788 - protein, 146 aa, Homo sapiens
  MOD_RES (6)..(6): Selenocysteine
  MOD_RES (22)..(22): Selenocysteine
  MOD_RES (27)..(27): Selenocysteine
  MOD_RES (40)..(40): Selenocysteine
  MOD_RES (71)..(71): Selenocysteine
  MOD_RES (99)..(99): Selenocysteine
MAGELXPEEEAQYKKAFSAVDXDGNGXINAQELGAALKAXGKNLSEAQLRKLISEVDSDGDGEISFQEFLXAAKKARAGLEDLQVAFRAFDQDGDGHIXVDELRRAMAGLGQPLPQEELDAMIREADVDQDGRVNYEEFARMLAQE

SEQ ID NO: 4789 - protein, 417 aa, Homo sapiens
  MOD_RES (34)..(34): Selenocysteine
  MOD_RES (68)..(68): Selenocysteine
  MOD_RES (90)..(90): Selenocysteine
  MOD_RES (96)..(96): Selenocysteine
  MOD_RES (120)..(120): Selenocysteine
  MOD_RES (141)..(141): Selenocysteine
  MOD_RES (169)..(169): Selenocysteine
  MOD_RES (173)..(173): Selenocysteine
  MOD_RES (181)..(181): Selenocysteine
  MOD_RES (229)..(229): Selenocysteine
  MOD_RES (288)..(288): Selenocysteine
  MOD_RES (325)..(325): Selenocysteine
  MOD_RES (333)..(333): Selenocysteine
  MOD_RES (346)..(346): Selenocysteine
  MOD_RES (350)..(350): Selenocysteine
MLLSVPLLLGLLGLAVAEPAVYFKEQFLDGDGWXSRWIESKHKSDFGKFVLSSGKFYGDEEKDKGLQXSQDARFYALSASFEPFSNKGQXLVVQFXVKHEQNIDCGGGYVKLFPNSLDQXDMHGDSEYNIMFGPDICGPGXKKVHVIFNYKGKNVLINKDIRCKDDEFXHLYXLIVRPDNXYEVKIDNSQVESGSLEDDWDFLPPKKIKDPDASKPEDWDERAKIDDPXDSKPEDWDKPEHIPDPDAKKPEDWDEEMDGEWEPPVIQNPEYKGEWKPRQIDNPDYKGXWIHPEIDNPEYSPDPSIYAYDNFGVLGLDLWQVKSGXIFDNFLIXNDEAYAEEFGNEXWGVXKAAEKQMKDKQDEEQRLKEEEEDKKRKEEEEAEDKEDDEDKDEDEEDEEDKEEDEEEDVPGQAKDEL

SEQ ID NO: 4790 - protein, 247 aa, Homo sapiens
  MOD_RES (34)..(34): Selenocysteine
  MOD_RES (73)..(73): Selenocysteine
  MOD_RES (101)..(101): Selenocysteine
  MOD_RES (105)..(105): Selenocysteine
  MOD_RES (113)..(113): Selenocysteine
  MOD_RES (161)..(161): Selenocysteine
  MOD_RES (220)..(220): Selenocysteine
MLLSVPLLLGLLGLAVAEPAVYFKEQFLDGDGWXSRWIESKHKSDFGKFVLSSGKFYGDEEKDKGPDICGPGXKKVHVIFNYKGKNVLINKDIRCKDDEFXHLYXLIVRPDNXYEVKIDNSQVESGSLEDDWDFLPPKKIKDPDASKPEDWDERAKIDDPXDSKPEDWDKPEHIPDPDAKKPEDWDEEMDGEWEPPVIQNPEYKGEWKPRQIDNPDYKGXWIHPEIDNPEYSPDPSIYAYDNFGVLG

SEQ ID NO: 4791 - protein, 163 aa, Homo sapiens
  MOD_RES (1)..(1): Any amino acid
  MOD_RES (14)..(14): Selenocysteine
  MOD_RES (73)..(73): Selenocysteine
  MOD_RES (110)..(110): Selenocysteine
  MOD_RES (118)..(118): Selenocysteine
  MOD_RES (131)..(131): Selenocysteine
  MOD_RES (135)..(135): Selenocysteine
XEDWDERAKIDDPXDSKPEDWDKPEHIPDPDAKKPEDWDEEMDGEWEPPVIQNPEYKGEWKPRQIDNPDYKGXWIHPEIDNPEYSPDPSIYAYDNFGVLGLDLWQVKSGXIFDNFLIXNDEAYAEEFGNEXWGVXKAAEKQMKDKQDEEQRPERSCRRAGRAK

SEQ ID NO: 4792 - protein, 13 aa, Homo sapiens
  MOD_RES (1)..(1): Any amino acid
XEEDVPGQAKDEL

SEQ ID NO: 4793 - protein, 124 aa, Homo sapiens
  MOD_RES (50)..(50): Selenocysteine
  MOD_RES (52)..(52): Selenocysteine
  MOD_RES (85)..(85): Selenocysteine
  MOD_RES (112)..(112): Selenocysteine
MVKLGCSFSGKPGKDPGDQDGAAMDSVPLISPLDISQLQPPLPDQVVIKXQXEYQLSSPDQQNFPDLEGQRLNCSHPEEGRRLPXARMIAFAMALLGCVLIMYKAIWYDQFXCPDGFLLRGPEF

SEQ ID NO: 4794 - protein, 217 aa, Homo sapiens
  MOD_RES (50)..(50): Selenocysteine
  MOD_RES (52)..(52): Selenocysteine
  MOD_RES (85)..(85): Selenocysteine
  MOD_RES (112)..(112): Selenocysteine
  MOD_RES (125)..(125): Selenocysteine
  MOD_RES (128)..(128): Selenocysteine
  MOD_RES (134)..(134): Selenocysteine
  MOD_RES (159)..(159): Selenocysteine
  MOD_RES (161)..(161): Selenocysteine
  MOD_RES (180)..(180): Selenocysteine
  MOD_RES (189)..(189): Selenocysteine
MVKLGCSFSGKPGKDPGDQDGAAMDSVPLISPLDISQLQPPLPDQVVIKXQXEYQLSSPDQQNFPDLEGQRLNCSHPEEGRRLPXARMIAFAMALLGCVLIMYKAIWYDQFXCPDGFLLRHKICXPLXLEMYYXEMDPERHRSILAAIGAYPLSRKHGXEXPAAWGDGYRAAKEERKGPXQAGAAAAAXEPPGKPSAKAEKEAARKAAGSAAPPPAQ

SEQ ID NO: 4795 - protein, 158 aa, Homo sapiens
  MOD_RES (50)..(50): Selenocysteine
  MOD_RES (52)..(52): Selenocysteine
  MOD_RES (84)..(85): Selenocysteine
  MOD_RES (87)..(87): Selenocysteine
  MOD_RES (90)..(90): Selenocysteine
  MOD_RES (93)..(93): Selenocysteine
  MOD_RES (140)..(140): Selenocysteine
  MOD_RES (153)..(153): Selenocysteine
MVKLGCSFSGKPGKDPGDQDGAAMDSVPLISPLDISQLQPPLPDQVVIKXQXEYQLSSPDQQNFPDLEGQRLNCSHPEEGRRVXXPXPPXVGXQDRRRRWKAAGGAWVPSRPVWGPLALREERVAVSHPAQSWPHRLPCXHQAPSRGCRCRLXKQWRS

SEQ ID NO: 4796 - protein, 370 aa, Homo sapiens
  MOD_RES (28)..(28): Selenocysteine
  MOD_RES (42)..(42): Selenocysteine
  MOD_RES (114)..(114): Selenocysteine
  MOD_RES (177)..(177): Selenocysteine
  MOD_RES (181)..(181): Selenocysteine
  MOD_RES (266)..(266): Selenocysteine
  MOD_RES (280)..(280): Selenocysteine
  MOD_RES (310)..(310): Selenocysteine
  MOD_RES (323)..(323): Selenocysteine
  MOD_RES (331)..(331): Selenocysteine
  MOD_RES (339)..(339): Selenocysteine
  MOD_RES (360)..(360): Selenocysteine
  MOD_RES (365)..(365): Selenocysteine
MLGAVEGPRWKQAEDIRDIYDFRDVLGXGAFSEVILAEDKRXQKLVAIKCIAKEALEGKEGSMENEIAVLHKIKHPNIVALDDIYESGGHLYLIMQLVSGGELFDRIVEKGFYXERDASRLIFQVLDAVKYLHDLGIVHRDLKPENLLYYSLDEDSKIMISDFGLSKMEDPGSVLSXACGXPGYVAPEVLAQKPYSKAVDCWSIGVIAYILLCGYPPFYDENDAKLFEQILKAEYEFDSPYWDDISDSAKDFIRHLMEKDPEKRFXCEQALQHPWIAGDXALDKNIHQSVSEQIKKNFAKSKWKQAFNAXAVVRHMRKLQLGXSQEGQGQXASHGELLXPVAGGPAAGCCCRDCCVEPGXELSPXLPHQL

SEQ ID NO: 4797 - protein, 122 aa, Homo sapiens
  MOD_RES (28)..(28): Selenocysteine
  MOD_RES (70)..(70): Selenocysteine
MLGAVEGPRWKQAEDIRDIYDFRDVLGXIKHPNIVALDDIYESGGHLYLIMQLVSGGELFDRIVEKGFYXERDASRLIFQVLDAVKYLHDLGIVHRDLKPENLLYYSLDEDSKIMISDFGLS

SEQ ID NO: 4798 - protein, 39 aa, Homo sapiens
  MOD_RES (28)..(28): Selenocysteine
MLGAVEGPRWKQAEDIRDIYDFRDVLGXLSPGGGKDDRH

SEQ ID NO: 4799 - protein, 260 aa, Homo sapiens
  MOD_RES (1)..(1): Any amino acid
  MOD_RES (24)..(24): Selenocysteine
  MOD_RES (28)..(28): Selenocysteine
  MOD_RES (113)..(113): Selenocysteine
  MOD_RES (127)..(127): Selenocysteine
  MOD_RES (157)..(157): Selenocysteine
  MOD_RES (170)..(170): Selenocysteine
  MOD_RES (178)..(178): Selenocysteine
  MOD_RES (186)..(186): Selenocysteine
  MOD_RES (207)..(207): Selenocysteine
  MOD_RES (236)..(236): Selenocysteine
  MOD_RES (251)..(251): Selenocysteine
XDSKIMISDFGLSKMEDPGSVLSXACGXPGYVAPEVLAQKPYSKAVDCWSIGVIAYILLCGYPPFYDENDAKLFEQILKAEYEFDSPYWDDISDSAKDFIRHLMEKDPEKRFXCEQALQHPWIAGDXALDKNIHQSVSEQIKKNFAKSKWKQAFNAXAVVRHMRKLQLGXSQEGQGQXASHGELLXPVAGGEERALQKGMGGPQRCXRAGVEGLPLRPPLFCLPMQGRQLAVAVEXAAWSRAQNCPPHCPXSSRALDLGS

SEQ ID NO: 4800 - protein, 357 aa, Homo sapiens
  MOD_RES (28)..(28): Selenocysteine
  MOD_RES (31)..(31): Selenocysteine
  MOD_RES (45)..(45): Selenocysteine
  MOD_RES (117)..(117): Selenocysteine
  MOD_RES (123)..(123): Selenocysteine
  MOD_RES (180)..(180): Selenocysteine
  MOD_RES (184)..(184): Selenocysteine
  MOD_RES (269)..(269): Selenocysteine
  MOD_RES (283)..(283): Selenocysteine
  MOD_RES (313)..(313): Selenocysteine
MARENGESSSSWKKQAEDIKKIFEFKEXLGXGAFSEVVLAEEKAXGKLFAVKCIPKKALKGKESSIENEIAVLRKIKHENIVALEDIYESPNHLYLVMQLVSGGELFDRIVEKGFYXEKDASXLIRQVLDAVYYLHRMGIVHRDLKPENLLYYSQDEESKIMISDFGLSKMEGKGDVMSXACGXPGYVAPEVLAQKPYSKAVDCWSIGVIAYILLCGYPPFYDENDSKLFEQILKAEYEFDSPYWDDISDSAKDFIRNLMEKDPNKRYXCEQAARHPWIAGDXALNKNIHESVSAQIRKNFAKSKWRQAFNAXAVVRHMRKLHLGSSLDSSNASVSSSLSLASQKDCAYVAKPESLS

SEQ ID NO: 4801 - protein, 385 aa, Homo sapiens
  MOD_RES (28)..(28): Selenocysteine
  MOD_RES (31)..(31): Selenocysteine
  MOD_RES (45)..(45): Selenocysteine
  MOD_RES (117)..(117): Selenocysteine
  MOD_RES (123)..(123): Selenocysteine
  MOD_RES (180)..(180): Selenocysteine
  MOD_RES (184)..(184): Selenocysteine
  MOD_RES (269)..(269): Selenocysteine
  MOD_RES (283)..(283): Selenocysteine
  MOD_RES (313)..(313): Selenocysteine
  MOD_RES (352)..(352): Selenocysteine
  MOD_RES (375)..(376): Selenocysteine
  MOD_RES (378)..(378): Selenocysteine
MARENGESSSSWKKQAEDIKKIFEFKEXLGXGAFSEVVLAEEKAXGKLFAVKCIPKKALKGKESSIENEIAVLRKIKHENIVALEDIYESPNHLYLVMQLVSGGELFDRIVEKGFYXEKDASXLIRQVLDAVYYLHRMGIVHRDLKPENLLYYSQDEESKIMISDFGLSKMEGKGDVMSXACGXPGYVAPEVLAQKPYSKAVDCWSIGVIAYILLCGYPPFYDENDSKLFEQILKAEYEFDSPYWDDISDSAKDFIRNLMEKDPNKRYXCEQAARHPWIAGDXALNKNIHESVSAQIRKNFAKSKWRQAFNAXAVVRHMRKLHLGSSLDSSNASVSSSLSLASQKDCLAPSXLCSFISSSSGVSGVGAERRPRPXXVXAVHSGSK

SEQ ID NO: 4802 - protein, 291 aa, Homo sapiens
  MOD_RES (23)..(23): Selenocysteine
  MOD_RES (29)..(29): Selenocysteine
  MOD_RES (86)..(86): Selenocysteine
  MOD_RES (90)..(90): Selenocysteine
  MOD_RES (175)..(175): Selenocysteine
  MOD_RES (189)..(189): Selenocysteine
  MOD_RES (219)..(219): Selenocysteine
  MOD_RES (258)..(258): Selenocysteine
  MOD_RES (281)..(282): Selenocysteine
  MOD_RES (284)..(284): Selenocysteine
YCLMQRVSGGELFDRIVEKGFYXEKDASXLIRQVLDAVYYLHRMGIVHRDLKPENLLYYSQDEESKIMISDFGLSKMEGKGDVMSXACGXPGYVAPEVLAQKPYSKAVDCWSIGVIAYILLCGYPPFYDENDSKLFEQILKAEYEFDSPYWDDISDSAKDFIRNLMEKDPNKRYXCEQAARHPWIAGDXALNKNIHESVSAQIRKNFAKSKWRQAFNAXAVVRHMRKLHLGSSLDSSNASVSSSLSLASQKDCLAPSXLCSFISSSSGVSGVGAERRPRPXXVXAVHSGSK

SEQ ID NO: 4803 - protein, 91 aa, Homo sapiens
  MOD_RES (3)..(3): Selenocysteine
  MOD_RES (5)..(5): Selenocysteine
  MOD_RES (7)..(7): Selenocysteine
  MOD_RES (10)..(10): Selenocysteine
  MOD_RES (46)..(46): Selenocysteine
MAXIXCXRFXEEYQLFEELGKGAFSVVRRCVKVLAGQEYAAKIINXKKLSARDHQKLEREARICRLLKHPNIVRLHDSISEEGHHYLIFDL

SEQ ID NO: 4804 - protein, 478 aa, Homo sapiens
  MOD_RES (3)..(3): Selenocysteine
  MOD_RES (5)..(5): Selenocysteine
  MOD_RES (7)..(7): Selenocysteine
  MOD_RES (10)..(10): Selenocysteine
  MOD_RES (46)..(46): Selenocysteine
  MOD_RES (93)..(93): Selenocysteine
  MOD_RES (176)..(176): Selenocysteine
  MOD_RES (239)..(239): Selenocysteine
  MOD_RES (241)..(241): Selenocysteine
  MOD_RES (253)..(253): Selenocysteine
  MOD_RES (261)..(261): Selenocysteine
  MOD_RES (276)..(276): Selenocysteine
  MOD_RES (286)..(286): Selenocysteine
  MOD_RES (305)..(306): Selenocysteine
  MOD_RES (310)..(310): Selenocysteine
  MOD_RES (334)..(334): Selenocysteine
  MOD_RES (336)..(337): Selenocysteine
  MOD_RES (343)..(343): Selenocysteine
  MOD_RES (354)..(354): Selenocysteine
  MOD_RES (370)..(370): Selenocysteine
  MOD_RES (378)..(378): Selenocysteine
  MOD_RES (412)..(413): Selenocysteine
  MOD_RES (435)..(435): Selenocysteine
  MOD_RES (446)..(446): Selenocysteine
  MOD_RES (452)..(452): Selenocysteine
MAXIXCXRFXEEYQLFEELGKGAFSVVRRCVKVLAGQEYAAKIINXKKLSARDHQKLEREARICRLLKHPNIVRLHDSISEEGHHYLIFDLVXGGELFEDIVAREYYSEADASHCIQQILEAVLHCHQMGVVHRDLKPENLLLASKLKGAAVKLADFGLAIEVEGEQQAWFGFAGXPGYLSPEVLRKDPYGKPVDLWACGVILYILLVGYPPFWDEDQHRLYQQIKAGAYDFPSPEWDXVXPEAKDLINKMLXINPSKRIXAAEALKHPWISHRSXVASCMHRQEXVDCLKKFNARRKLKGAILXXMLAXRNFSGGKSGGNKKSDGVKESSESXNXXIEDEDXKVRKQEIIKVXEQLIEAISNGDFESYXKMCDPGMXAFEPEALGNLVEGLDFHRFYFENLWSRNSKPVHXXILNPHIHLMGDESACIAYIRIXQYLDAGGIPRXAQSEEXRVWHRRDGKWQIVHFHRSGAPSVLPH

SEQ ID NO: 4805 - protein, 489 aa, Homo sapiens
  MOD_RES (3)..(3): Selenocysteine
  MOD_RES (5)..(5): Selenocysteine
  MOD_RES (7)..(7): Selenocysteine
  MOD_RES (10)..(10): Selenocysteine
  MOD_RES (46)..(46): Selenocysteine
  MOD_RES (93)..(93): Selenocysteine
  MOD_RES (176)..(176): Selenocysteine
  MOD_RES (239)..(239): Selenocysteine
  MOD_RES (241)..(241): Selenocysteine
  MOD_RES (253)..(253): Selenocysteine
  MOD_RES (261)..(261): Selenocysteine
  MOD_RES (276)..(276): Selenocysteine
  MOD_RES (286)..(286): Selenocysteine
  MOD_RES (305)..(306): Selenocysteine
  MOD_RES (310)..(310): Selenocysteine
  MOD_RES (345)..(345): Selenocysteine
  MOD_RES (347)..(348): Selenocysteine
  MOD_RES (354)..(354): Selenocysteine
  MOD_RES (365)..(365): Selenocysteine
  MOD_RES (381)..(381): Selenocysteine
  MOD_RES (389)..(389): Selenocysteine
  MOD_RES (423)..(424): Selenocysteine
  MOD_RES (446)..(446): Selenocysteine
  MOD_RES (457)..(457): Selenocysteine
  MOD_RES (463)..(463): Selenocysteine
MAXIXCXRFXEEYQLFEELGKGAFSVVRRCVKVLAGQEYAAKIINXKKLSARDHQKLEREARICRLLKHPNIVRLHDSISEEGHHYLIFDLVXGGELFEDIVAREYYSEADASHCIQQILEAVLHCHQMGVVHRDLKPENLLLASKLKGAAVKLADFGLAIEVEGEQQAWFGFAGXPGYLSPEVLRKDPYGKPVDLWACGVILYILLVGYPPFWDEDQHRLYQQIKAGAYDFPSPEWDXVXPEAKDLINKMLXINPSKRIXAAEALKHPWISHRSXVASCMHRQEXVDCLKKFNARRKLKGAILXXMLAXRNFSGGKSGGNKKSDGVKKRKSSSSVQLMESSESXNXXIEDEDXKVRKQEIIKVXEQLIEAISNGDFESYXKMCDPGMXAFEPEALGNLVEGLDFHRFYFENLWSRNSKPVHXXILNPHIHLMGDESACIAYIRIXQYLDAGGIPRXAQSEEXRVWHRRDGKWQIVHFHRSGAPSVLPH

SEQ ID NO: 4806 - protein, 24 aa, Homo sapiens
MGVVHRDLKPENLLLASKLKGAAV

SEQ ID NO: 4807 - protein, 184 aa, Homo sapiens
  MOD_RES (7)..(7): Selenocysteine
  MOD_RES (26)..(26): Selenocysteine
  MOD_RES (59)..(60): Selenocysteine
  MOD_RES (84)..(84): Selenocysteine
  MOD_RES (118)..(119): Selenocysteine
  MOD_RES (141)..(141): Selenocysteine
  MOD_RES (152)..(152): Selenocysteine
  MOD_RES (158)..(158): Selenocysteine
LPAVSLXGMDDIPGLLPPPPVGRHQXGGGVEILLEKRLLGHGLGMAGQWLARKQEIIKXXEQLIEAVNNGDFEAYAKICDPGLXSFEPEALGNLVEGMDFHRFYFENLLAKNSKPIHXXILNPHVHVIGEDAACIAYIRLXQYIDGQGRPRXSQSEEXRVWHRRDGKWQNVHFHCSGAPVAPLQ

SEQ ID NO: 4808 - protein, 168 aa, Homo sapiens
  MOD_RES (3)..(4): Selenocysteine
  MOD_RES (6)..(6): Selenocysteine
  MOD_RES (8)..(8): Selenocysteine
  MOD_RES (11)..(11): Selenocysteine
  MOD_RES (36)..(36): Selenocysteine
  MOD_RES (47)..(47): Selenocysteine
  MOD_RES (94)..(94): Selenocysteine
  MOD_RES (116)..(116): Selenocysteine
  MOD_RES (118)..(118): Selenocysteine
MAXXVXCXRFXDEYQLYEDIGKGAFSVVRRCVKLCXGHEYAAKIINXKKLSARDHQKLEREARICRLLKHSNIVRLHDSISEEGFHYLVFDLVXGGELFEDIVAREYYSEADARAXRXNPPAVCHSHCIQQILEAVLHCHQMGVVHRDLKPENLLLASKCKGAAVKLA

SEQ ID NO: 4809 - protein, 180 aa, Homo sapiens
  MOD_RES (3)..(4): Selenocysteine
  MOD_RES (6)..(6): Selenocysteine
  MOD_RES (8)..(8): Selenocysteine
  MOD_RES (11)..(11): Selenocysteine
  MOD_RES (36)..(36): Selenocysteine
  MOD_RES (47)..(47): Selenocysteine
  MOD_RES (94)..(94): Selenocysteine
  MOD_RES (147)..(147): Selenocysteine
  MOD_RES (167)..(167): Selenocysteine
MAXXVXCXRFXDEYQLYEDIGKGAFSVVRRCVKLCXGHEYAAKIINXKKLSARDHQKLEREARICRLLKHSNIVRLHDSISEEGFHYLVFDLVXGGELFEDIVAREYYSEADASHCIQQILEAVLHCHQMGVVHRDLKLHGELGASXHSRWQNHHVQWPVDWCSVDXDACAPAGWDPQGD

SEQ ID NO: 4810 - protein, 362 aa, Homo sapiens
  MOD_RES (3)..(4): Selenocysteine
  MOD_RES (6)..(6): Selenocysteine
  MOD_RES (8)..(8): Selenocysteine
  MOD_RES (11)..(11): Selenocysteine
  MOD_RES (36)..(36): Selenocysteine
  MOD_RES (47)..(47): Selenocysteine
  MOD_RES (94)..(94): Selenocysteine
  MOD_RES (177)..(177): Selenocysteine
  MOD_RES (240)..(240): Selenocysteine
  MOD_RES (242)..(242): Selenocysteine
  MOD_RES (254)..(254): Selenocysteine
  MOD_RES (262)..(262): Selenocysteine
  MOD_RES (277)..(277): Selenocysteine
  MOD_RES (287)..(287): Selenocysteine
  MOD_RES (307)..(307): Selenocysteine
  MOD_RES (322)..(322): Selenocysteine
  MOD_RES (347)..(347): Selenocysteine
  MOD_RES (350)..(350): Selenocysteine
  MOD_RES (357)..(357): Selenocysteine
MAXXVXCXRFXDEYQLYEDIGKGAFSVVRRCVKLCXGHEYAAKIINXKKLSARDHQKLEREARICRLLKHSNIVRLHDSISEEGFHYLVFDLVXGGELFEDIVAREYYSEADASHCIQQILEAVLHCHQMGVVHRDLKPENLLLASKCKGAAVKLADFGLAIEVQGDQQAWFGFAGXPGYLSPEVLRKEAYGKPVDIWACGVILYILLVGYPPFWDEDQHKLYQQIKAGAYDFPSPEWDXVXPEAKNLINQMLXINPAKRIXAHEALKHPWVCQRSXVASMMHRQEXVECLKKFNARRKLKPRVYSXRKQMESSPRRIAPKXVQPPPAPKGRFLLPPWSLKPPSSIXQWXGLRSLLXVPIPP

SEQ ID NO: 4811 - protein, 449 aa, Homo sapiens
  MOD_RES (3)..(4): Selenocysteine
  MOD_RES (6)..(6): Selenocysteine
  MOD_RES (8)..(8): Selenocysteine
  MOD_RES (11)..(11): Selenocysteine
  MOD_RES (36)..(36): Selenocysteine
  MOD_RES (47)..(47): Selenocysteine
  MOD_RES (94)..(94): Selenocysteine
  MOD_RES (177)..(177): Selenocysteine
  MOD_RES (240)..(240): Selenocysteine
  MOD_RES (242)..(242): Selenocysteine
  MOD_RES (254)..(254): Selenocysteine
  MOD_RES (262)..(262): Selenocysteine
  MOD_RES (277)..(277): Selenocysteine
  MOD_RES (287)..(287): Selenocysteine
  MOD_RES (306)..(307): Selenocysteine
  MOD_RES (311)..(311): Selenocysteine
  MOD_RES (324)..(325): Selenocysteine
  MOD_RES (349)..(349): Selenocysteine
  MOD_RES (383)..(384): Selenocysteine
  MOD_RES (406)..(406): Selenocysteine
  MOD_RES (417)..(417): Selenocysteine
  MOD_RES (423)..(423): Selenocysteine
MAXXVXCXRFXDEYQLYEDIGKGAFSVVRRCVKLCXGHEYAAKIINXKKLSARDHQKLEREARICRLLKHSNIVRLHDSISEEGFHYLVFDLVXGGELFEDIVAREYYSEADASHCIQQILEAVLHCHQMGVVHRDLKPENLLLASKCKGAAVKLADFGLAIEVQGDQQAWFGFAGXPGYLSPEVLRKEAYGKPVDIWACGVILYILLVGYPPFWDEDQHKLYQQIKAGAYDFPSPEWDXVXPEAKNLINQMLXINPAKRIXAHEALKHPWVCQRSXVASMMHRQEXVECLKKFNARRKLKGAILXXMLAXRNFSARKQEIIKXXEQLIEAVNNGDFEAYAKICDPGLXSFEPEALGNLVEGMDFHRFYFENLLAKNSKPIHXXILNPHVHVIGEDAACIAYIRLXQYIDGQGRPRXSQSEEXRVWHRRDGKWQNVHFHCSGAPVAPLQ

SEQ ID NO: 4812 - protein, 479 aa, Homo sapiens
  MOD_RES (3)..(4): Selenocysteine
  MOD_RES (6)..(6): Selenocysteine
  MOD_RES (8)..(8): Selenocysteine
  MOD_RES (11)..(11): Selenocysteine
  MOD_RES (36)..(36): Selenocysteine
  MOD_RES (47)..(47): Selenocysteine
  MOD_RES (94)..(94): Selenocysteine
  MOD_RES (177)..(177): Selenocysteine
  MOD_RES (240)..(240): Selenocysteine
  MOD_RES (242)..(242): Selenocysteine
  MOD_RES (254)..(254): Selenocysteine
  MOD_RES (262)..(262): Selenocysteine
  MOD_RES (277)..(277): Selenocysteine
  MOD_RES (287)..(287): Selenocysteine
  MOD_RES (306)..(307): Selenocysteine
  MOD_RES (311)..(311): Selenocysteine
  MOD_RES (337)..(338): Selenocysteine
  MOD_RES (354)..(355): Selenocysteine
  MOD_RES (379)..(379): Selenocysteine
  MOD_RES (413)..(414): Selenocysteine
  MOD_RES (436)..(436): Selenocysteine
  MOD_RES (447)..(447): Selenocysteine
  MOD_RES (453)..(453): Selenocysteine
MAXXVXCXRFXDEYQLYEDIGKGAFSVVRRCVKLCXGHEYAAKIINXKKLSARDHQKLEREARICRLLKHSNIVRLHDSISEEGFHYLVFDLVXGGELFEDIVAREYYSEADASHCIQQILEAVLHCHQMGVVHRDLKPENLLLASKCKGAAVKLADFGLAIEVQGDQQAWFGFAGXPGYLSPEVLRKEAYGKPVDIWACGVILYILLVGYPPFWDEDQHKLYQQIKAGAYDFPSPEWDXVXPEAKNLINQMLXINPAKRIXAHEALKHPWVCQRSXVASMMHRQEXVECLKKFNARRKLKGAILXXMLAXRNFSAAKSLLNKKADGVKESSDSANXXIEDEDAKARKQEIIKXXEQLIEAVNNGDFEAYAKICDPGLXSFEPEALGNLVEGMDFHRFYFENLLAKNSKPIHXXILNPHVHVIGEDAACIAYIRLXQYIDGQGRPRXSQSEEXRVWHRRDGKWQNVHFHCSGAPVAPLQ

SEQ ID NO: 4813 - protein, 492 aa, Homo sapiens
  MOD_RES (3)..(4): Selenocysteine
  MOD_RES (6)..(6): Selenocysteine
  MOD_RES (8)..(8): Selenocysteine
  MOD_RES (11)..(11): Selenocysteine
  MOD_RES (36)..(36): Selenocysteine
  MOD_RES (47)..(47): Selenocysteine
  MOD_RES (94)..(94): Selenocysteine
  MOD_RES (177)..(177): Selenocysteine
  MOD_RES (240)..(240): Selenocysteine
  MOD_RES (242)..(242): Selenocysteine
  MOD_RES (254)..(254): Selenocysteine
  MOD_RES (262)..(262): Selenocysteine
  MOD_RES (277)..(277): Selenocysteine
  MOD_RES (287)..(287): Selenocysteine
  MOD_RES (306)..(307): Selenocysteine
  MOD_RES (311)..(311): Selenocysteine
  MOD_RES (320)..(321): Selenocysteine
  MOD_RES (325)..(325): Selenocysteine
  MOD_RES (328)..(328): Selenocysteine
  MOD_RES (333)..(334): Selenocysteine
  MOD_RES (357)..(358): Selenocysteine
  MOD_RES (376)..(377): Selenocysteine
  MOD_RES (393)..(394): Selenocysteine
  MOD_RES (426)..(427): Selenocysteine
  MOD_RES (449)..(449): Selenocysteine
  MOD_RES (460)..(460): Selenocysteine
  MOD_RES (466)..(466): Selenocysteine
MAXXVXCXRFXDEYQLYEDIGKGAFSVVRRCVKLCXGHEYAAKIINXKKLSARDHQKLEREARICRLLKHSNIVRLHDSISEEGFHYLVFDLVXGGELFEDIVAREYYSEADASHCIQQILEAVLHCHQMGVVHRDLKPENLLLASKCKGAAVKLADFGLAIEVQGDQQAWFGFAGXPGYLSPEVLRKEAYGKPVDIWACGVILYILLVGYPPFWDEDQHKLYQQIKAGAYDFPSPEWDXVXPEAKNLINQMLXINPAKRIXAHEALKHPWVCQRSXVASMMHRQEXVECLKKFNARRKLKGAILXXMLAXRNFSVGRQXXAPAXMSXAASGXXMGLVEQAKSLLNKKADGVKEPQXXVIHNPVDGIKESSDSANXXIEDEDAKARKQEIIKXXEQLIEAVNNGDFEAYAFYFENLLAKNSKPIHXXILNPHVHVIGEDAACIAYIRLXQYIDGQGRPRXSQSEEXRVWHRRDGKWQNVHFHCSGAPVAPLQ

SEQ ID NO: 4814 - protein, 503 aa, Homo sapiens
  MOD_RES (3)..(4): Selenocysteine
  MOD_RES (6)..(6): Selenocysteine
  MOD_RES (8)..(8): Selenocysteine
  MOD_RES (11)..(11): Selenocysteine
  MOD_RES (36)..(36): Selenocysteine
  MOD_RES (47)..(47): Selenocysteine
  MOD_RES (94)..(94): Selenocysteine
  MOD_RES (177)..(177): Selenocysteine
  MOD_RES (240)..(240): Selenocysteine
  MOD_RES (242)..(242): Selenocysteine
  MOD_RES (254)..(254): Selenocysteine
  MOD_RES (262)..(262): Selenocysteine
  MOD_RES (277)..(277): Selenocysteine
  MOD_RES (287)..(287): Selenocysteine
  MOD_RES (306)..(307): Selenocysteine
  MOD_RES (311)..(311): Selenocysteine
  MOD_RES (332)..(332): Selenocysteine
  MOD_RES (335)..(335): Selenocysteine
  MOD_RES (342)..(342): Selenocysteine
  MOD_RES (347)..(347): Selenocysteine
  MOD_RES (361)..(362): Selenocysteine
  MOD_RES (378)..(379): Selenocysteine
  MOD_RES (403)..(403): Selenocysteine
  MOD_RES (437)..(438): Selenocysteine
  MOD_RES (460)..(460): Selenocysteine
  MOD_RES (471)..(471): Selenocysteine
  MOD_RES (477)..(477): Selenocysteine
MAXXVXCXRFXDEYQLYEDIGKGAFSVVRRCVKLCXGHEYAAKIINXKKLSARDHQKLEREARICRLLKHSNIVRLHDSISEEGFHYLVFDLVXGGELFEDIVAREYYSEADASHCIQQILEAVLHCHQMGVVHRDLKPENLLLASKCKGAAVKLADFGLAIEVQGDQQAWFGFAGXPGYLSPEVLRKEAYGKPVDIWACGVILYILLVGYPPFWDEDQHKLYQQIKAGAYDFPSPEWDXVXPEAKNLINQMLXINPAKRIXAHEALKHPWVCQRSXVASMMHRQEXVECLKKFNARRKLKGAILXXMLAXRNFSAAKSLLNKKADGVKPQXNSXKNSAAAXSPKGXLPPAALESSDSANXXIEDEDAKARKQEIIKXXEQLIEAVNNGDFEAYAKICDPGLXSFEPEALGNLVEGMDFHRFYFENLLAKNSKPIHXXILNPHVHVIGEDAACIAYIRLXQYIDGQGRPRXSQSEEXRVWHRRDGKWQNVHFHCSGAPVAPLQ

SEQ ID NO: 4815 - protein, 517 aa, Homo sapiens
  MOD_RES (3)..(4): Selenocysteine
  MOD_RES (6)..(6): Selenocysteine
  MOD_RES (8)..(8): Selenocysteine
  MOD_RES (11)..(11): Selenocysteine
  MOD_RES (36)..(36): Selenocysteine
  MOD_RES (47)..(47): Selenocysteine
  MOD_RES (94)..(94): Selenocysteine
  MOD_RES (177)..(177): Selenocysteine
  MOD_RES (240)..(240): Selenocysteine
  MOD_RES (242)..(242): Selenocysteine
  MOD_RES (254)..(254): Selenocysteine
  MOD_RES (262)..(262): Selenocysteine
  MOD_RES (277)..(277): Selenocysteine
  MOD_RES (287)..(287): Selenocysteine
  MOD_RES (306)..(307): Selenocysteine
  MOD_RES (311)..(311): Selenocysteine
  MOD_RES (331)..(331): Selenocysteine
  MOD_RES (334)..(334): Selenocysteine
  MOD_RES (341)..(341): Selenocysteine
  MOD_RES (346)..(346): Selenocysteine
  MOD_RES (356)..(357): Selenocysteine
  MOD_RES (375)..(376): Selenocysteine
  MOD_RES (392)..(393): Selenocysteine
  MOD_RES (417)..(417): Selenocysteine
  MOD_RES (451)..(452): Selenocysteine
  MOD_RES (474)..(474): Selenocysteine
  MOD_RES (485)..(485): Selenocysteine
  MOD_RES (491)..(491): Selenocysteine
MAXXVXCXRFXDEYQLYEDIGKGAFSVVRRCVKLCXGHEYAAKIINXKKLSARDHQKLEREARICRLLKHSNIVRLHDSISEEGFHYLVFDLVXGGELFEDIVAREYYSEADASHCIQQILEAVLHCHQMGVVHRDLKPENLLLASKCKGAAVKLADFGLAIEVQGDQQAWFGFAGXPGYLSPEVLRKEAYGKPVDIWACGVILYILLVGYPPFWDEDQHKLYQQIKAGAYDFPSPEWDXVXPEAKNLINQMLXINPAKRIXAHEALKHPWVCQRSXVASMMHRQEXVECLKKFNARRKLKGAILXXMLAXRNFSAKSLLNKKADGVKPQXNSXKNSAAAXSPKGXLPPAALEPQXXVIHNPVDGIKESSDSANXXIEDEDAKARKQEIIKXXEQLIEAVNNGDFEAYAKICDPGLXSFEPEALGNLVEGMDFHRFYFENLLAKNSKPIHXXILNPHVHVIGEDAACIAYIRLXQYIDGQGRPRXSQSEEXRVWHRRDGKWQNVHFHCSGAPVAPLQ

SEQ ID NO: 4816 - protein, 518 aa, Homo sapiens
  MOD_RES (3)..(4): Selenocysteine
  MOD_RES (6)..(6): Selenocysteine
  MOD_RES (8)..(8): Selenocysteine
  MOD_RES (11)..(11): Selenocysteine
  MOD_RES (36)..(36): Selenocysteine
  MOD_RES (47)..(47): Selenocysteine
  MOD_RES (94)..(94): Selenocysteine
  MOD_RES (177)..(177): Selenocysteine
  MOD_RES (240)..(240): Selenocysteine
  MOD_RES (242)..(242): Selenocysteine
  MOD_RES (254)..(254): Selenocysteine
  MOD_RES (262)..(262): Selenocysteine
  MOD_RES (277)..(277): Selenocysteine
  MOD_RES (287)..(287): Selenocysteine
  MOD_RES (306)..(307): Selenocysteine
  MOD_RES (311)..(311): Selenocysteine
  MOD_RES (332)..(332): Selenocysteine
  MOD_RES (335)..(335): Selenocysteine
  MOD_RES (342)..(342): Selenocysteine
  MOD_RES (347)..(347): Selenocysteine
  MOD_RES (357)..(358): Selenocysteine
  MOD_RES (376)..(377): Selenocysteine
  MOD_RES (393)..(394): Selenocysteine
  MOD_RES (418)..(418): Selenocysteine
  MOD_RES (452)..(453): Selenocysteine
  MOD_RES (475)..(475): Selenocysteine
  MOD_RES (486)..(486): Selenocysteine
  MOD_RES (492)..(492): Selenocysteine
MAXXVXCXRFXDEYQLYEDIGKGAFSVVRRCVKLCXGHEYAAKIINXKKLSARDHQKLEREARICRLLKHSNIVRLHDSISEEGFHYLVFDLVXGGELFEDIVAREYYSEADASHCIQQILEAVLHCHQMGVVHRDLKPENLLLASKCKGAAVKLADFGLAIEVQGDQQAWFGFAGXPGYLSPEVLRKEAYGKPVDIWACGVILYILLVGYPPFWDEDQHKLYQQIKAGAYDFPSPEWDXVXPEAKNLINQMLXINPAKRIXAHEALKHPWVCQRSXVASMMHRQEXVECLKKFNARRKLKGAILXXMLAXRNFSAAKSLLNKKADGVKPQXNSXKNSAAAXSPKGXLPPAALEPQXXVIHNPVDGIKESSDSANXXIEDEDAKARKQEIIKXXEQLIEAVNNGDFEAYAKICDPGLXSFEPEALGNLVEGMDFHRFYFENLLAKNSKPIHXXILNPHVHVIGEDAACIAYIRLXQYIDGQGRPRXSQSEEXRVWHRRDGKWQNVHFHCSGAPVAPLQ

SEQ ID NO: 4817 - protein, 542 aa, Homo sapiens
  MOD_RES (3)..(4): Selenocysteine
  MOD_RES (6)..(6): Selenocysteine
  MOD_RES (8)..(8): Selenocysteine
  MOD_RES (11)..(11): Selenocysteine
  MOD_RES (36)..(36): Selenocysteine
  MOD_RES (47)..(47): Selenocysteine
  MOD_RES (94)..(94): Selenocysteine
  MOD_RES (177)..(177): Selenocysteine
  MOD_RES (240)..(240): Selenocysteine
  MOD_RES (242)..(242): Selenocysteine
  MOD_RES (254)..(254): Selenocysteine
  MOD_RES (262)..(262): Selenocysteine
  MOD_RES (277)..(277): Selenocysteine
  MOD_RES (287)..(287): Selenocysteine
  MOD_RES (306)..(307): Selenocysteine
  MOD_RES (311)..(311): Selenocysteine
  MOD_RES (320)..(321): Selenocysteine
  MOD_RES (325)..(325): Selenocysteine
  MOD_RES (328)..(328): Selenocysteine
  MOD_RES (333)..(334): Selenocysteine
  MOD_RES (356)..(356): Selenocysteine
  MOD_RES (359)..(359): Selenocysteine
  MOD_RES (366)..(366): Selenocysteine
  MOD_RES (371)..(371): Selenocysteine
  MOD_RES (381)..(382): Selenocysteine
  MOD_RES (400)..(401): Selenocysteine
  MOD_RES (417)..(418): Selenocysteine
  MOD_RES (442)..(442): Selenocysteine
  MOD_RES (476)..(477): Selenocysteine
  MOD_RES (499)..(499): Selenocysteine
  MOD_RES (510)..(510): Selenocysteine
  MOD_RES (516)..(516): Selenocysteine
MAXXVXCXRFXDEYQLYEDIGKGAFSVVRRCVKLCXGHEYAAKIINXKKLSARDHQKLEREARICRLLKHSNIVRLHDSISEEGFHYLVFDLVXGGELFEDIVAREYYSEADASHCIQQILEAVLHCHQMGVVHRDLKPENLLLASKCKGAAVKLADFGLAIEVQGDQQAWFGFAGXPGYLSPEVLRKEAYGKPVDIWACGVILYILLVGYPPFWDEDQHKLYQQIKAGAYDFPSPEWDXVXPEAKNLINQMLXINPAKRIXAHEALKHPWVCQRSXVASMMHRQEXVECLKKFNARRKLKGAILXXMLAXRNFSVGRQXXAPAXMSXAASGXXMGLVEQAKSLLNKKADGVKPQXNSXKNSAAAXSPKGXLPPAALEPQXXVIHNPVDGIKESSDSANXXIEDEDAKARKQEIIKXXEQLIEAVNNGDFEAYAKICDPGLXSFEPEALGNLVEGMDFHRFYFENLLAKNSKPIHXXILNPHVHVIGEDAACIAYIRLXQYIDGQGRPRXSQSEEXRVWHRRDGKWQNVHFHCSGAPVAPLQ

SEQ ID NO: 4818 - protein, 666 aa, Homo sapiens
  MOD_RES (3)..(4): Selenocysteine
  MOD_RES (6)..(6): Selenocysteine
  MOD_RES (8)..(8): Selenocysteine
  MOD_RES (11)..(11): Selenocysteine
  MOD_RES (36)..(36): Selenocysteine
  MOD_RES (47)..(47): Selenocysteine
  MOD_RES (94)..(94): Selenocysteine
  MOD_RES (177)..(177): Selenocysteine
  MOD_RES (240)..(240): Selenocysteine
  MOD_RES (242)..(242): Selenocysteine
  MOD_RES (254)..(254): Selenocysteine
  MOD_RES (262)..(262): Selenocysteine
  MOD_RES (277)..(277): Selenocysteine
  MOD_RES (287)..(287): Selenocysteine
  MOD_RES (306)..(307): Selenocysteine
  MOD_RES (311)..(311): Selenocysteine
  MOD_RES (320)..(321): Selenocysteine
  MOD_RES (325)..(325): Selenocysteine
  MOD_RES (328)..(328): Selenocysteine
  MOD_RES (333)..(334): Selenocysteine
  MOD_RES (356)..(356): Selenocysteine
  MOD_RES (359)..(359): Selenocysteine
  MOD_RES (366)..(366): Selenocysteine
  MOD_RES (371)..(371): Selenocysteine
  MOD_RES (381)..(382): Selenocysteine
  MOD_RES (400)..(401): Selenocysteine
  MOD_RES (463)..(463): Selenocysteine
  MOD_RES (506)..(506): Selenocysteine
  MOD_RES (524)..(524): Selenocysteine
  MOD_RES (531)..(531): Selenocysteine
  MOD_RES (541)..(542): Selenocysteine
  MOD_RES (566)..(566): Selenocysteine
  MOD_RES (600)..(601): Selenocysteine
  MOD_RES (623)..(623): Selenocysteine
  MOD_RES (634)..(634): Selenocysteine
  MOD_RES (640)..(640): Selenocysteine
MAXXVXCXRFXDEYQLYEDIGKGAFSVVRRCVKLCXGHEYAAKIINXKKLSARDHQKLEREARICRLLKHSNIVRLHDSISEEGFHYLVFDLVXGGELFEDIVAREYYSEADASHCIQQILEAVLHCHQMGVVHRDLKPENLLLASKCKGAAVKLADFGLAIEVQGDQQAWFGFAGXPGYLSPEVLRKEAYGKPVDIWACGVILYILLVGYPPFWDEDQHKLYQQIKAGAYDFPSPEWDXVXPEAKNLINQMLXINPAKRIXAHEALKHPWVCQRSXVASMMHRQEXVECLKKFNARRKLKGAILXXMLAXRNFSVGRQXXAPAXMSXAASGXXMGLVEQAKSLLNKKADGVKPQXNSXKNSAAAXSPKGXLPPAALEPQXXVIHNPVDGIKESSDSANXXIEDEDAKAPRVPDILSSVRRGSGAPEAEGPLPCPSPAPFSPLPAPSPRISDILNSVRRGSGXPEAEGPLSAGPPPCLSPALLGPLSSPSPRISDILNSVRRGSGXPEAEGPSPVGPPPCPSPXIPGPLPXPSRKQEIIKXXEQLIEAVNNGDFEAYAKICDPGLXSFEPEALGNLVEGMDFHRFYFENLLAKNSKPIHXXILNPHVHVIGEDAACIAYIRLXQYIDGQGRPRXSQSEEXRVWHRRDGKWQNVHFHCSGAPVAPLQ

SEQ ID NO: 4819 - protein, 112 aa, Homo sapiens
  MOD_RES (3)..(4): Selenocysteine
  MOD_RES (6)..(6): Selenocysteine
  MOD_RES (8)..(8): Selenocysteine
  MOD_RES (11)..(11): Selenocysteine
  MOD_RES (36)..(36): Selenocysteine
  MOD_RES (47)..(47): Selenocysteine
  MOD_RES (75)..(75): Selenocysteine
  MOD_RES (88)..(88): Selenocysteine
  MOD_RES (94)..(94): Selenocysteine
  MOD_RES (96)..(96): Selenocysteine
  MOD_RES (101)..(101): Selenocysteine
MAXXVXCXRFXDEYQLYEDIGKGAFSVVRRCVKLCXGHEYAAKIINXKKLSARDHQKLEREARICRLLKHSNIVXVSSRSWRPFSIVXKWGSSXEXSSRRXCFWPASAKGLQ

SEQ ID NO: 4820 - protein, 173 aa, Homo sapiens
  MOD_RES (14)..(14): Selenocysteine
  MOD_RES (21)..(21): Selenocysteine
  MOD_RES (52)..(52): Selenocysteine
  MOD_RES (63)..(63): Selenocysteine
  MOD_RES (110)..(110): Selenocysteine
MRIPEWVAGSPVFXPQMHRSXPVCPLGLQRCPGHWRGRGAFSVVRRCVKLCXGHEYAAKIINXKKLSARDHQKLEREARICRLLKHSNIVRLHDSISEEGFHYLVFDLVXGGELFEDIVAREYYSEADASHCIQQILEAVLHCHQMGVVHRDLKPENLLLASKCKGAAVKLAD

SEQ ID NO: 4821 - protein, 184 aa, Homo sapiens
  MOD_RES (1)..(1): Any amino acid
  MOD_RES (11)..(11): Selenocysteine
  MOD_RES (19)..(19): Selenocysteine
  MOD_RES (34)..(34): Selenocysteine
  MOD_RES (44)..(44): Selenocysteine
  MOD_RES (63)..(64): Selenocysteine
  MOD_RES (68)..(68): Selenocysteine
  MOD_RES (77)..(78): Selenocysteine
  MOD_RES (82)..(82): Selenocysteine
  MOD_RES (85)..(85): Selenocysteine
  MOD_RES (90)..(91): Selenocysteine
  MOD_RES (113)..(113): Selenocysteine
  MOD_RES (116)..(116): Selenocysteine
  MOD_RES (123)..(123): Selenocysteine
  MOD_RES (128)..(128): Selenocysteine
  MOD_RES (138)..(139): Selenocysteine
  MOD_RES (157)..(158): Selenocysteine
  MOD_RES (184)..(184): Selenocysteine
XAKNLINQMLXINPAKRIXAHEALKHPWVCQRSXVASMMHRQEXVECLKKFNARRKLKGAILXXMLAXRNFSVGRQXXAPAXMSXAASGXXMGLVEQAKSLLNKKADGVKPQXNSXKNSAAAXSPKGXLPPAALEPQXXVIHNPVDGIKESSDSANXXIEDEDAKGMDDIPGLLPPPPVGRHQX

SEQ ID NO: 4822 - protein, 194 aa, Homo sapiens
  MOD_RES (35)..(35): Selenocysteine
  MOD_RES (37)..(37): Selenocysteine
  MOD_RES (49)..(49): Selenocysteine
  MOD_RES (57)..(57): Selenocysteine
  MOD_RES (72)..(72): Selenocysteine
  MOD_RES (82)..(82): Selenocysteine
  MOD_RES (101)..(102): Selenocysteine
  MOD_RES (106)..(106): Selenocysteine
  MOD_RES (124)..(124): Selenocysteine
  MOD_RES (129)..(130): Selenocysteine
  MOD_RES (147)..(147): Selenocysteine
  MOD_RES (163)..(163): Selenocysteine
  MOD_RES (171)..(171): Selenocysteine
ILLVGYPPFWDEDQHRLYQQIKAGAYDFPSPEWDXVXPEAKDLINKMLXINPAKRIXASEALKHPWICQRSXVASMMHRQEXVDCLKKFNARRKLKGAILXXMLAXRNFSAKSLLKKPDGVKSXESSNXXIEDEDVKARKQEIIKVXEQLIEAINNGDFEAYXKICDPGLXAFEPEALGNLVEGMDFHRFYFEN

SEQ ID NO: 4823 - protein, 512 aa, Homo sapiens
  MOD_RES (4)..(6): Selenocysteine
  MOD_RES (8)..(8): Selenocysteine
  MOD_RES (11)..(11): Selenocysteine
  MOD_RES (36)..(36): Selenocysteine
  MOD_RES (47)..(47): Selenocysteine
  MOD_RES (94)..(94): Selenocysteine
  MOD_RES (177)..(177): Selenocysteine
  MOD_RES (240)..(240): Selenocysteine
  MOD_RES (242)..(242): Selenocysteine
  MOD_RES (254)..(254): Selenocysteine
  MOD_RES (262)..(262): Selenocysteine
  MOD_RES (277)..(277): Selenocysteine
  MOD_RES (287)..(287): Selenocysteine
  MOD_RES (306)..(307): Selenocysteine
  MOD_RES (311)..(311): Selenocysteine
  MOD_RES (337)..(337): Selenocysteine
  MOD_RES (345)..(345): Selenocysteine
  MOD_RES (352)..(353): Selenocysteine
  MOD_RES (365)..(365): Selenocysteine
  MOD_RES (370)..(371): Selenocysteine
  MOD_RES (388)..(388): Selenocysteine
  MOD_RES (404)..(404): Selenocysteine
  MOD_RES (412)..(412): Selenocysteine
  MOD_RES (446)..(446): Selenocysteine
  MOD_RES (469)..(469): Selenocysteine
  MOD_RES (480)..(480): Selenocysteine
  MOD_RES (486)..(486): Selenocysteine
  MOD_RES (508)..(508): Selenocysteine
MASXXXCXRFXDEYQLFEELGKGAFSVVRRCMKIPXGQEYAAKIINXKKLSARDHQKLEREARICRLLKHPNIVRLHDSISEEGFHYLVFDLVXGGELFEDIVAREYYSEADASHCIQQILEAVLHCHQMGVVHRDLKPENLLLASKSKGAAVKLADFGLAIEVQGDQQAWFGFAGXPGYLSPEVLRKDPYGKPVDMWACGVILYILLVGYPPFWDEDQHRLYQQIKAGAYDFPSPEWDXVXPEAKDLINKMLXINPAKRIXASEALKHPWICQRSXVASMMHRQEXVDCLKKFNARRKLKGAILXXMLAXRNFSAAKSLLKKPDGVKINNKANVVXSPKENIPXPALEPQXXVIHNPDGNKESXESSNXXIEDEDVKARKQEIIKVXEQLIEAINNGDFEAYXKICDPGLXAFEPEALGNLVEGMDFHRFYFENALSKSNKPIHXIILNPHVHLVGDDAACIAYIRLXQYMDGSGMPKXMQSEEXRVWHRRDGKWQNVHFHRSGSPXVPIK

SEQ ID NO: 4824 - protein, 533 aa, Homo sapiens
  MOD_RES (4)..(6): Selenocysteine
  MOD_RES (8)..(8): Selenocysteine
  MOD_RES (11)..(11): Selenocysteine
  MOD_RES (36)..(36): Selenocysteine
  MOD_RES (47)..(47): Selenocysteine
  MOD_RES (94)..(94): Selenocysteine
  MOD_RES (177)..(177): Selenocysteine
  MOD_RES (240)..(240): Selenocysteine
  MOD_RES (242)..(242): Selenocysteine
  MOD_RES (254)..(254): Selenocysteine
  MOD_RES (262)..(262): Selenocysteine
  MOD_RES (277)..(277): Selenocysteine
  MOD_RES (287)..(287): Selenocysteine
  MOD_RES (306)..(307): Selenocysteine
  MOD_RES (311)..(311): Selenocysteine
  MOD_RES (337)..(337): Selenocysteine
  MOD_RES (345)..(345): Selenocysteine
  MOD_RES (352)..(353): Selenocysteine
  MOD_RES (365)..(365): Selenocysteine
  MOD_RES (370)..(371): Selenocysteine
  MOD_RES (388)..(388): Selenocysteine
  MOD_RES (404)..(404): Selenocysteine
  MOD_RES (412)..(412): Selenocysteine
  MOD_RES (446)..(446): Selenocysteine
  MOD_RES (469)..(469): Selenocysteine
  MOD_RES (480)..(480): Selenocysteine
  MOD_RES (486)..(486): Selenocysteine
  MOD_RES (508)..(508): Selenocysteine
  MOD_RES (527)..(527): Selenocysteine
MASXXXCXRFXDEYQLFEELGKGAFSVVRRCMKIPXGQEYAAKIINXKKLSARDHQKLEREARICRLLKHPNIVRLHDSISEEGFHYLVFDLVXGGELFEDIVAREYYSEADASHCIQQILEAVLHCHQMGVVHRDLKPENLLLASKSKGAAVKLADFGLAIEVQGDQQAWFGFAGXPGYLSPEVLRKDPYGKPVDMWACGVILYILLVGYPPFWDEDQHRLYQQIKAGAYDFPSPEWDXVXPEAKDLINKMLXINPAKRIXASEALKHPWICQRSXVASMMHRQEXVDCLKKFNARRKLKGAILXXMLAXRNFSAAKSLLKKPDGVKINNKANVVXSPKENIPXPALEPQXXVIHNPDGNKESXESSNXXIEDEDVKARKQEIIKVXEQLIEAINNGDFEAYXKICDPGLXAFEPEALGNLVEGMDFHRFYFENALSKSNKPIHXIILNPHVHLVGDDAACIAYIRLXQYMDGSGMPKXMQSEEXRVWHRRDGKWQNVHFHRSGSPXVPIKPPCIPNGKENFSGGXSLWQNI

SEQ ID NO: 4825 - protein, 478 aa, Homo sapiens
  MOD_RES (4)..(6): Selenocysteine
  MOD_RES (8)..(8): Selenocysteine
  MOD_RES (11)..(11): Selenocysteine
  MOD_RES (36)..(36): Selenocysteine
  MOD_RES (47)..(47): Selenocysteine
  MOD_RES (94)..(94): Selenocysteine
  MOD_RES (177)..(177): Selenocysteine
  MOD_RES (240)..(240): Selenocysteine
  MOD_RES (242)..(242): Selenocysteine
  MOD_RES (254)..(254): Selenocysteine
  MOD_RES (262)..(262): Selenocysteine
  MOD_RES (277)..(277): Selenocysteine
  MOD_RES (287)..(287): Selenocysteine
  MOD_RES (306)..(307): Selenocysteine
  MOD_RES (311)..(311): Selenocysteine
  MOD_RES (331)..(331): Selenocysteine
  MOD_RES (336)..(337): Selenocysteine
  MOD_RES (354)..(354): Selenocysteine
  MOD_RES (370)..(370): Selenocysteine
  MOD_RES (378)..(378): Selenocysteine
  MOD_RES (412)..(412): Selenocysteine
  MOD_RES (435)..(435): Selenocysteine
  MOD_RES (446)..(446): Selenocysteine
  MOD_RES (452)..(452): Selenocysteine
  MOD_RES (474)..(474): Selenocysteine
MASXXXCXRFXDEYQLFEELGKGAFSVVRRCMKIPXGQEYAAKIINXKKLSARDHQKLEREARICRLLKHPNIVRLHDSISEEGFHYLVFDLVXGGELFEDIVAREYYSEADASHCIQQILESVNHCHLNGIVHRDLKPENLLLASKSKGAAVKLADFGLAIEVQGDQQAWFGFAGXPGYLSPEVLRKDPYGKPVDMWACGVILYILLVGYPPFWDEDQHRLYQQIKAGAYDFPSPEWDXVXPEAKDLINKMLXINPAKRIXASEALKHPWICQRSXVASMMHRQEXVDCLKKFNARRKLKGAILXXMLAXRNFSAAKSLLKKPDGVKESXESSNXXIEDEDVKARKQEIIKVXEQLIEAINNGDFEAYXKICDPGLXAFEPEALGNLVEGMDFHRFYFENALSKSNKPIHXIILNPHVHLVGDDAACIAYIRLXQYMDGSGMPKXMQSEEXRVWHRRDGKWQNVHFHRSGSPXVPIK

SEQ ID NO: 4826 - protein, 478 aa, Homo sapiens
  MOD_RES (4)..(6): Selenocysteine
  MOD_RES (8)..(8): Selenocysteine
  MOD_RES (11)..(11): Selenocysteine
  MOD_RES (36)..(36): Selenocysteine
  MOD_RES (47)..(47): Selenocysteine
  MOD_RES (94)..(94): Selenocysteine
  MOD_RES (177)..(177): Selenocysteine
  MOD_RES (240)..(240): Selenocysteine
  MOD_RES (242)..(242): Selenocysteine
  MOD_RES (254)..(254): Selenocysteine
  MOD_RES (262)..(262): Selenocysteine
  MOD_RES (277)..(277): Selenocysteine
  MOD_RES (287)..(287): Selenocysteine
  MOD_RES (306)..(307): Selenocysteine
  MOD_RES (311)..(311): Selenocysteine
  MOD_RES (331)..(331): Selenocysteine
  MOD_RES (336)..(337): Selenocysteine
  MOD_RES (354)..(354): Selenocysteine
  MOD_RES (370)..(370): Selenocysteine
  MOD_RES (378)..(378): Selenocysteine
  MOD_RES (412)..(412): Selenocysteine
  MOD_RES (435)..(435): Selenocysteine
  MOD_RES (446)..(446): Selenocysteine
  MOD_RES (452)..(452): Selenocysteine
  MOD_RES (474)..(474): Selenocysteine
MASXXXCXRFXDEYQLFEELGKGAFSVVRRCMKIPXGQEYAAKIINXKKLSARDHQKLEREARICRLLKHPNIVRLHDSISEEGFHYLVFDLVXGGELFEDIVAREYYSEADASHCIQQILESVNHCHLNGIVHRDLKPENLLLASKSKGAAVKLADFGLAIEVQGDQQAWFGFAGXPGYLSPEVLRKDPYGKPVDMWACGVILYILLVGYPPFWDEDQHRLYQQIKAGAYDFPSPEWDXVXPEAKDLINKMLXINPAKRIXASEALKHPWICQRSXVASMMHRQEXVDCLKKFNARRKLKGAILXXMLAXRNFSAAKSLLKKPDGVKESXESSNXXIEDEDVKARKQEIIKVXEQLIEAINNGDFEAYXKICDPGLXAFEPEALGNLVEGMDFHRFYFENALSKSNKPIHXIILNPHVHLVGDDAACIAYIRLXQYMDGSGMPKXMQSEEXRVWHRRDGKWQNVHFHRSGSPXVPIN

SEQ ID NO: 4827 - protein, 489 aa, Homo sapiens
  MOD_RES (4)..(6): Selenocysteine
  MOD_RES (8)..(8): Selenocysteine
  MOD_RES (11)..(11): Selenocysteine
  MOD_RES (36)..(36): Selenocysteine
  MOD_RES (47)..(47): Selenocysteine
  MOD_RES (94)..(94): Selenocysteine
  MOD_RES (177)..(177): Selenocysteine
  MOD_RES (240)..(240): Selenocysteine
  MOD_RES (242)..(242): Selenocysteine
  MOD_RES (254)..(254): Selenocysteine
  MOD_RES (262)..(262): Selenocysteine
  MOD_RES (277)..(277): Selenocysteine
  MOD_RES (287)..(287): Selenocysteine
  MOD_RES (306)..(307): Selenocysteine
  MOD_RES (311)..(311): Selenocysteine
  MOD_RES (342)..(342): Selenocysteine
  MOD_RES (347)..(348): Selenocysteine
  MOD_RES (365)..(365): Selenocysteine
  MOD_RES (381)..(381): Selenocysteine
  MOD_RES (389)..(389): Selenocysteine
  MOD_RES (423)..(423): Selenocysteine
  MOD_RES (446)..(446): Selenocysteine
  MOD_RES (457)..(457): Selenocysteine
  MOD_RES (463)..(463): Selenocysteine
  MOD_RES (485)..(485): Selenocysteine
MASXXXCXRFXDEYQLFEELGKGAFSVVRRCMKIPXGQEYAAKIINXKKLSARDHQKLEREARICRLLKHPNIVRLHDSISEEGFHYLVFDLVXGGELFEDIVAREYYSEADASHCIQQILESVNHCHLNGIVHRDLKPENLLLASKSKGAAVKLADFGLAIEVQGDQQAWFGFAGXPGYLSPEVLRKDPYGKPVDMWACGVILYILLVGYPPFWDEDQHRLYQQIKAGAYDFPSPEWDXVXPEAKDLINKMLXINPAKRIXASEALKHPWICQRSXVASMMHRQEXVDCLKKFNARRKLKGAILXXMLAXRNFSAAKSLLKKPDGVKKRKSSSSVQMMESXESSNXXIEDEDVKARKQEIIKVXEQLIEAINNGDFEAYXKICDPGLXAFEPEALGNLVEGMDFHRFYFENALSKSNKPIHXIILNPHVHLVGDDAACIAYIRLXQYMDGSGMPKXMQSEEXRVWHRRDGKWQNVHFHRSGSPXVPIK

SEQ ID NO: 4828 - protein, 492 aa, Homo sapiens
  MOD_RES (4)..(6): Selenocysteine
  MOD_RES (8)..(8): Selenocysteine
  MOD_RES (11)..(11): Selenocysteine
  MOD_RES (36)..(36): Selenocysteine
  MOD_RES (47)..(47): Selenocysteine
  MOD_RES (94)..(94): Selenocysteine
  MOD_RES (177)..(177): Selenocysteine
  MOD_RES (240)..(240): Selenocysteine
  MOD_RES (242)..(242): Selenocysteine
  MOD_RES (254)..(254): Selenocysteine
  MOD_RES (262)..(262): Selenocysteine
  MOD_RES (277)..(277): Selenocysteine
  MOD_RES (287)..(287): Selenocysteine
  MOD_RES (306)..(307): Selenocysteine
  MOD_RES (311)..(311): Selenocysteine
  MOD_RES (332)..(333): Selenocysteine
  MOD_RES (345)..(345): Selenocysteine
  MOD_RES (350)..(351): Selenocysteine
  MOD_RES (368)..(368): Selenocysteine
  MOD_RES (384)..(384): Selenocysteine
  MOD_RES (392)..(392): Selenocysteine
  MOD_RES (426)..(426): Selenocysteine
  MOD_RES (449)..(449): Selenocysteine
  MOD_RES (460)..(460): Selenocysteine
  MOD_RES (466)..(466): Selenocysteine
  MOD_RES (488)..(488): Selenocysteine
MASXXXCXRFXDEYQLFEELGKGAFSVVRRCMKIPXGQEYAAKIINXKKLSARDHQKLEREARICRLLKHPNIVRLHDSISEEGFHYLVFDLVXGGELFEDIVAREYYSEADASHCIQQILESVNHCHLNGIVHRDLKPENLLLASKSKGAAVKLADFGLAIEVQGDQQAWFGFAGXPGYLSPEVLRKDPYGKPVDMWACGVILYILLVGYPPFWDEDQHRLYQQIKAGAYDFPSPEWDXVXPEAKDLINKMLXINPAKRIXASEALKHPWICQRSXVASMMHRQEXVDCLKKFNARRKLKGAILXXMLAXRNFSAAKSLLKKPDGVKEPQXXVIHNPDGNKESXESSNXXIEDEDVKARKQEIIKVXEQLIEAINNGDFEAYXKICDPGLXAFEPEALGNLVEGMDFHRFYFENALSKSNKPIHXIILNPHVHLVGDDAACIAYIRLXQYMDGSGMPKXMQSEEXRVWHRRDGKWQNVHFHRSGSPXVPIK

SEQ ID NO: 4829 - protein, 498 aa, Homo sapiens
  MOD_RES (4)..(6): Selenocysteine
  MOD_RES (8)..(8): Selenocysteine
  MOD_RES (11)..(11): Selenocysteine
  MOD_RES (36)..(36): Selenocysteine
  MOD_RES (47)..(47): Selenocysteine
  MOD_RES (94)..(94): Selenocysteine
  MOD_RES (177)..(177): Selenocysteine
  MOD_RES (240)..(240): Selenocysteine
  MOD_RES (242)..(242): Selenocysteine
  MOD_RES (254)..(254): Selenocysteine
  MOD_RES (262)..(262): Selenocysteine
  MOD_RES (277)..(277): Selenocysteine
  MOD_RES (287)..(287): Selenocysteine
  MOD_RES (306)..(307): Selenocysteine
  MOD_RES (311)..(311): Selenocysteine
  MOD_RES (330)..(330): Selenocysteine
  MOD_RES (335)..(336): Selenocysteine
  MOD_RES (353)..(353): Selenocysteine
  MOD_RES (369)..(369): Selenocysteine
  MOD_RES (377)..(377): Selenocysteine
  MOD_RES (411)..(411): Selenocysteine
  MOD_RES (434)..(434): Selenocysteine
  MOD_RES (445)..(445): Selenocysteine
  MOD_RES (451)..(451): Selenocysteine
  MOD_RES (473)..(473): Selenocysteine
  MOD_RES (492)..(492): Selenocysteine
MASXXXCXRFXDEYQLFEELGKGAFSVVRRCMKIPXGQEYAAKIINXKKLSARDHQKLEREARICRLLKHPNIVRLHDSISEEGFHYLVFDLVXGGELFEDIVAREYYSEADASHCIQQILESVNHCHLNGIVHRDLKPENLLLASKSKGAAVKLADFGLAIEVQGDQQAWFGFAGXPGYLSPEVLRKDPYGKPVDMWACGVILYILLVGYPPFWDEDQHRLYQQIKAGAYDFPSPEWDXVXPEAKDLINKMLXINPAKRIXASEALKHPWICQRSXVASMMHRQEXVDCLKKFNARRKLKGAILXXMLAXRNFSAKSLLKKPDGVKESXESSNXXIEDEDVKARKQEIIKVXEQLIEAINNGDFEAYXKICDPGLXAFEPEALGNLVEGMDFHRFYFENALSKSNKPIHXIILNPHVHLVGDDAACIAYIRLXQYMDGSGMPKXMQSEEXRVWHRRDGKWQNVHFHRSGSPXVPIKPPCIPNGKENFSGGXSLWQNI

SEQ ID NO: 4830 - protein, 499 aa, Homo sapiens
  MOD_RES (4)..(6): Selenocysteine
  MOD_RES (8)..(8): Selenocysteine
  MOD_RES (11)..(11): Selenocysteine
  MOD_RES (36)..(36): Selenocysteine
  MOD_RES (47)..(47): Selenocysteine
  MOD_RES (94)..(94): Selenocysteine
  MOD_RES (177)..(177): Selenocysteine
  MOD_RES (240)..(240): Selenocysteine
  MOD_RES (242)..(242): Selenocysteine
  MOD_RES (254)..(254): Selenocysteine
  MOD_RES (262)..(262): Selenocysteine
  MOD_RES (277)..(277): Selenocysteine
  MOD_RES (287)..(287): Selenocysteine
  MOD_RES (306)..(307): Selenocysteine
  MOD_RES (311)..(311): Selenocysteine
  MOD_RES (331)..(331): Selenocysteine
  MOD_RES (336)..(337): Selenocysteine
  MOD_RES (354)..(354): Selenocysteine
  MOD_RES (370)..(370): Selenocysteine
  MOD_RES (378)..(378): Selenocysteine
  MOD_RES (412)..(412): Selenocysteine
  MOD_RES (435)..(435): Selenocysteine
  MOD_RES (446)..(446): Selenocysteine
  MOD_RES (452)..(452): Selenocysteine
  MOD_RES (474)..(474): Selenocysteine
  MOD_RES (493)..(493): Selenocysteine
MASXXXCXRFXDEYQLFEELGKGAFSVVRRCMKIPXGQEYAAKIINXKKLSARDHQKLEREARICRLLKHPNIVRLHDSISEEGFHYLVFDLVXGGELFEDIVAREYYSEADASHCIQQILESVNHCHLNGIVHRDLKPENLLLASKSKGAAVKLADFGLAIEVQGDQQAWFGFAGXPGYLSPEVLRKDPYGKPVDMWACGVILYILLVGYPPFWDEDQHRLYQQIKAGAYDFPSPEWDXVXPEAKDLINKMLXINPAKRIXASEALKHPWICQRSXVASMMHRQEXVDCLKKFNARRKLKGAILXXMLAXRNFSAAKSLLKKPDGVKESXESSNXXIEDEDVKARKQEIIKVXEQLIEAINNGDFEAYXKICDPGLXAFEPEALGNLVEGMDFHRFYFENALSKSNKPIHXIILNPHVHLVGDDAACIAYIRLXQYMDGSGMPKXMQSEEXRVWHRRDGKWQNVHFHRSGSPXVPIKPPCIPNGKENFSGGXSLWQNI

SEQ ID NO: 4831 - protein, 510 aa, Homo sapiens
  MOD_RES (4)..(6): Selenocysteine
  MOD_RES (8)..(8): Selenocysteine
  MOD_RES (11)..(11): Selenocysteine
  MOD_RES (36)..(36): Selenocysteine
  MOD_RES (47)..(47): Selenocysteine
  MOD_RES (94)..(94): Selenocysteine
  MOD_RES (177)..(177): Selenocysteine
  MOD_RES (240)..(240): Selenocysteine
  MOD_RES (242)..(242): Selenocysteine
  MOD_RES (254)..(254): Selenocysteine
  MOD_RES (262)..(262): Selenocysteine
  MOD_RES (277)..(277): Selenocysteine
  MOD_RES (287)..(287): Selenocysteine
  MOD_RES (306)..(307): Selenocysteine
  MOD_RES (311)..(311): Selenocysteine
  MOD_RES (342)..(342): Selenocysteine
  MOD_RES (347)..(348): Selenocysteine
  MOD_RES (365)..(365): Selenocysteine
  MOD_RES (381)..(381): Selenocysteine
  MOD_RES (389)..(389): Selenocysteine
  MOD_RES (423)..(423): Selenocysteine
  MOD_RES (446)..(446): Selenocysteine
  MOD_RES (457)..(457): Selenocysteine
  MOD_RES (463)..(463): Selenocysteine
  MOD_RES (485)..(485): Selenocysteine
  MOD_RES (504)..(504): Selenocysteine
MASXXXCXRFXDEYQLFEELGKGAFSVVRRCMKIPXGQEYAAKIINXKKLSARDHQKLEREARICRLLKHPNIVRLHDSISEEGFHYLVFDLVXGGELFEDIVAREYYSEADASHCIQQILESVNHCHLNGIVHRDLKPENLLLASKSKGAAVKLADFGLAIEVQGDQQAWFGFAGXPGYLSPEVLRKDPYGKPVDMWACGVILYILLVGYPPFWDEDQHRLYQQIKAGAYDFPSPEWDXVXPEAKDLINKMLXINPAKRIXASEALKHPWICQRSXVASMMHRQEXVDCLKKFNARRKLKGAILXXMLAXRNFSAAKSLLKKPDGVKKRKSSSSVQMMESXESSNXXIEDEDVKARKQEIIKVXEQLIEAINNGDFEAYXKICDPGLXAFEPEALGNLVEGMDFHRFYFENALSKSNKPIHXIILNPHVHLVGDDAACIAYIRLXQYMDGSGMPKXMQSEEXRVWHRRDGKWQNVHFHRSGSPXVPIKPPCIPNGKENFSGGXSLWQNI

SEQ ID NO: 4832 - protein, 182 aa, Homo sapiens
  MOD_RES (1)..(1): Any amino acid
  MOD_RES (10)..(11): Selenocysteine
  MOD_RES (15)..(15): Selenocysteine
  MOD_RES (35)..(35): Selenocysteine
  MOD_RES (40)..(41): Selenocysteine
  MOD_RES (58)..(58): Selenocysteine
  MOD_RES (74)..(74): Selenocysteine
  MOD_RES (82)..(82): Selenocysteine
  MOD_RES (116)..(116): Selenocysteine
  MOD_RES (139)..(139): Selenocysteine
  MOD_RES (150)..(150): Selenocysteine
  MOD_RES (156)..(156): Selenocysteine
  MOD_RES (178)..(178): Selenocysteine
XRKLKGAILXXMLAXRNFSAAKSLLKKPDGVKESXESSNXXIEDEDVKARKQEIIKVXEQLIEAINNGDFEAYXKICDPGLXAFEPEALGNLVEGMDFHRFYFENALSKSNKPIHXIILNPHVHLVGDDAACIAYIRLXQYMDGSGMPKXMQSEEXRVWHRRDGKWQNVHFHRSGSPXVPIK

SEQ ID NO: 4833 - protein, 495 aa, Homo sapiens
  MOD_RES (3)..(4): Selenocysteine
  MOD_RES (6)..(6): Selenocysteine
  MOD_RES (8)..(8): Selenocysteine
  MOD_RES (11)..(11): Selenocysteine
  MOD_RES (35)..(35): Selenocysteine
  MOD_RES (37)..(37): Selenocysteine
  MOD_RES (47)..(47): Selenocysteine
  MOD_RES (94)..(94): Selenocysteine
  MOD_RES (177)..(177): Selenocysteine
  MOD_RES (240)..(240): Selenocysteine
  MOD_RES (242)..(242): Selenocysteine
  MOD_RES (254)..(254): Selenocysteine
  MOD_RES (262)..(262): Selenocysteine
  MOD_RES (277)..(277): Selenocysteine
  MOD_RES (287)..(287): Selenocysteine
  MOD_RES (306)..(307): Selenocysteine
  MOD_RES (334)..(335): Selenocysteine
  MOD_RES (341)..(341): Selenocysteine
  MOD_RES (348)..(348): Selenocysteine
  MOD_RES (353)..(355): Selenocysteine
  MOD_RES (371)..(371): Selenocysteine
  MOD_RES (387)..(387): Selenocysteine
  MOD_RES (395)..(395): Selenocysteine
  MOD_RES (429)..(430): Selenocysteine
  MOD_RES (452)..(452): Selenocysteine
  MOD_RES (463)..(463): Selenocysteine
  MOD_RES (469)..(469): Selenocysteine
MAXXAXCXRFXDDYQLFEELGKGAFSVVRRCVKKXSXQEYAAKIINXKKLSARDHQKLEREARICRLLKHPNIVRLHDSISEEGFHYLVFDLVXGGELFEDIVAREYYSEADASHCIHQILESVNHIHQHDIVHRDLKPENLLLASKCKGAAVKLADFGLAIEVQGEQQAWFGFAGXPGYLSPEVLRKDPYGKPVDIWACGVILYILLVGYPPFWDEDQHKLYQQIKAGAYDFPSPEWDXVXPEAKNLINQMLXINPAKRIXADQALKHPWVCQRSXVASMMHRQEXVECLRKFNARRKLKGAILXXMLVSRNFSAAKSLLNKKSDGGVKEPQXXVVHNAXDGIKGSXESCNXXXEDEDLKVRKQEIIKIXEQLIEAINNGDFEAYXKICDPGLXSFEPEALGNLVEGMDFHKFYFENLLSKNSKPIHXXILNPHVHVIGEDAACIAYIRLXQYIDGQGRPRXSQSEEXRVWHRRDGKWLNVHYHCSGAPAAPLQ

SEQ ID NO: 4834 - protein, 516 aa, Homo sapiens
  MOD_RES (3)..(4): Selenocysteine
  MOD_RES (6)..(6): Selenocysteine
  MOD_RES (8)..(8): Selenocysteine
  MOD_RES (11)..(11): Selenocysteine
  MOD_RES (35)..(35): Selenocysteine
  MOD_RES (37)..(37): Selenocysteine
  MOD_RES (47)..(47): Selenocysteine
  MOD_RES (94)..(94): Selenocysteine
  MOD_RES (177)..(177): Selenocysteine
  MOD_RES (240)..(240): Selenocysteine
  MOD_RES (242)..(242): Selenocysteine
  MOD_RES (254)..(254): Selenocysteine
  MOD_RES (262)..(262): Selenocysteine
  MOD_RES (277)..(277): Selenocysteine
  MOD_RES (287)..(287): Selenocysteine
  MOD_RES (306)..(307): Selenocysteine
  MOD_RES (355)..(356): Selenocysteine
  MOD_RES (362)..(362): Selenocysteine
  MOD_RES (369)..(369): Selenocysteine
  MOD_RES (374)..(376): Selenocysteine
  MOD_RES (392)..(392): Selenocysteine
  MOD_RES (408)..(408): Selenocysteine
  MOD_RES (416)..(416): Selenocysteine
  MOD_RES (450)..(451): Selenocysteine
  MOD_RES (473)..(473): Selenocysteine
  MOD_RES (484)..(484): Selenocysteine
  MOD_RES (490)..(490): Selenocysteine
MAXXAXCXRFXDDYQLFEELGKGAFSVVRRCVKKXSXQEYAAKIINXKKLSARDHQKLEREARICRLLKHPNIVRLHDSISEEGFHYLVFDLVXGGELFEDIVAREYYSEADASHCIHQILESVNHIHQHDIVHRDLKPENLLLASKCKGAAVKLADFGLAIEVQGEQQAWFGFAGXPGYLSPEVLRKDPYGKPVDIWACGVILYILLVGYPPFWDEDQHKLYQQIKAGAYDFPSPEWDXVXPEAKNLINQMLXINPAKRIXADQALKHPWVCQRSXVASMMHRQEXVECLRKFNARRKLKGAILXXMLVSRNFSVGRQSSAPASPAASAAGLAGQAAKSLLNKKSDGGVKEPQXXVVHNAXDGIKGSXESCNXXXEDEDLKVRKQEIIKIXEQLIEAINNGDFEAYXKICDPGLXSFEPEALGNLVEGMDFHKFYFENLLSKNSKPIHXXILNPHVHVIGEDAACIAYIRLXQYIDGQGRPRXSQSEEXRVWHRRDGKWLNVHYHCSGAPAAPLQ

SEQ ID NO: 4835 - protein, 527 aa, Homo sapiens
  MOD_RES (3)..(4): Selenocysteine
  MOD_RES (6)..(6): Selenocysteine
  MOD_RES (8)..(8): Selenocysteine
  MOD_RES (11)..(11): Selenocysteine
  MOD_RES (35)..(35): Selenocysteine
  MOD_RES (37)..(37): Selenocysteine
  MOD_RES (47)..(47): Selenocysteine
  MOD_RES (94)..(94): Selenocysteine
  MOD_RES (177)..(177): Selenocysteine
  MOD_RES (240)..(240): Selenocysteine
  MOD_RES (242)..(242): Selenocysteine
  MOD_RES (254)..(254): Selenocysteine
  MOD_RES (262)..(262): Selenocysteine
  MOD_RES (277)..(277): Selenocysteine
  MOD_RES (287)..(287): Selenocysteine
  MOD_RES (306)..(307): Selenocysteine
  MOD_RES (366)..(367): Selenocysteine
  MOD_RES (373)..(373): Selenocysteine
  MOD_RES (380)..(380): Selenocysteine
  MOD_RES (385)..(387): Selenocysteine
  MOD_RES (403)..(403): Selenocysteine
  MOD_RES (419)..(419): Selenocysteine
  MOD_RES (427)..(427): Selenocysteine
  MOD_RES (461)..(462): Selenocysteine
  MOD_RES (484)..(484): Selenocysteine
  MOD_RES (495)..(495): Selenocysteine
  MOD_RES (501)..(501): Selenocysteine
MAXXAXCXRFXDDYQLFEELGKGAFSVVRRCVKKXSXQEYAAKIINXKKLSARDHQKLEREARICRLLKHPNIVRLHDSISEEGFHYLVFDLVXGGELFEDIVAREYYSEADASHCIHQILESVNHIHQHDIVHRDLKPENLLLASKCKGAAVKLADFGLAIEVQGEQQAWFGFAGXPGYLSPEVLRKDPYGKPVDIWACGVILYILLVGYPPFWDEDQHKLYQQIKAGAYDFPSPEWDXVXPEAKNLINQMLXINPAKRIXADQALKHPWVCQRSXVASMMHRQEXVECLRKFNARRKLKGAILXXMLVSRNFSVGRQSSAPASPAASAAGLAGQAAKSLLNKKSDGGVKKRKSSSSVHLMEPQXXVVHNAXDGIKGSXESCNXXXEDEDLKVRKQEIIKIXEQLIEAINNGDFEAYXKICDPGLXSFEPEALGNLVEGMDFHKFYFENLLSKNSKPIHXXILNPHVHVIGEDAACIAYIRLXQYIDGQGRPRXSQSEEXRVWHRRDGKWLNVHYHCSGAPAAPLQ

SEQ ID NO: 4836 - protein, 529 aa, Homo sapiens
  MOD_RES (3)..(4): Selenocysteine
  MOD_RES (6)..(6): Selenocysteine
  MOD_RES (8)..(8): Selenocysteine
  MOD_RES (11)..(11): Selenocysteine
  MOD_RES (35)..(35): Selenocysteine
  MOD_RES (37)..(37): Selenocysteine
  MOD_RES (47)..(47): Selenocysteine
  MOD_RES (94)..(94): Selenocysteine
  MOD_RES (177)..(177): Selenocysteine
  MOD_RES (240)..(240): Selenocysteine
  MOD_RES (242)..(242): Selenocysteine
  MOD_RES (254)..(254): Selenocysteine
  MOD_RES (262)..(262): Selenocysteine
  MOD_RES (277)..(277): Selenocysteine
  MOD_RES (287)..(287): Selenocysteine
  MOD_RES (306)..(307): Selenocysteine
  MOD_RES (362)..(362): Selenocysteine
  MOD_RES (368)..(369): Selenocysteine
  MOD_RES (375)..(375): Selenocysteine
  MOD_RES (382)..(382): Selenocysteine
  MOD_RES (387)..(389): Selenocysteine
  MOD_RES (405)..(405): Selenocysteine
  MOD_RES (421)..(421): Selenocysteine
  MOD_RES (429)..(429): Selenocysteine
  MOD_RES (463)..(464): Selenocysteine
  MOD_RES (486)..(486): Selenocysteine
  MOD_RES (497)..(497): Selenocysteine
  MOD_RES (503)..(503): Selenocysteine
MAXXAXCXRFXDDYQLFEELGKGAFSVVRRCVKKXSXQEYAAKIINXKKLSARDHQKLEREARICRLLKHPNIVRLHDSISEEGFHYLVFDLVXGGELFEDIVAREYYSEADASHCIHQILESVNHIHQHDIVHRDLKPENLLLASKCKGAAVKLADFGLAIEVQGEQQAWFGFAGXPGYLSPEVLRKDPYGKPVDIWACGVILYILLVGYPPFWDEDQHKLYQQIKAGAYDFPSPEWDXVXPEAKNLINQMLXINPAKRIXADQALKHPWVCQRSXVASMMHRQEXVECLRKFNARRKLKGAILXXMLVSRNFSAAKSLLNKKSDGGVKKRKSSSSVHLMPQSNNKNSLVSPAQEPAPLQXAMEPQXXVVHNAXDGIKGSXESCNXXXEDEDLKVRKQEIIKIXEQLIEAINNGDFEAYXKICDPGLXSFEPEALGNLVEGMDFHKFYFENLLSKNSKPIHXXILNPHVHVIGEDAACIAYIRLXQYIDGQGRPRXSQSEEXRVWHRRDGKWLNVHYHCSGAPAAPLQ

SEQ ID NO: 4837 - protein, 539 aa, Homo sapiens
  MOD_RES (3)..(4): Selenocysteine
  MOD_RES (6)..(6): Selenocysteine
  MOD_RES (8)..(8): Selenocysteine
  MOD_RES (11)..(11): Selenocysteine
  MOD_RES (35)..(35): Selenocysteine
  MOD_RES (37)..(37): Selenocysteine
  MOD_RES (47)..(47): Selenocysteine
  MOD_RES (94)..(94): Selenocysteine
  MOD_RES (177)..(177): Selenocysteine
  MOD_RES (240)..(240): Selenocysteine
  MOD_RES (242)..(242): Selenocysteine
  MOD_RES (254)..(254): Selenocysteine
  MOD_RES (262)..(262): Selenocysteine
  MOD_RES (277)..(277): Selenocysteine
  MOD_RES (287)..(287): Selenocysteine
  MOD_RES (306)..(307): Selenocysteine
  MOD_RES (372)..(372): Selenocysteine
  MOD_RES (378)..(379): Selenocysteine
  MOD_RES (385)..(385): Selenocysteine
  MOD_RES (392)..(392): Selenocysteine
  MOD_RES (397)..(399): Selenocysteine
  MOD_RES (415)..(415): Selenocysteine
  MOD_RES (431)..(431): Selenocysteine
  MOD_RES (439)..(439): Selenocysteine
  MOD_RES (473)..(474): Selenocysteine
  MOD_RES (496)..(496): Selenocysteine
  MOD_RES (507)..(507): Selenocysteine
  MOD_RES (513)..(513): Selenocysteine
MAXXAXCXRFXDDYQLFEELGKGAFSVVRRCVKKXSXQEYAAKIINXKKLSARDHQKLEREARICRLLKHPNIVRLHDSISEEGFHYLVFDLVXGGELFEDIVAREYYSEADASHCIHQILESVNHIHQHDIVHRDLKPENLLLASKCKGAAVKLADFGLAIEVQGEQQAWFGFAGXPGYLSPEVLRKDPYGKPVDIWACGVILYILLVGYPPFWDEDQHKLYQQIKAGAYDFPSPEWDXVXPEAKNLINQMLXINPAKRIXADQALKHPWVCQRSXVASMMHRQEXVECLRKFNARRKLKGAILXXMLVSRNFSVGRQSSAPASPAASAAGLAGQAAKSLLNKKSDGGVKPQSNNKNSLVSPAQEPAPLQXAMEPQXXVVHNAXDGIKGSXESCNXXXEDEDLKVRKQEIIKIXEQLIEAINNGDFEAYXKICDPGLXSFEPEALGNLVEGMDFHKFYFENLLSKNSKPIHXXILNPHVHVIGEDAACIAYIRLXQYIDGQGRPRXSQSEEXRVWHRRDGKWLNVHYHCSGAPAAPLQ

SEQ ID NO: 4838 - protein, 556 aa, Homo sapiens
  MOD_RES (3)..(4): Selenocysteine
  MOD_RES (6)..(6): Selenocysteine
  MOD_RES (8)..(8): Selenocysteine
  MOD_RES (11)..(11): Selenocysteine
  MOD_RES (35)..(35): Selenocysteine
  MOD_RES (37)..(37): Selenocysteine
  MOD_RES (47)..(47): Selenocysteine
  MOD_RES (94)..(94): Selenocysteine
  MOD_RES (177)..(177): Selenocysteine
  MOD_RES (240)..(240): Selenocysteine
  MOD_RES (242)..(242): Selenocysteine
  MOD_RES (254)..(254): Selenocysteine
  MOD_RES (262)..(262): Selenocysteine
  MOD_RES (277)..(277): Selenocysteine
  MOD_RES (287)..(287): Selenocysteine
  MOD_RES (306)..(307): Selenocysteine
  MOD_RES (351)..(351): Selenocysteine
  MOD_RES (357)..(358): Selenocysteine
  MOD_RES (364)..(364): Selenocysteine
  MOD_RES (371)..(371): Selenocysteine
  MOD_RES (376)..(378): Selenocysteine
  MOD_RES (390)..(390): Selenocysteine
  MOD_RES (406)..(406): Selenocysteine
  MOD_RES (432)..(432): Selenocysteine
  MOD_RES (448)..(448): Selenocysteine
  MOD_RES (456)..(456): Selenocysteine
  MOD_RES (490)..(491): Selenocysteine
  MOD_RES (513)..(513): Selenocysteine
  MOD_RES (524)..(524): Selenocysteine
  MOD_RES (530)..(530): Selenocysteine
MAXXAXCXRFXDDYQLFEELGKGAFSVVRRCVKKXSXQEYAAKIINXKKLSARDHQKLEREARICRLLKHPNIVRLHDSISEEGFHYLVFDLVXGGELFEDIVAREYYSEADASHCIHQILESVNHIHQHDIVHRDLKPENLLLASKCKGAAVKLADFGLAIEVQGEQQAWFGFAGXPGYLSPEVLRKDPYGKPVDIWACGVILYILLVGYPPFWDEDQHKLYQQIKAGAYDFPSPEWDXVXPEAKNLINQMLXINPAKRIXADQALKHPWVCQRSXVASMMHRQEXVECLRKFNARRKLKGAILXXMLVSRNFSAAKSLLNKKSDGGVKPQSNNKNSLVSPAQEPAPLQXAMEPQXXVVHNAXDGIKGSXESCNXXXEDEDLKAAPLRXGNGSSVPEGRSSRDRXAPSAGMQPQPSLCSSAMRKQEIIKIXEQLIEAINNGDFEAYXKICDPGLXSFEPEALGNLVEGMDFHKFYFENLLSKNSKPIHXXILNPHVHVIGEDAACIAYIRLXQYIDGQGRPRXSQSEEXRVWHRRDGKWLNVHYHCSGAPAAPLQ

SEQ ID NO: 4839 - protein, 558 aa, Homo sapiens
  MOD_RES (3)..(4): Selenocysteine
  MOD_RES (6)..(6): Selenocysteine
  MOD_RES (8)..(8): Selenocysteine
  MOD_RES (11)..(11): Selenocysteine
  MOD_RES (35)..(35): Selenocysteine
  MOD_RES (37)..(37): Selenocysteine
  MOD_RES (47)..(47): Selenocysteine
  MOD_RES (94)..(94): Selenocysteine
  MOD_RES (177)..(177): Selenocysteine
  MOD_RES (240)..(240): Selenocysteine
  MOD_RES (242)..(242): Selenocysteine
  MOD_RES (254)..(254): Selenocysteine
  MOD_RES (262)..(262): Selenocysteine
  MOD_RES (277)..(277): Selenocysteine
  MOD_RES (287)..(287): Selenocysteine
  MOD_RES (306)..(307): Selenocysteine
  MOD_RES (362)..(362): Selenocysteine
  MOD_RES (368)..(369): Selenocysteine
  MOD_RES (375)..(375): Selenocysteine
  MOD_RES (382)..(382): Selenocysteine
  MOD_RES (387)..(389): Selenocysteine
  MOD_RES (408)..(408): Selenocysteine
  MOD_RES (434)..(434): Selenocysteine
  MOD_RES (450)..(450): Selenocysteine
  MOD_RES (458)..(458): Selenocysteine
  MOD_RES (492)..(493): Selenocysteine
  MOD_RES (515)..(515): Selenocysteine
  MOD_RES (526)..(526): Selenocysteine
  MOD_RES (532)..(532): Selenocysteine
MAXXAXCXRFXDDYQLFEELGKGAFSVVRRCVKKXSXQEYAAKIINXKKLSARDHQKLEREARICRLLKHPNIVRLHDSISEEGFHYLVFDLVXGGELFEDIVAREYYSEADASHCIHQILESVNHIHQHDIVHRDLKPENLLLASKCKGAAVKLADFGLAIEVQGEQQAWFGFAGXPGYLSPEVLRKDPYGKPVDIWACGVILYILLVGYPPFWDEDQHKLYQQIKAGAYDFPSPEWDXVXPEAKNLINQMLXINPAKRIXADQALKHPWVCQRSXVASMMHRQEXVECLRKFNARRKLKGAILXXMLVSRNFSAAKSLLNKKSDGGVKKRKSSSSVHLMPQSNNKNSLVSPAQEPAPLQXAMEPQXXVVHNAXDGIKGSXESCNXXXEDEDLKGRVPEGRSSRDRXAPSAGMQPQPSLCSSAMRKQEIIKIXEQLIEAINNGDFEAYXKICDPGLXSFEPEALGNLVEGMDFHKFYFENLLSKNSKPIHXXILNPHVHVIGEDAACIAYIRLXQYIDGQGRPRXSQSEEXRVWHRRDGKWLNVHYHCSGAPAAPLQ

SEQ ID NO: 4840 - protein, 453 aa, Homo sapiens
  MOD_RES (29)..(29): Selenocysteine
  MOD_RES (112)..(112): Selenocysteine
  MOD_RES (175)..(175): Selenocysteine
  MOD_RES (177)..(177): Selenocysteine
  MOD_RES (189)..(189): Selenocysteine
  MOD_RES (197)..(197): Selenocysteine
  MOD_RES (212)..(212): Selenocysteine
  MOD_RES (222)..(222): Selenocysteine
  MOD_RES (241)..(242): Selenocysteine
  MOD_RES (286)..(286): Selenocysteine
  MOD_RES (292)..(293): Selenocysteine
  MOD_RES (299)..(299): Selenocysteine
  MOD_RES (306)..(306): Selenocysteine
  MOD_RES (311)..(313): Selenocysteine
  MOD_RES (329)..(329): Selenocysteine
  MOD_RES (345)..(345): Selenocysteine
  MOD_RES (353)..(353): Selenocysteine
  MOD_RES (387)..(388): Selenocysteine
  MOD_RES (410)..(410): Selenocysteine
  MOD_RES (421)..(421): Selenocysteine
  MOD_RES (427)..(427): Selenocysteine
RLLKHPNIVRLHDSISEEGFHYLVFDLVXGGELFEDIVAREYYSEADASHCIHQILESVNHIHQHDIVHRDLKPENLLLASKCKGAAVKLADFGLAIEVQGEQQAWFGFAGXPGYLSPEVLRKDPYGKPVDIWACGVILYILLVGYPPFWDEDQHKLYQQIKAGAYDFPSPEWDXVXPEAKNLINQMLXINPAKRIXADQALKHPWVCQRSXVASMMHRQEXVECLRKFNARRKLKGAILXXMLVSRNFSAAKSLLNKKSDGGVKPQSNNKNSLVSPAQEPAPLQXAMEPQXXVVHNAXDGIKGSXESCNXXXEDEDLKVRKQEIIKIXEQLIEAINNGDFEAYXKICDPGLXSFEPEALGNLVEGMDFHKFYFENLLSKNSKPIHXXILNPHVHVIGEDAACIAYIRLXQYIDGQGRPRXSQSEEXRVWHRRDGKWLNVHYHCSGAPAAPLQ

SEQ ID NO: 4841 - protein, 335 aa, Homo sapiens
  MOD_RES (1)..(1): Any amino acid
  MOD_RES (19)..(19): Selenocysteine
  MOD_RES (21)..(21): Selenocysteine
  MOD_RES (33)..(33): Selenocysteine
  MOD_RES (41)..(41): Selenocysteine
  MOD_RES (56)..(56): Selenocysteine
  MOD_RES (66)..(66): Selenocysteine
  MOD_RES (85)..(86): Selenocysteine
  MOD_RES (130)..(130): Selenocysteine
  MOD_RES (136)..(137): Selenocysteine
  MOD_RES (143)..(143): Selenocysteine
  MOD_RES (150)..(150): Selenocysteine
  MOD_RES (155)..(157): Selenocysteine
  MOD_RES (169)..(169): Selenocysteine
  MOD_RES (185)..(185): Selenocysteine
  MOD_RES (211)..(211): Selenocysteine
  MOD_RES (227)..(227): Selenocysteine
  MOD_RES (235)..(235): Selenocysteine
  MOD_RES (269)..(270): Selenocysteine
  MOD_RES (292)..(292): Selenocysteine
  MOD_RES (303)..(303): Selenocysteine
  MOD_RES (309)..(309): Selenocysteine
XYQQIKAGAYDFPSPEWDXVXPEAKNLINQMLXINPAKRIXADQALKHPWVCQRSXVASMMHRQEXVECLRKFNARRKLKGAILXXMLVSRNFSAAKSLLNKKSDGGVKPQSNNKNSLVSPAQEPAPLQXAMEPQXXVVHNAXDGIKGSXESCNXXXEDEDLKAAPLRXGNGSSVPEGRSSRDRXAPSAGMQPQPSLCSSAMRKQEIIKIXEQLIEAINNGDFEAYXKICDPGLXSFEPEALGNLVEGMDFHKFYFENLLSKNSKPIHXXILNPHVHVIGEDAACIAYIRLXQYIDGQGRPRXSQSEEXRVWHRRDGKWLNVHYHCSGAPAAPLQ

SEQ ID NO: 4842 - protein, 88 aa, Homo sapiens
  MOD_RES (5)..(5): Selenocysteine
  MOD_RES (18)..(18): Selenocysteine
  MOD_RES (25)..(25): Selenocysteine
  MOD_RES (57)..(57): Selenocysteine
  MOD_RES (68)..(68): Selenocysteine
  MOD_RES (80)..(80): Selenocysteine
MLKVXVPSCSASSCSSVXASAAPGXASLVPDYWIDGSNRDALSDFFEVESELGRGAXSIVYRCKQKGXQKPYALKVLKKXDCGKGILQ

SEQ ID NO: 4843 - protein, 109 aa, Homo sapiens
  MOD_RES (5)..(5): Selenocysteine
  MOD_RES (18)..(18): Selenocysteine
  MOD_RES (25)..(25): Selenocysteine
  MOD_RES (57)..(57): Selenocysteine
  MOD_RES (68)..(68): Selenocysteine
  MOD_RES (80)..(80): Selenocysteine
  MOD_RES (88)..(88): Selenocysteine
MLKVXVPSCSASSCSSVXASAAPGXASLVPDYWIDGSNRDALSDFFEVESELGRGAXSIVYRCKQKGXQKPYALKVLKKXVDKKIVRXEIGVLLRLSHPNIDCGKGILQ

SEQ ID NO: 4844 - protein, 142 aa, Homo sapiens
  MOD_RES (5)..(5): Selenocysteine
  MOD_RES (18)..(18): Selenocysteine
  MOD_RES (25)..(25): Selenocysteine
  MOD_RES (57)..(57): Selenocysteine
  MOD_RES (68)..(68): Selenocysteine
  MOD_RES (80)..(80): Selenocysteine
  MOD_RES (88)..(88): Selenocysteine
  MOD_RES (110)..(110): Selenocysteine
  MOD_RES (112)..(112): Selenocysteine
  MOD_RES (122)..(122): Selenocysteine
MLKVXVPSCSASSCSSVXASAAPGXASLVPDYWIDGSNRDALSDFFEVESELGRGAXSIVYRCKQKGXQKPYALKVLKKXVDKKIVRXEIGVLLRLSHPNIIKLKEIFEXPXEISLVLELVXGGELFDRIVEKGYYSERDAA

SEQ ID NO: 4845 - protein, 473 aa, Homo sapiens
  MOD_RES (5)..(5): Selenocysteine
  MOD_RES (18)..(18): Selenocysteine
  MOD_RES (25)..(25): Selenocysteine
  MOD_RES (57)..(57): Selenocysteine
  MOD_RES (68)..(68): Selenocysteine
  MOD_RES (80)..(80): Selenocysteine
  MOD_RES (88)..(88): Selenocysteine
  MOD_RES (110)..(110): Selenocysteine
  MOD_RES (112)..(112): Selenocysteine
  MOD_RES (122)..(122): Selenocysteine
  MOD_RES (174)..(174): Selenocysteine
  MOD_RES (200)..(200): Selenocysteine
  MOD_RES (204)..(204): Selenocysteine
  MOD_RES (231)..(231): Selenocysteine
  MOD_RES (290)..(291): Selenocysteine
  MOD_RES (301)..(301): Selenocysteine
  MOD_RES (312)..(312): Selenocysteine
  MOD_RES (443)..(443): Selenocysteine
MLKVXVPSCSASSCSSVXASAAPGXASLVPDYWIDGSNRDALSDFFEVESELGRGAXSIVYRCKQKGXQKPYALKVLKKXVDKKIVRXEIGVLLRLSHPNIIKLKEIFEXPXEISLVLELVXGGELFDRIVEKGYYSERDAADAVKQILEAVAYLHENGIVHRDLKPENLLYAXPAPDAPLKIADFGLSKIVEHQVLMKXVCGXPGYCAPEILRGCAYGPEVDMWSVGIIXYILLCGFEPFYDERGDQFMFRRILNCEYYFISPWWDEVSLNAKDLVRKLIVLDPKKRLXXFQALQHPWVXGKAANFVHMDXAQKKLQEFNARRKLKAAVKAVVASSRLGSASSSHGSIQESHKASRDPSPIQDGNEDMKAIPEGEKIQGDGAQAAVKGAQAELMKVQALEKVKGADINAEEAPKMVPKAVEDGIKVADLELEEGLAEEKLKXVEEAAAPREGQGSSAVGFEVPQQDVILPEY

SEQ ID NO: 4846 - protein, 343 aa, Homo sapiens
  MOD_RES (8)..(8): Selenocysteine
  MOD_RES (67)..(67): Selenocysteine
  MOD_RES (134)..(134): Selenocysteine
  MOD_RES (137)..(137): Selenocysteine
  MOD_RES (149)..(149): Selenocysteine
  MOD_RES (166)..(166): Selenocysteine
  MOD_RES (211)..(211): Selenocysteine
  MOD_RES (234)..(234): Selenocysteine
  MOD_RES (249)..(249): Selenocysteine
  MOD_RES (254)..(254): Selenocysteine
  MOD_RES (270)..(270): Selenocysteine
  MOD_RES (276)..(276): Selenocysteine
  MOD_RES (305)..(305): Selenocysteine
  MOD_RES (309)..(309): Selenocysteine
  MOD_RES (321)..(321): Selenocysteine
  MOD_RES (331)..(331): Selenocysteine
  MOD_RES (333)..(333): Selenocysteine
MQPSCWQXQPRGCCLLPAHIYSLFFSPAIRLLPIPCGCAKVLDDPNEDHLYMVFELVNQGPVMEVPXLKPLSEDQARFYFQDLIKGIEYLHYQKIIHRDIKPSNLLVGEDGHIKIADFGVSNEFKGSDALLSNXVGXPAFMAPESLSEXRKIFSGKALDVWAMGVXLYCFVFGQCPFMDERIMCLHSKIKSQALEFPDQPDIAEDLKDLIXRMLDKNPESRIVVPEIKLHPWVXRHGAEPLPSEDENCXLVEVXEEEVENSVKHIPSLAXVILVKXMIRKRSFGNPFEGSRREERSLSAPGNLLXKKPXRECESLSELKGXKKKKGLDSMXSXVAAGWLDRRV

SEQ ID NO: 4847 - protein, 87 aa, Homo sapiens
  MOD_RES (56)..(56): Selenocysteine
  MOD_RES (85)..(85): Selenocysteine
MSSCVSSQPSSNRAAPQDELGGRGSSSSESQKPCEALRGLSSLSIHLGMESFIVVXECEPGCAVDLGLARDRPLEADGQEVPLDXSG

SEQ ID NO: 4848 - protein, 125 aa, Homo sapiens
  MOD_RES (56)..(56): Selenocysteine
  MOD_RES (85)..(85): Selenocysteine
MSSCVSSQPSSNRAAPQDELGGRGSSSSESQKPCEALRGLSSLSIHLGMESFIVVXECEPGCAVDLGLARDRPLEADGQEVPLDXSGSQARPHLSGRKLSLQERSQGGLAAGGSLDMNGRCICPS

SEQ ID NO: 4849 - protein, 490 aa, Homo sapiens
  MOD_RES (56)..(56): Selenocysteine
  MOD_RES (85)..(85): Selenocysteine
  MOD_RES (145)..(145): Selenocysteine
  MOD_RES (154)..(154): Selenocysteine
  MOD_RES (166)..(166): Selenocysteine
  MOD_RES (189)..(189): Selenocysteine
  MOD_RES (216)..(216): Selenocysteine
  MOD_RES (280)..(280): Selenocysteine
  MOD_RES (347)..(347): Selenocysteine
  MOD_RES (350)..(350): Selenocysteine
  MOD_RES (362)..(362): Selenocysteine
  MOD_RES (379)..(379): Selenocysteine
  MOD_RES (424)..(424): Selenocysteine
  MOD_RES (446)..(446): Selenocysteine
  MOD_RES (475)..(475): Selenocysteine
  MOD_RES (479)..(479): Selenocysteine
  MOD_RES (490)..(490): Selenocysteine
MSSCVSSQPSSNRAAPQDELGGRGSSSSESQKPCEALRGLSSLSIHLGMESFIVVXECEPGCAVDLGLARDRPLEADGQEVPLDXSGSQARPHLSGRKLSLQERSQGGLAAGGSLDMNGRCICPSLPYSPVSSPQSSPRLPRRPXVESHHVSIXGMQDCVQLNQYXLKDEIGKGSYGVVKLAYNENDNXYYAMKVLSKKKLIRQAGFPRRPPPRGXRPAPGGCIQPRGPIEQVYQEIAILKKLDHPNVVKLVEVLDDPNEDHLYMVFELVNQGPVMEVPXLKPLSEDQARFYFQDLIKGIEYLHYQKIIHRDIKPSNLLVGEDGHIKIADFGVSNEFKGSDALLSNXVGXPAFMAPESLSEXRKIFSGKALDVWAMGVXLYCFVFGQCPFMDERIMCLHSKIKSQALEFPDQPDIAEDLKDLIXRMLDKNPESRIVVPEIKILVKXMIRKRSFGNPFEGSRREERSLSAPGNLLXKKPXRECESLSELKX

SEQ ID NO: 4850 - protein, 498 aa, Homo sapiens
  MOD_RES (56)..(56): Selenocysteine
  MOD_RES (85)..(85): Selenocysteine
  MOD_RES (145)..(145): Selenocysteine
  MOD_RES (154)..(154): Selenocysteine
  MOD_RES (166)..(166): Selenocysteine
  MOD_RES (189)..(189): Selenocysteine
  MOD_RES (216)..(216): Selenocysteine
  MOD_RES (280)..(280): Selenocysteine
  MOD_RES (347)..(347): Selenocysteine
  MOD_RES (350)..(350): Selenocysteine
  MOD_RES (362)..(362): Selenocysteine
  MOD_RES (379)..(379): Selenocysteine
  MOD_RES (424)..(424): Selenocysteine
  MOD_RES (446)..(446): Selenocysteine
  MOD_RES (475)..(475): Selenocysteine
  MOD_RES (486)..(486): Selenocysteine
MSSCVSSQPSSNRAAPQDELGGRGSSSSESQKPCEALRGLSSLSIHLGMESFIVVXECEPGCAVDLGLARDRPLEADGQEVPLDXSGSQARPHLSGRKLSLQERSQGGLAAGGSLDMNGRCICPSLPYSPVSSPQSSPRLPRRPXVESHHVSIXGMQDCVQLNQYXLKDEIGKGSYGVVKLAYNENDNXYYAMKVLSKKKLIRQAGFPRRPPPRGXRPAPGGCIQPRGPIEQVYQEIAILKKLDHPNVVKLVEVLDDPNEDHLYMVFELVNQGPVMEVPXLKPLSEDQARFYFQDLIKGIEYLHYQKIIHRDIKPSNLLVGEDGHIKIADFGVSNEFKGSDALLSNXVGXPAFMAPESLSEXRKIFSGKALDVWAMGVXLYCFVFGQCPFMDERIMCLHSKIKSQALEFPDQPDIAEDLKDLIXRMLDKNPESRIVVPEIKILVKXMIRKRSFGNPFEGSRREERSLSAPGNLLXKQGSEDNLQGXDPPPVGEEEVLL

SEQ ID NO: 4851 - protein, 533 aa, Homo sapiens
  MOD_RES (56)..(56): Selenocysteine
  MOD_RES (85)..(85): Selenocysteine
  MOD_RES (145)..(145): Selenocysteine
  MOD_RES (154)..(154): Selenocysteine
  MOD_RES (166)..(166): Selenocysteine
  MOD_RES (189)..(189): Selenocysteine
  MOD_RES (216)..(216): Selenocysteine
  MOD_RES (280)..(280): Selenocysteine
  MOD_RES (347)..(347): Selenocysteine
  MOD_RES (350)..(350): Selenocysteine
  MOD_RES (362)..(362): Selenocysteine
  MOD_RES (379)..(379): Selenocysteine
  MOD_RES (424)..(424): Selenocysteine
  MOD_RES (447)..(447): Selenocysteine
  MOD_RES (462)..(462): Selenocysteine
  MOD_RES (467)..(467): Selenocysteine
  MOD_RES (483)..(483): Selenocysteine
  MOD_RES (489)..(489): Selenocysteine
  MOD_RES (518)..(518): Selenocysteine
  MOD_RES (522)..(522): Selenocysteine
  MOD_RES (533)..(533): Selenocysteine
MSSCVSSQPSSNRAAPQDELGGRGSSSSESQKPCEALRGLSSLSIHLGMESFIVVXECEPGCAVDLGLARDRPLEADGQEVPLDXSGSQARPHLSGRKLSLQERSQGGLAAGGSLDMNGRCICPSLPYSPVSSPQSSPRLPRRPXVESHHVSIXGMQDCVQLNQYXLKDEIGKGSYGVVKLAYNENDNXYYAMKVLSKKKLIRQAGFPRRPPPRGXRPAPGGCIQPRGPIEQVYQEIAILKKLDHPNVVKLVEVLDDPNEDHLYMVFELVNQGPVMEVPXLKPLSEDQARFYFQDLIKGIEYLHYQKIIHRDIKPSNLLVGEDGHIKIADFGVSNEFKGSDALLSNXVGXPAFMAPESLSEXRKIFSGKALDVWAMGVXLYCFVFGQCPFMDERIMCLHSKIKSQALEFPDQPDIAEDLKDLIXRMLDKNPESRIVVPEIKLHPWVXRHGAEPLPSEDENCXLVEVXEEEVENSVKHIPSLAXVILVKXMIRKRSFGNPFEGSRREERSLSAPGNLLXKKPXRECESLSELKX

SEQ ID NO: 4852 - protein, 541 aa, Homo sapiens
  MOD_RES (56)..(56): Selenocysteine
  MOD_RES (85)..(85): Selenocysteine
  MOD_RES (145)..(145): Selenocysteine
  MOD_RES (154)..(154): Selenocysteine
  MOD_RES (166)..(166): Selenocysteine
  MOD_RES (189)..(189): Selenocysteine
  MOD_RES (216)..(216): Selenocysteine
  MOD_RES (280)..(280): Selenocysteine
  MOD_RES (347)..(347): Selenocysteine
  MOD_RES (350)..(350): Selenocysteine
  MOD_RES (362)..(362): Selenocysteine
  MOD_RES (379)..(379): Selenocysteine
  MOD_RES (424)..(424): Selenocysteine
  MOD_RES (447)..(447): Selenocysteine
  MOD_RES (462)..(462): Selenocysteine
  MOD_RES (467)..(467): Selenocysteine
  MOD_RES (483)..(483): Selenocysteine
  MOD_RES (489)..(489): Selenocysteine
  MOD_RES (518)..(518): Selenocysteine
  MOD_RES (529)..(529): Selenocysteine
MSSCVSSQPSSNRAAPQDELGGRGSSSSESQKPCEALRGLSSLSIHLGMESFIVVXECEPGCAVDLGLARDRPLEADGQEVPLDXSGSQARPHLSGRKLSLQERSQGGLAAGGSLDMNGRCICPSLPYSPVSSPQSSPRLPRRPXVESHHVSIXGMQDCVQLNQYXLKDEIGKGSYGVVKLAYNENDNXYYAMKVLSKKKLIRQAGFPRRPPPRGXRPAPGGCIQPRGPIEQVYQEIAILKKLDHPNVVKLVEVLDDPNEDHLYMVFELVNQGPVMEVPXLKPLSEDQARFYFQDLIKGIEYLHYQKIIHRDIKPSNLLVGEDGHIKIADFGVSNEFKGSDALLSNXVGXPAFMAPESLSEXRKIFSGKALDVWAMGVXLYCFVFGQCPFMDERIMCLHSKIKSQALEFPDQPDIAEDLKDLIXRMLDKNPESRIVVPEIKLHPWVXRHGAEPLPSEDENCXLVEVXEEEVENSVKHIPSLAXVILVKXMIRKRSFGNPFEGSRREERSLSAPGNLLXKQGSEDNLQGXDPPPVGEEEVLL

SEQ ID NO: 4853 - protein, 545 aa, Homo sapiens
  MOD_RES (56)..(56): Selenocysteine
  MOD_RES (85)..(85): Selenocysteine
  MOD_RES (145)..(145): Selenocysteine
  MOD_RES (154)..(154): Selenocysteine
  MOD_RES (166)..(166): Selenocysteine
  MOD_RES (189)..(189): Selenocysteine
  MOD_RES (216)..(216): Selenocysteine
  MOD_RES (280)..(280): Selenocysteine
  MOD_RES (347)..(347): Selenocysteine
  MOD_RES (350)..(350): Selenocysteine
  MOD_RES (362)..(362): Selenocysteine
  MOD_RES (379)..(379): Selenocysteine
  MOD_RES (424)..(424): Selenocysteine
  MOD_RES (446)..(446): Selenocysteine
  MOD_RES (475)..(475): Selenocysteine
  MOD_RES (479)..(479): Selenocysteine
MSSCVSSQPSSNRAAPQDELGGRGSSSSESQKPCEALRGLSSLSIHLGMESFIVVXECEPGCAVDLGLARDRPLEADGQEVPLDXSGSQARPHLSGRKLSLQERSQGGLAAGGSLDMNGRCICPSLPYSPVSSPQSSPRLPRRPXVESHHVSIXGMQDCVQLNQYXLKDEIGKGSYGVVKLAYNENDNXYYAMKVLSKKKLIRQAGFPRRPPPRGXRPAPGGCIQPRGPIEQVYQEIAILKKLDHPNVVKLVEVLDDPNEDHLYMVFELVNQGPVMEVPXLKPLSEDQARFYFQDLIKGIEYLHYQKIIHRDIKPSNLLVGEDGHIKIADFGVSNEFKGSDALLSNXVGXPAFMAPESLSEXRKIFSGKALDVWAMGVXLYCFVFGQCPFMDERIMCLHSKIKSQALEFPDQPDIAEDLKDLIXRMLDKNPESRIVVPEIKILVKXMIRKRSFGNPFEGSRREERSLSAPGNLLXKKPXRECESLSELKEARQRRQPPGHRPAPRGGGGSALVRGSPCVESCWAPAPGSPARMHPLRPEEAMEPE

SEQ ID NO: 4854 - protein, 556 aa, Homo sapiens
  MOD_RES (56)..(56): Selenocysteine
  MOD_RES (85)..(85): Selenocysteine
  MOD_RES (145)..(145): Selenocysteine
  MOD_RES (154)..(154): Selenocysteine
  MOD_RES (166)..(166): Selenocysteine
  MOD_RES (189)..(189): Selenocysteine
  MOD_RES (216)..(216): Selenocysteine
  MOD_RES (280)..(280): Selenocysteine
  MOD_RES (347)..(347): Selenocysteine
  MOD_RES (350)..(350): Selenocysteine
  MOD_RES (362)..(362): Selenocysteine
  MOD_RES (379)..(379): Selenocysteine
  MOD_RES (424)..(424): Selenocysteine
  MOD_RES (447)..(447): Selenocysteine
  MOD_RES (462)..(462): Selenocysteine
  MOD_RES (467)..(467): Selenocysteine
  MOD_RES (483)..(483): Selenocysteine
  MOD_RES (489)..(489): Selenocysteine
  MOD_RES (518)..(518): Selenocysteine
  MOD_RES (522)..(522): Selenocysteine
  MOD_RES (534)..(534): Selenocysteine
  MOD_RES (544)..(544): Selenocysteine
  MOD_RES (546)..(546): Selenocysteine
MSSCVSSQPSSNRAAPQDELGGRGSSSSESQKPCEALRGLSSLSIHLGMESFIVVXECEPGCAVDLGLARDRPLEADGQEVPLDXSGSQARPHLSGRKLSLQERSQGGLAAGGSLDMNGRCICPSLPYSPVSSPQSSPRLPRRPXVESHHVSIXGMQDCVQLNQYXLKDEIGKGSYGVVKLAYNENDNXYYAMKVLSKKKLIRQAGFPRRPPPRGXRPAPGGCIQPRGPIEQVYQEIAILKKLDHPNVVKLVEVLDDPNEDHLYMVFELVNQGPVMEVPXLKPLSEDQARFYFQDLIKGIEYLHYQKIIHRDIKPSNLLVGEDGHIKIADFGVSNEFKGSDALLSNXVGXPAFMAPESLSEXRKIFSGKALDVWAMGVXLYCFVFGQCPFMDERIMCLHSKIKSQALEFPDQPDIAEDLKDLIXRMLDKNPESRIVVPEIKLHPWVXRHGAEPLPSEDENCXLVEVXEEEVENSVKHIPSLAXVILVKXMIRKRSFGNPFEGSRREERSLSAPGNLLXKKPXRECESLSELKGXKKKKGLDSMXSXVAAGWLDRRV

SEQ ID NO: 4855 - protein, 588 aa, Homo sapiens
  MOD_RES (56)..(56): Selenocysteine
  MOD_RES (85)..(85): Selenocysteine
  MOD_RES (145)..(145): Selenocysteine
  MOD_RES (154)..(154): Selenocysteine
  MOD_RES (166)..(166): Selenocysteine
  MOD_RES (189)..(189): Selenocysteine
  MOD_RES (216)..(216): Selenocysteine
  MOD_RES (280)..(280): Selenocysteine
  MOD_RES (347)..(347): Selenocysteine
  MOD_RES (350)..(350): Selenocysteine
  MOD_RES (362)..(362): Selenocysteine
  MOD_RES (379)..(379): Selenocysteine
  MOD_RES (424)..(424): Selenocysteine
  MOD_RES (447)..(447): Selenocysteine
  MOD_RES (462)..(462): Selenocysteine
  MOD_RES (467)..(467): Selenocysteine
  MOD_RES (483)..(483): Selenocysteine
  MOD_RES (489)..(489): Selenocysteine
  MOD_RES (518)..(518): Selenocysteine
  MOD_RES (522)..(522): Selenocysteine
MSSCVSSQPSSNRAAPQDELGGRGSSSSESQKPCEALRGLSSLSIHLGMESFIVVXECEPGCAVDLGLARDRPLEADGQEVPLDXSGSQARPHLSGRKLSLQERSQGGLAAGGSLDMNGRCICPSLPYSPVSSPQSSPRLPRRPXVESHHVSIXGMQDCVQLNQYXLKDEIGKGSYGVVKLAYNENDNXYYAMKVLSKKKLIRQAGFPRRPPPRGXRPAPGGCIQPRGPIEQVYQEIAILKKLDHPNVVKLVEVLDDPNEDHLYMVFELVNQGPVMEVPXLKPLSEDQARFYFQDLIKGIEYLHYQKIIHRDIKPSNLLVGEDGHIKIADFGVSNEFKGSDALLSNXVGXPAFMAPESLSEXRKIFSGKALDVWAMGVXLYCFVFGQCPFMDERIMCLHSKIKSQALEFPDQPDIAEDLKDLIXRMLDKNPESRIVVPEIKLHPWVXRHGAEPLPSEDENCXLVEVXEEEVENSVKHIPSLAXVILVKXMIRKRSFGNPFEGSRREERSLSAPGNLLXKKPXRECESLSELKEARQRRQPPGHRPAPRGGGGSALVRGSPCVESCWAPAPGSPARMHPLRPEEAMEPE

SEQ ID NO: 4856 - protein, 197 aa, Homo sapiens
  MOD_RES (32)..(32): Selenocysteine
  MOD_RES (51)..(51): Selenocysteine
  MOD_RES (66)..(66): Selenocysteine
  MOD_RES (76)..(76): Selenocysteine
  MOD_RES (90)..(90): Selenocysteine
  MOD_RES (141)..(141): Selenocysteine
  MOD_RES (194)..(194): Selenocysteine
IWPSEEVLAYYCLKHNNIFRALAVCELGGGMXCLAGLMVAISADVKEVLLXDGNEKAIRNVQDIIXRNQKAGVFKXQKISSCVLRWDNEXDVSQLEGHFDIVMCADCLFLDQYRASLVDAIKRLLQPRGKAMVFAPRRGNXLNQFCNLAEKAGFCIQRHENYDEHISNFHSKLKKENPDIYEENLHYPLLLILXKHG

SEQ ID NO: 4857 - protein, 323 aa, Homo sapiens
  MOD_RES (10)..(10): Selenocysteine
  MOD_RES (13)..(13): Selenocysteine
  MOD_RES (26)..(27): Selenocysteine
  MOD_RES (74)..(74): Selenocysteine
  MOD_RES (81)..(81): Selenocysteine
  MOD_RES (92)..(92): Selenocysteine
  MOD_RES (117)..(117): Selenocysteine
  MOD_RES (122)..(122): Selenocysteine
  MOD_RES (158)..(158): Selenocysteine
  MOD_RES (177)..(177): Selenocysteine
  MOD_RES (192)..(192): Selenocysteine
  MOD_RES (202)..(202): Selenocysteine
  MOD_RES (216)..(216): Selenocysteine
  MOD_RES (267)..(267): Selenocysteine
  MOD_RES (320)..(320): Selenocysteine
MESRVADAGXGEXARAAGGSPAVGCXXRGPVVSAPLGAARWKLLRQVLKQKHLDDCLRHVSVRRFESFNLFSVXEGKEREXEEEVGAWVQYXSIFCPEYSISLRHNSGSLNVEDVLXSFDNXGNVCIWPSEEVLAYYCLKHNNIFRALAVCELGGGMXCLAGLMVAISADVKEVLLXDGNEKAIRNVQDIIXRNQKAGVFKXQKISSCVLRWDNEXDVSQLEGHFDIVMCADCLFLDQYRASLVDAIKRLLQPRGKAMVFAPRRGNXLNQFCNLAEKAGFCIQRHENYDEHISNFHSKLKKENPDIYEENLHYPLLLILXKHG

SEQ ID NO: 4858 - protein, 132 aa, Homo sapiens
  MOD_RES (10)..(10): Selenocysteine
  MOD_RES (13)..(13): Selenocysteine
  MOD_RES (26)..(27): Selenocysteine
  MOD_RES (74)..(74): Selenocysteine
  MOD_RES (81)..(81): Selenocysteine
  MOD_RES (92)..(92): Selenocysteine
  MOD_RES (117)..(117): Selenocysteine
  MOD_RES (122)..(122): Selenocysteine
  MOD_RES (129)..(129): Selenocysteine
MESRVADAGXGEXARAAGGSPAVGCXXRGPVVSAPLGAARWKLLRQVLKQKHLDDCLRHVSVRRFESFNLFSVXEGKEREXEEEVGAWVQYXSIFCPEYSISLRHNSGSLNVEDVLXSFDNXGNVWEAXRGK

SEQ ID NO: 4859 - protein, 136 aa, Homo sapiens
  MOD_RES (10)..(10): Selenocysteine
  MOD_RES (13)..(13): Selenocysteine
  MOD_RES (26)..(27): Selenocysteine
  MOD_RES (74)..(74): Selenocysteine
  MOD_RES (81)..(81): Selenocysteine
  MOD_RES (92)..(92): Selenocysteine
  MOD_RES (117)..(117): Selenocysteine
  MOD_RES (122)..(122): Selenocysteine
MESRVADAGXGEXARAAGGSPAVGCXXRGPVVSAPLGAARWKLLRQVLKQKHLDDCLRHVSVRRFESFNLFSVXEGKEREXEEEVGAWVQYXSIFCPEYSISLRHNSGSLNVEDVLXSFDNXGNVYDVSLYCPCWS

SEQ ID NO: 4860 - protein, 139 aa, Homo sapiens
  MOD_RES (10)..(10): Selenocysteine
  MOD_RES (13)..(13): Selenocysteine
  MOD_RES (26)..(27): Selenocysteine
  MOD_RES (74)..(74): Selenocysteine
  MOD_RES (81)..(81): Selenocysteine
  MOD_RES (92)..(92): Selenocysteine
  MOD_RES (117)..(117): Selenocysteine
  MOD_RES (122)..(122): Selenocysteine
  MOD_RES (127)..(127): Selenocysteine
MESRVADAGXGEXARAAGGSPAVGCXXRGPVVSAPLGAARWKLLRQVLKQKHLDDCLRHVSVRRFESFNLFSVXEGKEREXEEEVGAWVQYXSIFCPEYSISLRHNSGSLNVEDVLXSFDNXGNVYXGSHSVAQAGVQW

SEQ ID NO: 4861 - protein, 93 aa, Homo sapiens
  MOD_RES (1)..(1): Any amino acid
  MOD_RES (42)..(42): Selenocysteine
  MOD_RES (49)..(49): Selenocysteine
  MOD_RES (60)..(60): Selenocysteine
  MOD_RES (85)..(85): Selenocysteine
  MOD_RES (90)..(90): Selenocysteine
XAPLGAARWKLLRQVLKQKHLDDCLRHVSVRRFESFNLFSVXEGKEREXEEEVGAWVQYXSIFCPEYSISLRHNSGSLNVEDVLXSFDNXGNV

SEQ ID NO: 4862 - protein, 71 aa, Homo sapiens
  MOD_RES (1)..(1): Any amino acid
  MOD_RES (20)..(20): Selenocysteine
  MOD_RES (27)..(27): Selenocysteine
  MOD_RES (38)..(38): Selenocysteine
  MOD_RES (63)..(63): Selenocysteine
  MOD_RES (68)..(68): Selenocysteine
XCLRHVSVRRFESFNLFSVXEGKEREXEEEVGAWVQYXSIFCPEYSISLRHNSGSLNVEDVLXSFDNXGNV

SEQ ID NO: 4863 - protein, 83 aa, Homo sapiens
  MOD_RES (1)..(1): Any amino acid
  MOD_RES (18)..(18): Selenocysteine
  MOD_RES (25)..(25): Selenocysteine
  MOD_RES (36)..(36): Selenocysteine
  MOD_RES (61)..(61): Selenocysteine
  MOD_RES (66)..(66): Selenocysteine
  MOD_RES (71)..(71): Selenocysteine
XRHVSVRRFESFNLFSVXEGKEREXEEEVGAWVQYXSIFCPEYSISLRHNSGSLNVEDVLXSFDNXGNVYXGSHSVAQAGVQW

SEQ ID NO: 4864 - protein, 296 aa, Homo sapiens
  MOD_RES (8)..(8): Selenocysteine
  MOD_RES (63)..(63): Selenocysteine
  MOD_RES (93)..(93): Selenocysteine
  MOD_RES (95)..(96): Selenocysteine
  MOD_RES (108)..(108): Selenocysteine
  MOD_RES (140)..(140): Selenocysteine
  MOD_RES (181)..(182): Selenocysteine
  MOD_RES (219)..(219): Selenocysteine
  MOD_RES (240)..(241): Selenocysteine
  MOD_RES (244)..(244): Selenocysteine
  MOD_RES (263)..(263): Selenocysteine
  MOD_RES (272)..(272): Selenocysteine
  MOD_RES (280)..(280): Selenocysteine
MESMAVAXDGGERPGVPAGSGLSASQRRAELRRRKLLMNSEQRINRIMGFHRPGSGAEEESQXKSKQQDSDKLNSLSVPSVSKRVVLGDSVSXGXXDQQGGVAEVKGXQLGDKLDSFIKPPECSSDVNLELRQRNRGDLXADSVQRGSRHGLEQYLSRFEEAMKLRKQLISEKPSQEDGNXXEEFDSFRIFRLVGCALLALGVRAFVCKYLSIFAPFLXLQLAYMGLYKYFPKSEKKIKXXVLXAALLLSGIPAEVINRSMDXYSKMGEVFXDLCVYFFXFIFCHELLDYWGSEVP

SEQ ID NO: 4865 - protein, 80 aa, Homo sapiens
  MOD_RES (8)..(8): Selenocysteine
  MOD_RES (67)..(68): Selenocysteine
MESMAVAXDGGERPGVPAGSGLSASQRRAELRRRKLLMNSEQRINRIMGFHRPGSGAVHICSISYFXXCVHGIIQIFSQE

SEQ ID NO: 4866 - protein, 237 aa, Homo sapiens
  MOD_RES (29)..(29): Selenocysteine
  MOD_RES (34)..(34): Selenocysteine
  MOD_RES (67)..(67): Selenocysteine
  MOD_RES (79)..(79): Selenocysteine
  MOD_RES (97)..(97): Selenocysteine
  MOD_RES (135)..(135): Selenocysteine
  MOD_RES (183)..(183): Selenocysteine
  MOD_RES (197)..(197): Selenocysteine
MSWLASYLADADCLPSAAQIRSAYNEPLXPSSNXSLSPVGSPVSEIAFEKPNLPSAADWSEFLSASXSEKVENEFAQLXLSDHEQRELYEAARLVQXAFRKYKGRPLREQQEVAAAVIQRCYRKYKQYALYKKMXQAAILIQSKFRSYYEQKKFQQSRRAAVLIQKYYRSYKKCGKRRQARRXAVIVQQKLRSSLLXKKQDQAARKIMRFLRRCRHRVKELKKAKELEDIQQHPLAM

SEQ ID NO: 4867 - protein, 92 aa, Homo sapiens
  MOD_RES (12)..(12): Selenocysteine
  MOD_RES (20)..(20): Selenocysteine
  MOD_RES (34)..(34): Selenocysteine
  MOD_RES (46)..(46): Selenocysteine
  MOD_RES (88)..(88): Selenocysteine
MWRAEGKWLPKXSRKAQGRXDPVSVLMELRGRRXLIKMPYEISAGXQCCEDDHGNSNSSHVKIFLPKKLLECLPKCSSLPKERHRWNXNERS

SEQ ID NO: 4868 - protein, 101 aa, Homo sapiens
  MOD_RES (12)..(12): Selenocysteine
  MOD_RES (25)..(25): Selenocysteine
  MOD_RES (27)..(27): Selenocysteine
  MOD_RES (33)..(33): Selenocysteine
  MOD_RES (76)..(76): Selenocysteine
  MOD_RES (81)..(82): Selenocysteine
MWRAEGKWLPKXSRKSVSQSVFCGXSXYCVLNXVPPIEDDHGNSNSSHVKIFLPKKLLECLPKCSSLPKERHRWNXNEALXXHLFMGAAKKRDPQSWSHEG

SEQ ID NO: 4869 - protein, 1673 aa, Homo sapiens
  MOD_RES (12)..(12): Selenocysteine
  MOD_RES (25)..(25): Selenocysteine
  MOD_RES (27)..(27): Selenocysteine
  MOD_RES (33)..(33): Selenocysteine
  MOD_RES (76)..(76): Selenocysteine
  MOD_RES (86)..(86): Selenocysteine
  MOD_RES (95)..(96): Selenocysteine
  MOD_RES (100)..(100): Selenocysteine
  MOD_RES (132)..(133): Selenocysteine
  MOD_RES (160)..(160): Selenocysteine
  MOD_RES (201)..(201): Selenocysteine
  MOD_RES (210)..(210): Selenocysteine
  MOD_RES (228)..(228): Selenocysteine
  MOD_RES (253)..(253): Selenocysteine
  MOD_RES (259)..(259): Selenocysteine
  MOD_RES (265)..(265): Selenocysteine
  MOD_RES (294)..(294): Selenocysteine
  MOD_RES (341)..(341): Selenocysteine
  MOD_RES (346)..(346): Selenocysteine
  MOD_RES (354)..(355): Selenocysteine
  MOD_RES (379)..(379): Selenocysteine
  MOD_RES (398)..(398): Selenocysteine
  MOD_RES (405)..(405): Selenocysteine
  MOD_RES (411)..(411): Selenocysteine
  MOD_RES (415)..(415): Selenocysteine
  MOD_RES (446)..(447): Selenocysteine
  MOD_RES (458)..(458): Selenocysteine
  MOD_RES (468)..(469): Selenocysteine
  MOD_RES (479)..(480): Selenocysteine
  MOD_RES (497)..(497): Selenocysteine
  MOD_RES (525)..(526): Selenocysteine
  MOD_RES (529)..(529): Selenocysteine
  MOD_RES (534)..(534): Selenocysteine
  MOD_RES (537)..(537): Selenocysteine
  MOD_RES (561)..(561): Selenocysteine
  MOD_RES (563)..(563): Selenocysteine
  MOD_RES (579)..(580): Selenocysteine
  MOD_RES (596)..(596): Selenocysteine
  MOD_RES (602)..(602): Selenocysteine
  MOD_RES (611)..(611): Selenocysteine
  MOD_RES (631)..(631): Selenocysteine
  MOD_RES (641)..(641): Selenocysteine
  MOD_RES (646)..(646): Selenocysteine
  MOD_RES (649)..(649): Selenocysteine
  MOD_RES (655)..(655): Selenocysteine
  MOD_RES (664)..(664): Selenocysteine
  MOD_RES (669)..(669): Selenocysteine
  MOD_RES (685)..(685): Selenocysteine
  MOD_RES (691)..(691): Selenocysteine
  MOD_RES (694)..(694): Selenocysteine
  MOD_RES (723)..(723): Selenocysteine
  MOD_RES (789)..(789): Selenocysteine
  MOD_RES (801)..(801): Selenocysteine
  MOD_RES (815)..(815): Selenocysteine
  MOD_RES (842)..(842): Selenocysteine
  MOD_RES (860)..(860): Selenocysteine
  MOD_RES (874)..(874): Selenocysteine
  MOD_RES (892)..(892): Selenocysteine
  MOD_RES (930)..(930): Selenocysteine
  MOD_RES (934)..(934): Selenocysteine
  MOD_RES (959)..(959): Selenocysteine
  MOD_RES (994)..(994): Selenocysteine
  MOD_RES (1027)..(1027): Selenocysteine
  MOD_RES (1062)..(1062): Selenocysteine
  MOD_RES (1067)..(1067): Selenocysteine
  MOD_RES (1079)..(1079): Selenocysteine
  MOD_RES (1083)..(1083): Selenocysteine
  MOD_RES (1089)..(1089): Selenocysteine
  MOD_RES (1112)..(1112): Selenocysteine
  MOD_RES (1190)..(1190): Selenocysteine
  MOD_RES (1212)..(1212): Selenocysteine
  MOD_RES (1217)..(1217): Selenocysteine
  MOD_RES (1255)..(1255): Selenocysteine
  MOD_RES (1263)..(1263): Selenocysteine
  MOD_RES (1286)..(1286): Selenocysteine
  MOD_RES (1304)..(1304): Selenocysteine
  MOD_RES (1307)..(1307): Selenocysteine
  MOD_RES (1332)..(1332): Selenocysteine
  MOD_RES (1336)..(1336): Selenocysteine
  MOD_RES (1342)..(1342): Selenocysteine
  MOD_RES (1372)..(1372): Selenocysteine
  MOD_RES (1399)..(1399): Selenocysteine
  MOD_RES (1408)..(1408): Selenocysteine
  MOD_RES (1428)..(1428): Selenocysteine
  MOD_RES (1432)..(1432): Selenocysteine
  MOD_RES (1436)..(1436): Selenocysteine
  MOD_RES (1465)..(1465): Selenocysteine
  MOD_RES (1470)..(1470): Selenocysteine
  MOD_RES (1503)..(1503): Selenocysteine
  MOD_RES (1515)..(1515): Selenocysteine
  MOD_RES (1533)..(1533): Selenocysteine
  MOD_RES (1571)..(1571): Selenocysteine
  MOD_RES (1619)..(1619): Selenocysteine
  MOD_RES (1633)..(1633): Selenocysteine
  MOD_RES (1673)..(1673): Selenocysteine
MWRAEGKWLPKXSRKSVSQSVFCGXSXYCVLNXVPPIEDDHGNSNSSHVKIFLPKKLLECLPKCSSLPKERHRWNXNEEIAAYLIXFEKHEEWLXXSPKXRPQNGSMILYNRKKVKYRKDGYCWKKRKDGKXXREDHMKLKVQGVECLYGCYVHSSIIPXFHRRCYWLLQNPDIVLVHYLNVPAIEDCGKPCGPILCSINXDKKEWAKWXKEELIGQLKPMFHGIKWXCSNGNSSSGFSVEQLVQQILDSHQXKPQPRXHNCLCXGSLGAGGSVHHKCNSAKHRIISPKVEPRXGGYGSHSEVQHNDVSEGKHEHSHSKGSSREKRNGKVAKPVLLHQSSXEVSSXNQVEVPDXXQSSPVSISSGLNSDPDMVDSPVVXGVSGMAVASVMGSLSQSAXVFMSEVXNEAVYXMSPXAGPNHHLLSPDASQGLVLAVSSDGHKFAFPXXGSSESLSMLPXNVSEELVLSXXLDGGRKIPEXXMNFDPDCFLNNPKQGQXYGGGGLKAEMVSSNIRHSPPGERSFSFXXVLXKEIKXEDXSFEQQMAKEAYSSSAAAVAASSLXLXAGSSLLPSGGGLSPSXXLEQMDFSAIDSNKDYXSSFSQXGHSPHIHQXPSPSFFLQDASKPLPVEQNXHSSLSDSGGXFVMPXVKXEASSQXSSCSGHVEXRIESXSSLHLMQFQANFQAMXAEGEVXMEXSQAAEGSEVLLKSGELQACSSEHYLQPEXNGVIRSAGGVPILPGNVVQGLYPVAQPSLGNASNMELSLDHFDISFSNQFSDLINDFISVEGGSSXIYGHQLVSGDSXALSQSEDGARAPFXQAEMCLPCCSPQQGSLQLSSSEGGASXMAYMHVAEVVSAASAQGXLGMLQQSGRVFMVXDYSPEWSYPEGGVKVLIXGPWQEASNNYSCLFDQISVPASLIQPGVLRCYCPAHDXGLVXLQVAFNNQIISNSVVFEYKARALPXLPSSQHDWLSLDDNQFRMSILERLEQMERRMAEMXGSQQHKQASGGGSSGGGSGSGNGGSQAQCASGXGALGSCFESRVVVVCEKMMSRACWAKSKHLIHSKXFRGMXLLHLAAAQGYAXLIQXLIKWRXKHADSIDLELEVDPLNVDHFSCXPLMWACALGHLEAAVVLYKWDRRAISIPDSLGRLPLGIARSRGHVKLAECLEHLQRDEQAQLGQNPRIHCPASEEPSXESWMAQWHSEAISSPEIPKGVXVIASXNPELRRPRSEPSNYYSSESHKDYPAPKKHKLNPEYFQXRQEKLLPXALSLEEPNIRKQSPSSKQSVPEXLSPSEGVRDFSRELSPPXPEXAAFQASGSQPVGKWNSKDLYIGVSXVQVXGNPKGXSVGKEAAPSQVRPREPMSVLMMANREVVNXELGSYRDSAENEECGQPMDDIQVNMMXLAEHIIEAXPDRIKQENFVPMESSGLERXDPAXISSXMSWLASYLADADCLPSAAQIRSAYNEPLXPSSNXSLSPVGSPVSEIAFEKPNLPSAADWSEFLSASXSEKVENEFAQLXLSDHEQRELYEAARLVQXAFRKYKGRPLREQQEVAAAVIQRCYRKYKQYALYKKMXQAAILIQSKFRSYYEQKKFQQSRRAAVLIQKYYRSYKKCGKRRQARRXAVIVQQKLRSSLLXKKQDQAARKIMRFLRRCRHSPLVDHRLYKRSERIEKGQGX

SEQ ID NO: 4870 - protein, 80 aa, Homo sapiens
  MOD_RES (12)..(12): Selenocysteine
  MOD_RES (25)..(25): Selenocysteine
  MOD_RES (27)..(27): Selenocysteine
  MOD_RES (33)..(33): Selenocysteine
  MOD_RES (76)..(76): Selenocysteine
MWRAEGKWLPKXSRKSVSQSVFCGXSXYCVLNXVPPIEDDHGNSNSSHVKIFLPKKLLECLPKCSSLPKERHRWNXNERS

SEQ ID NO: 4871 - protein, 73 aa, Homo sapiens
  MOD_RES (5)..(5): Selenocysteine
  MOD_RES (18)..(18): Selenocysteine
  MOD_RES (20)..(20): Selenocysteine
  MOD_RES (26)..(26): Selenocysteine
  MOD_RES (69)..(69): Selenocysteine
WLPKXSRKSVSQSVFCGXSXYCVLNXVPPIEDDHGNSNSSHVKIFLPKKLLECLPKCSSLPKERHRWNXNERS

SEQ ID NO: 4872 - protein, 44 aa, Homo sapiens
  MOD_RES (1)..(1): Any amino acid
  MOD_RES (4)..(4): Selenocysteine
  MOD_RES (18)..(18): Selenocysteine
  MOD_RES (30)..(30): Selenocysteine
XGRXDPVSVLMELRGRRXLIKMPYEISAGXQCCEERFPKCILRN

SEQ ID NO: 4873 - protein, 637 aa, Homo sapiens
  MOD_RES (1)..(1): Any amino acid
  MOD_RES (19)..(19): Selenocysteine
  MOD_RES (24)..(24): Selenocysteine
  MOD_RES (36)..(36): Selenocysteine
  MOD_RES (40)..(40): Selenocysteine
  MOD_RES (46)..(46): Selenocysteine
  MOD_RES (69)..(69): Selenocysteine
  MOD_RES (147)..(147): Selenocysteine
  MOD_RES (169)..(169): Selenocysteine
  MOD_RES (174)..(174): Selenocysteine
  MOD_RES (212)..(212): Selenocysteine
  MOD_RES (220)..(220): Selenocysteine
  MOD_RES (243)..(243): Selenocysteine
  MOD_RES (261)..(261): Selenocysteine
  MOD_RES (264)..(264): Selenocysteine
  MOD_RES (289)..(289): Selenocysteine
  MOD_RES (293)..(293): Selenocysteine
  MOD_RES (299)..(299): Selenocysteine
  MOD_RES (329)..(329): Selenocysteine
  MOD_RES (356)..(356): Selenocysteine
  MOD_RES (365)..(365): Selenocysteine
  MOD_RES (385)..(385): Selenocysteine
  MOD_RES (389)..(389): Selenocysteine
  MOD_RES (393)..(393): Selenocysteine
  MOD_RES (422)..(422): Selenocysteine
  MOD_RES (427)..(427): Selenocysteine
  MOD_RES (460)..(460): Selenocysteine
  MOD_RES (472)..(472): Selenocysteine
  MOD_RES (490)..(490): Selenocysteine
  MOD_RES (522)..(522): Selenocysteine
  MOD_RES (535)..(535): Selenocysteine
  MOD_RES (583)..(583): Selenocysteine
  MOD_RES (597)..(597): Selenocysteine
XMMSRACWAKSKHLIHSKXFRGMXLLHLAAAQGYAXLIQXLIKWRXKHADSIDLELEVDPLNVDHFSCXPLMWACALGHLEAAVVLYKWDRRAISIPDSLGRLPLGIARSRGHVKLAECLEHLQRDEQAQLGQNPRIHCPASEEPSXESWMAQWHSEAISSPEIPKGVXVIASXNPELRRPRSEPSNYYSSESHKDYPAPKKHKLNPEYFQXRQEKLLPXALSLEEPNIRKQSPSSKQSVPEXLSPSEGVRDFSRELSPPXPEXAAFQASGSQPVGKWNSKDLYIGVSXVQVXGNPKGXSVGKEAAPSQVRPREPMSVLMMANREVVNXELGSYRDSAENEECGQPMDDIQVNMMXLAEHIIEAXPDRIKQENFVPMESSGLERXDPAXISSXMSWLASYLADADCLPSAAQIRSAYNEPLXPSSNXSLSPVGSPVSEIAFEKPNLPSAADWSEFLSASXSEKVENEFAQLXLSDHEQRELYEAARLVQXAFRKYKGRPLREQQEVAAAVIQRCYRKYKQLXWIALKYALYKKMXQAAILIQSKFRSYYEQKKFQQSRRAAVLIQKYYRSYKKCGKRRQARRXAVIVQQKLRSSLLXKKQDQAARKIMRFLRRCRHRVKELKKAKELEDIQQHPLAM

SEQ ID NO: 4874 - protein, 239 aa, Homo sapiens
  MOD_RES (1)..(1): Any amino acid
  MOD_RES (8)..(8): Selenocysteine
  MOD_RES (12)..(12): Selenocysteine
  MOD_RES (16)..(16): Selenocysteine
  MOD_RES (69)..(69): Selenocysteine
  MOD_RES (81)..(81): Selenocysteine
  MOD_RES (99)..(99): Selenocysteine
  MOD_RES (137)..(137): Selenocysteine
  MOD_RES (185)..(185): Selenocysteine
  MOD_RES (199)..(199): Selenocysteine
XSSGLERXDPAXISSXMSWLASYLADADCLPSAAQIRLSPVGSPVSEIAFEKPNLPSAADWSEFLSASXSEKVENEFAQLXLSDHEQRELYEAARLVQXAFRKYKGRPLREQQEVAAAVIQRCYRKYKQYALYKKMXQAAILIQSKFRSYYEQKKFQQSRRAAVLIQKYYRSYKKCGKRRQARRXAVIVQQKLRSSLLXKKQDQAARKIMRFLRRCRHRVKELKKAKELEDIQQHPLAM

SEQ ID NO: 4875 - protein, 39 aa, Homo sapiens
  MOD_RES (1)..(1): Any amino acid
  MOD_RES (32)..(32): Selenocysteine
XSSHVKIFLPKKLLECLPKCSSLPKERHRWNXNEVLKFW

SEQ ID NO: 4876 - protein, 178 aa, Homo sapiens
  MOD_RES (3)..(4): Selenocysteine
  MOD_RES (40)..(40): Selenocysteine
  MOD_RES (50)..(50): Selenocysteine
  MOD_RES (64)..(64): Selenocysteine
  MOD_RES (96)..(97): Selenocysteine
  MOD_RES (127)..(127): Selenocysteine
  MOD_RES (150)..(150): Selenocysteine
KDXXEVAENSHHLKIFLPKKLLECLPRCPLLPPERLRWNXNEEIASYLIXFEKHDEWLSCAPKXRPQNGSIILYNRKKVKYRKDGYLWKKRKDGKXXREDHMKLKVQGMEQRPSRVAEVVPGGVVGXAEAHVSWHQVELREWNRRVLCRXPGAADFGHPPNQACSPNPRLSLQWGAWF

SEQ ID NO: 4877 - protein, 1197 aa, Homo sapiens
  MOD_RES (7)..(7): Selenocysteine
  MOD_RES (10)..(10): Selenocysteine
  MOD_RES (45)..(45): Selenocysteine
  MOD_RES (55)..(55): Selenocysteine
  MOD_RES (69)..(69): Selenocysteine
  MOD_RES (101)..(102): Selenocysteine
  MOD_RES (129)..(129): Selenocysteine
  MOD_RES (202)..(202): Selenocysteine
  MOD_RES (217)..(217): Selenocysteine
  MOD_RES (220)..(220): Selenocysteine
  MOD_RES (226)..(226): Selenocysteine
  MOD_RES (241)..(241): Selenocysteine
  MOD_RES (247)..(247): Selenocysteine
  MOD_RES (262)..(262): Selenocysteine
  MOD_RES (264)..(264): Selenocysteine
  MOD_RES (290)..(290): Selenocysteine
  MOD_RES (315)..(315): Selenocysteine
  MOD_RES (325)..(325): Selenocysteine
  MOD_RES (331)..(331): Selenocysteine
  MOD_RES (341)..(341): Selenocysteine
  MOD_RES (343)..(343): Selenocysteine
  MOD_RES (364)..(364): Selenocysteine
  MOD_RES (391)..(391): Selenocysteine
  MOD_RES (410)..(410): Selenocysteine
  MOD_RES (527)..(527): Selenocysteine
  MOD_RES (536)..(536): Selenocysteine
  MOD_RES (538)..(538): Selenocysteine
  MOD_RES (556)..(556): Selenocysteine
  MOD_RES (560)..(560): Selenocysteine
  MOD_RES (627)..(627): Selenocysteine
  MOD_RES (698)..(698): Selenocysteine
  MOD_RES (731)..(731): Selenocysteine
  MOD_RES (740)..(740): Selenocysteine
  MOD_RES (760)..(760): Selenocysteine
  MOD_RES (836)..(836): Selenocysteine
  MOD_RES (851)..(851): Selenocysteine
  MOD_RES (855)..(855): Selenocysteine
  MOD_RES (877)..(877): Selenocysteine
  MOD_RES (903)..(903): Selenocysteine
  MOD_RES (952)..(952): Selenocysteine
  MOD_RES (975)..(975): Selenocysteine
  MOD_RES (983)..(983): Selenocysteine
  MOD_RES (1001)..(1001): Selenocysteine
  MOD_RES (1029)..(1029): Selenocysteine
  MOD_RES (1041)..(1041): Selenocysteine
  MOD_RES (1059)..(1059): Selenocysteine
  MOD_RES (1097)..(1097): Selenocysteine
  MOD_RES (1143)..(1143): Selenocysteine
  MOD_RES (1146)..(1146): Selenocysteine
  MOD_RES (1157)..(1157): Selenocysteine
  MOD_RES (1197)..(1197): Selenocysteine
MAAAAVXRGXPGENSHHLKIFLPKKLLECLPRCPLLPPERLRWNXNEEIASYLIXFEKHDEWLSCAPKXRPQNGSIILYNRKKVKYRKDGYLWKKRKDGKXXREDHMKLKVQGMECLYGCYVHSSIVPXFHRRCYWLLQNPDIVLVHYLNVPALEDCGKGCSPIFCSISSDRREWLKWSREELLGQLKPMFHGIKWSCGNGXEEFSVEHLVQQILDXHPXKPAPRXHACLCSGGLGSGSLXHKCSSXKHRIISPKVEPRALXLXSIPHAHPPEPPPLIAPLPPELPKAHXSPSSSSSSSSSGFAEPLEIRPSPPXSRGGSSRGGXAILLLXGLEQRAGGLXPXRHLAPQADPRPSMSLAVVVGXEPSAPPAPPSPAFDPDRFLNSPQRGQXYGGGQGVSPDFPEAEAAHXPCSALEPAAALEPQAAARGPPPQSVAGGRRGNCFFIQDDDSGEELKGHGAAPPIPSPPPSPPPSPAPLEPSSRVGRGEALFGGPVGASELEPFSLSSFPDLMGELISDEAPSIPAPXPQLSPALSXIXDFSPEWSYPEGGVKVLIXGPWXEAAEHYSCVFDHIAVPASLVQPGVLRCYCPAHEVGLVSLQVAGREGPLSASVLFEYRARRFLSLPSXQLDWLSLDDNQFRMSILERLEQMEKRMAEIAAAGQVPCQGPDAPPVQDEGQGPGFEARVVVLVESMIPRSXWKGPERLAHGSPFRGMSLLHLAAAQGYARLIEXLSQWRSVEXGSLDLEQEVDPLNVDHFSCXPLMWACALGHLEAAVLLFRWNRQALSIPDSLGRLPLSVAHSRGHVRLARCLEELQRQEPSVEPPFALSPPSSSPDXGLSSVSSPSELSDGXFSVXSAYSSAPDGSPPPAPLPASEMXMEDMAPGQLSSGVPEAPLLLMDYEAXNSKGPLSSLPALPPASDDGAAPEDADSPQAVDVIPVDMISLAKQIIEAXPERIKREDFVGLPEAGASMRERXGAVGLSEXMSWLASYLENVDHFPSSXPPSELPFERGRLAVPSAPSWAEFLSASXSGKMESDFALLXLSDHEQRELYEAARVIQXAFRKYKGRRLKEQQEVAAAVIQRCYRKYKQFALYKKMXQAAILIQSKFRSYYEQKRFQQSRRAAVLIQQHYRSYRRRPGPPHRXSAXLPARNKGSFLXKKQDQAARKIMRFLRRCRHRMRELKQNQELEGLPQPGLAX

SEQ ID NO: 4878 - protein, 163 aa, Homo sapiens
  MOD_RES (7)..(7): Selenocysteine
  MOD_RES (10)..(10): Selenocysteine
  MOD_RES (45)..(45): Selenocysteine
  MOD_RES (55)..(55): Selenocysteine
  MOD_RES (69)..(69): Selenocysteine
  MOD_RES (101)..(102): Selenocysteine
  MOD_RES (126)..(126): Selenocysteine
  MOD_RES (131)..(131): Selenocysteine
MAAAAVXRGXPGENSHHLKIFLPKKLLECLPRCPLLPPERLRWNXNEEIASYLIXFEKHDEWLSCAPKXRPQNGSIILYNRKKVKYRKDGYLWKKRKDGKXXREDHMKLKVQGMEGLNRGRVGEQXSPPPXPACLLAVSLWLLRSLFHRPHIPSALLLAAPEP

SEQ ID NO: 4879 - protein, 1241 aa, Homo sapiens
  MOD_RES (3)..(3): Selenocysteine
  MOD_RES (16)..(16): Selenocysteine
  MOD_RES (23)..(23): Selenocysteine
  MOD_RES (26)..(26): Selenocysteine
  MOD_RES (29)..(30): Selenocysteine
  MOD_RES (66)..(66): Selenocysteine
  MOD_RES (76)..(76): Selenocysteine
  MOD_RES (90)..(90): Selenocysteine
  MOD_RES (122)..(123): Selenocysteine
  MOD_RES (150)..(150): Selenocysteine
  MOD_RES (223)..(223): Selenocysteine
  MOD_RES (238)..(238): Selenocysteine
  MOD_RES (241)..(241): Selenocysteine
  MOD_RES (247)..(247): Selenocysteine
  MOD_RES (262)..(262): Selenocysteine
  MOD_RES (268)..(268): Selenocysteine
  MOD_RES (283)..(283): Selenocysteine
  MOD_RES (285)..(285): Selenocysteine
  MOD_RES (311)..(311): Selenocysteine
  MOD_RES (336)..(336): Selenocysteine
  MOD_RES (346)..(346): Selenocysteine
  MOD_RES (352)..(352): Selenocysteine
  MOD_RES (362)..(362): Selenocysteine
  MOD_RES (364)..(364): Selenocysteine
  MOD_RES (385)..(385): Selenocysteine
  MOD_RES (412)..(412): Selenocysteine
  MOD_RES (431)..(431): Selenocysteine
  MOD_RES (548)..(548): Selenocysteine
  MOD_RES (557)..(557): Selenocysteine
  MOD_RES (559)..(559): Selenocysteine
  MOD_RES (577)..(577): Selenocysteine
  MOD_RES (581)..(581): Selenocysteine
  MOD_RES (648)..(648): Selenocysteine
  MOD_RES (719)..(719): Selenocysteine
  MOD_RES (752)..(752): Selenocysteine
  MOD_RES (761)..(761): Selenocysteine
  MOD_RES (781)..(781): Selenocysteine
  MOD_RES (857)..(857): Selenocysteine
  MOD_RES (872)..(872): Selenocysteine
  MOD_RES (876)..(876): Selenocysteine
  MOD_RES (898)..(898): Selenocysteine
  MOD_RES (924)..(924): Selenocysteine
  MOD_RES (973)..(973): Selenocysteine
  MOD_RES (996)..(996): Selenocysteine
  MOD_RES (1004)..(1004): Selenocysteine
  MOD_RES (1022)..(1022): Selenocysteine
  MOD_RES (1050)..(1050): Selenocysteine
  MOD_RES (1062)..(1062): Selenocysteine
  MOD_RES (1080)..(1080): Selenocysteine
  MOD_RES (1112)..(1112): Selenocysteine
  MOD_RES (1125)..(1125): Selenocysteine
  MOD_RES (1171)..(1171): Selenocysteine
  MOD_RES (1174)..(1174): Selenocysteine
  MOD_RES (1203)..(1203): Selenocysteine
  MOD_RES (1208)..(1208): Selenocysteine
  MOD_RES (1222)..(1222): Selenocysteine
  MOD_RES (1226)..(1226): Selenocysteine
MGXDSPSPRPLRPGVXLPPGALXMNXKDXXEVAENSHHLKIFLPKKLLECLPRCPLLPPERLRWNXNEEIASYLIXFEKHDEWLSCAPKXRPQNGSIILYNRKKVKYRKDGYLWKKRKDGKXXREDHMKLKVQGMECLYGCYVHSSIVPXFHRRCYWLLQNPDIVLVHYLNVPALEDCGKGCSPIFCSISSDRREWLKWSREELLGQLKPMFHGIKWSCGNGXEEFSVEHLVQQILDXHPXKPAPRXHACLCSGGLGSGSLXHKCSSXKHRIISPKVEPRALXLXSIPHAHPPEPPPLIAPLPPELPKAHXSPSSSSSSSSSGFAEPLEIRPSPPXSRGGSSRGGXAILLLXGLEQRAGGLXPXRHLAPQADPRPSMSLAVVVGXEPSAPPAPPSPAFDPDRFLNSPQRGQXYGGGQGVSPDFPEAEAAHXPCSALEPAAALEPQAAARGPPPQSVAGGRRGNCFFIQDDDSGEELKGHGAAPPIPSPPPSPPPSPAPLEPSSRVGRGEALFGGPVGASELEPFSLSSFPDLMGELISDEAPSIPAPXPQLSPALSXIXDFSPEWSYPEGGVKVLIXGPWXEAAEHYSCVFDHIAVPASLVQPGVLRCYCPAHEVGLVSLQVAGREGPLSASVLFEYRARRFLSLPSXQLDWLSLDDNQFRMSILERLEQMEKRMAEIAAAGQVPCQGPDAPPVQDEGQGPGFEARVVVLVESMIPRSXWKGPERLAHGSPFRGMSLLHLAAAQGYARLIEXLSQWRSVEXGSLDLEQEVDPLNVDHFSCXPLMWACALGHLEAAVLLFRWNRQALSIPDSLGRLPLSVAHSRGHVRLARCLEELQRQEPSVEPPFALSPPSSSPDXGLSSVSSPSELSDGXFSVXSAYSSAPDGSPPPAPLPASEMXMEDMAPGQLSSGVPEAPLLLMDYEAXNSKGPLSSLPALPPASDDGAAPEDADSPQAVDVIPVDMISLAKQIIEAXPERIKREDFVGLPEAGASMRERXGAVGLSEXMSWLASYLENVDHFPSSXPPSELPFERGRLAVPSAPSWAEFLSASXSGKMESDFALLXLSDHEQRELYEAARVIQXAFRKYKGRRLKEQQEVAAAVIQRCYRKYKQLXWIALKFALYKKMXQAAILIQSKFRSYYEQKRFQQSRRAAVLIQQHYRSYRRRPGPPHRXSAXLPARNKLLSHQEAGPGSPEDHEIPAALPXQDEGXEAEPGAGRASPAGXGHMXWPPPFSPPWGRLVQS

SEQ ID NO: 4880 - protein, 1201 aa, Homo sapiens
  MOD_RES (3)..(3): Selenocysteine
  MOD_RES (16)..(16): Selenocysteine
  MOD_RES (23)..(23): Selenocysteine
  MOD_RES (26)..(26): Selenocysteine
  MOD_RES (29)..(30): Selenocysteine
  MOD_RES (66)..(66): Selenocysteine
  MOD_RES (76)..(76): Selenocysteine
  MOD_RES (90)..(90): Selenocysteine
  MOD_RES (122)..(123): Selenocysteine
  MOD_RES (199)..(199): Selenocysteine
  MOD_RES (214)..(214): Selenocysteine
  MOD_RES (217)..(217): Selenocysteine
  MOD_RES (223)..(223): Selenocysteine
  MOD_RES (238)..(238): Selenocysteine
  MOD_RES (244)..(244): Selenocysteine
  MOD_RES (259)..(259): Selenocysteine
  MOD_RES (261)..(261): Selenocysteine
  MOD_RES (287)..(287): Selenocysteine
  MOD_RES (312)..(312): Selenocysteine
  MOD_RES (322)..(322): Selenocysteine
  MOD_RES (328)..(328): Selenocysteine
  MOD_RES (338)..(338): Selenocysteine
  MOD_RES (340)..(340): Selenocysteine
  MOD_RES (361)..(361): Selenocysteine
  MOD_RES (388)..(388): Selenocysteine
  MOD_RES (407)..(407): Selenocysteine
  MOD_RES (524)..(524): Selenocysteine
  MOD_RES (533)..(533): Selenocysteine
  MOD_RES (535)..(535): Selenocysteine
  MOD_RES (553)..(553): Selenocysteine
  MOD_RES (557)..(557): Selenocysteine
  MOD_RES (624)..(624): Selenocysteine
  MOD_RES (695)..(695): Selenocysteine
  MOD_RES (728)..(728): Selenocysteine
  MOD_RES (737)..(737): Selenocysteine
  MOD_RES (757)..(757): Selenocysteine
  MOD_RES (833)..(833): Selenocysteine
  MOD_RES (848)..(848): Selenocysteine
  MOD_RES (852)..(852): Selenocysteine
  MOD_RES (874)..(874): Selenocysteine
  MOD_RES (900)..(900): Selenocysteine
  MOD_RES (949)..(949): Selenocysteine
  MOD_RES (972)..(972): Selenocysteine
  MOD_RES (980)..(980): Selenocysteine
  MOD_RES (998)..(998): Selenocysteine
  MOD_RES (1026)..(1026): Selenocysteine
  MOD_RES (1038)..(1038): Selenocysteine
  MOD_RES (1056)..(1056): Selenocysteine
  MOD_RES (1088)..(1088): Selenocysteine
  MOD_RES (1101)..(1101): Selenocysteine
  MOD_RES (1147)..(1147): Selenocysteine
  MOD_RES (1150)..(1150): Selenocysteine
  MOD_RES (1161)..(1161): Selenocysteine
  MOD_RES (1201)..(1201): Selenocysteine
MGXDSPSPRPLRPGVXLPPGALXMNXKDXXEVAENSHHLKIFLPKKLLECLPRCPLLPPERLRWNXNEEIASYLIXFEKHDEWLSCAPKXRPQNGSIILYNRKKVKYRKDGYLWKKRKDGKXXREDHMKLKVQGMENPDIVLVHYLNVPALEDCGKGCSPIFCSISSDRREWLKWSREELLGQLKPMFHGIKWSCGNGXEEFSVEHLVQQILDXHPXKPAPRXHACLCSGGLGSGSLXHKCSSXKHRIISPKVEPRALXLXSIPHAHPPEPPPLIAPLPPELPKAHXSPSSSSSSSSSGFAEPLEIRPSPPXSRGGSSRGGXAILLLXGLEQRAGGLXPXRHLAPQADPRPSMSLAVVVGXEPSAPPAPPSPAFDPDRFLNSPQRGQXYGGGQGVSPDFPEAEAAHXPCSALEPAAALEPQAAARGPPPQSVAGGRRGNCFFIQDDDSGEELKGHGAAPPIPSPPPSPPPSPAPLEPSSRVGRGEALFGGPVGASELEPFSLSSFPDLMGELISDEAPSIPAPXPQLSPALSXIXDFSPEWSYPEGGVKVLIXGPWXEAAEHYSCVFDHIAVPASLVQPGVLRCYCPAHEVGLVSLQVAGREGPLSASVLFEYRARRFLSLPSXQLDWLSLDDNQFRMSILERLEQMEKRMAEIAAAGQVPCQGPDAPPVQDEGQGPGFEARVVVLVESMIPRSXWKGPERLAHGSPFRGMSLLHLAAAQGYARLIEXLSQWRSVEXGSLDLEQEVDPLNVDHFSCXPLMWACALGHLEAAVLLFRWNRQALSIPDSLGRLPLSVAHSRGHVRLARCLEELQRQEPSVEPPFALSPPSSSPDXGLSSVSSPSELSDGXFSVXSAYSSAPDGSPPPAPLPASEMXMEDMAPGQLSSGVPEAPLLLMDYEAXNSKGPLSSLPALPPASDDGAAPEDADSPQAVDVIPVDMISLAKQIIEAXPERIKREDFVGLPEAGASMRERXGAVGLSEXMSWLASYLENVDHFPSSXPPSELPFERGRLAVPSAPSWAEFLSASXSGKMESDFALLXLSDHEQRELYEAARVIQXAFRKYKGRRLKEQQEVAAAVIQRCYRKYKQLXWIALKFALYKKMXQAAILIQSKFRSYYEQKRFQQSRRAAVLIQQHYRSYRRRPGPPHRXSAXLPARNKGSFLXKKQDQAARKIMRFLRRCRHRMRELKQNQELEGLPQPGLAX

SEQ ID NO: 4881 - protein, 1202 aa, Homo sapiens
  MOD_RES (3)..(3): Selenocysteine
  MOD_RES (6)..(7): Selenocysteine
  MOD_RES (43)..(43): Selenocysteine
  MOD_RES (53)..(53): Selenocysteine
  MOD_RES (67)..(67): Selenocysteine
  MOD_RES (99)..(100): Selenocysteine
  MOD_RES (127)..(127): Selenocysteine
  MOD_RES (200)..(200): Selenocysteine
  MOD_RES (215)..(215): Selenocysteine
  MOD_RES (218)..(218): Selenocysteine
  MOD_RES (224)..(224): Selenocysteine
  MOD_RES (239)..(239): Selenocysteine
  MOD_RES (245)..(245): Selenocysteine
  MOD_RES (260)..(260): Selenocysteine
  MOD_RES (262)..(262): Selenocysteine
  MOD_RES (288)..(288): Selenocysteine
  MOD_RES (313)..(313): Selenocysteine
  MOD_RES (323)..(323): Selenocysteine
  MOD_RES (329)..(329): Selenocysteine
  MOD_RES (339)..(339): Selenocysteine
  MOD_RES (341)..(341): Selenocysteine
  MOD_RES (362)..(362): Selenocysteine
  MOD_RES (389)..(389): Selenocysteine
  MOD_RES (408)..(408): Selenocysteine
  MOD_RES (525)..(525): Selenocysteine
  MOD_RES (534)..(534): Selenocysteine
  MOD_RES (536)..(536): Selenocysteine
  MOD_RES (554)..(554): Selenocysteine
  MOD_RES (558)..(558): Selenocysteine
  MOD_RES (625)..(625): Selenocysteine
  MOD_RES (696)..(696): Selenocysteine
  MOD_RES (729)..(729): Selenocysteine
  MOD_RES (738)..(738): Selenocysteine
  MOD_RES (758)..(758): Selenocysteine
  MOD_RES (834)..(834): Selenocysteine
  MOD_RES (849)..(849): Selenocysteine
  MOD_RES (853)..(853): Selenocysteine
  MOD_RES (875)..(875): Selenocysteine
  MOD_RES (901)..(901): Selenocysteine
  MOD_RES (950)..(950): Selenocysteine
  MOD_RES (973)..(973): Selenocysteine
  MOD_RES (981)..(981): Selenocysteine
  MOD_RES (999)..(999): Selenocysteine
  MOD_RES (1027)..(1027): Selenocysteine
  MOD_RES (1039)..(1039): Selenocysteine
  MOD_RES (1057)..(1057): Selenocysteine
  MOD_RES (1089)..(1089): Selenocysteine
  MOD_RES (1102)..(1102): Selenocysteine
  MOD_RES (1148)..(1148): Selenocysteine
  MOD_RES (1151)..(1151): Selenocysteine
  MOD_RES (1162)..(1162): Selenocysteine
  MOD_RES (1202)..(1202): Selenocysteine
MNXKDXXEVAENSHHLKIFLPKKLLECLPRCPLLPPERLRWNXNEEIASYLIXFEKHDEWLSCAPKXRPQNGSIILYNRKKVKYRKDGYLWKKRKDGKXXREDHMKLKVQGMECLYGCYVHSSIVPXFHRRCYWLLQNPDIVLVHYLNVPALEDCGKGCSPIFCSISSDRREWLKWSREELLGQLKPMFHGIKWSCGNGXEEFSVEHLVQQILDXHPXKPAPRXHACLCSGGLGSGSLXHKCSSXKHRIISPKVEPRALXLXSIPHAHPPEPPPLIAPLPPELPKAHXSPSSSSSSSSSGFAEPLEIRPSPPXSRGGSSRGGXAILLLXGLEQRAGGLXPXRHLAPQADPRPSMSLAVVVGXEPSAPPAPPSPAFDPDRFLNSPQRGQXYGGGQGVSPDFPEAEAAHXPCSALEPAAALEPQAAARGPPPQSVAGGRRGNCFFIQDDDSGEELKGHGAAPPIPSPPPSPPPSPAPLEPSSRVGRGEALFGGPVGASELEPFSLSSFPDLMGELISDEAPSIPAPXPQLSPALSXIXDFSPEWSYPEGGVKVLIXGPWXEAAEHYSCVFDHIAVPASLVQPGVLRCYCPAHEVGLVSLQVAGREGPLSASVLFEYRARRFLSLPSXQLDWLSLDDNQFRMSILERLEQMEKRMAEIAAAGQVPCQGPDAPPVQDEGQGPGFEARVVVLVESMIPRSXWKGPERLAHGSPFRGMSLLHLAAAQGYARLIEXLSQWRSVEXGSLDLEQEVDPLNVDHFSCXPLMWACALGHLEAAVLLFRWNRQALSIPDSLGRLPLSVAHSRGHVRLARCLEELQRQEPSVEPPFALSPPSSSPDXGLSSVSSPSELSDGXFSVXSAYSSAPDGSPPPAPLPASEMXMEDMAPGQLSSGVPEAPLLLMDYEAXNSKGPLSSLPALPPASDDGAAPEDADSPQAVDVIPVDMISLAKQIIEAXPERIKREDFVGLPEAGASMRERXGAVGLSEXMSWLASYLENVDHFPSSXPPSELPFERGRLAVPSAPSWAEFLSASXSGKMESDFALLXLSDHEQRELYEAARVIQXAFRKYKGRRLKEQQEVAAAVIQRCYRKYKQLXWIALKFALYKKMXQAAILIQSKFRSYYEQKRFQQSRRAAVLIQQHYRSYRRRPGPPHRXSAXLPARNKGSFLXKKQDQAARKIMRFLRRCRHRMRELKQNQELEGLPQPGLAX

SEQ ID NO: 4882 - protein, 161 aa, Homo sapiens
  MOD_RES (3)..(3): Selenocysteine
  MOD_RES (6)..(7): Selenocysteine
  MOD_RES (43)..(43): Selenocysteine
  MOD_RES (53)..(53): Selenocysteine
  MOD_RES (67)..(67): Selenocysteine
  MOD_RES (99)..(100): Selenocysteine
  MOD_RES (124)..(124): Selenocysteine
  MOD_RES (129)..(129): Selenocysteine
MNXKDXXEVAENSHHLKIFLPKKLLECLPRCPLLPPERLRWNXNEEIASYLIXFEKHDEWLSCAPKXRPQNGSIILYNRKKVKYRKDGYLWKKRKDGKXXREDHMKLKVQGMEGLNRGRVGEQXSPPPXPACLLAVSLWLLRSLFHRPHIPSALLLAAPEP

SEQ ID NO: 4883 - protein, 1207 aa, Homo sapiens
  MOD_RES (3)..(3): Selenocysteine
  MOD_RES (6)..(7): Selenocysteine
  MOD_RES (43)..(43): Selenocysteine
  MOD_RES (53)..(53): Selenocysteine
  MOD_RES (67)..(67): Selenocysteine
  MOD_RES (99)..(100): Selenocysteine
  MOD_RES (132)..(132): Selenocysteine
  MOD_RES (205)..(205): Selenocysteine
  MOD_RES (220)..(220): Selenocysteine
  MOD_RES (223)..(223): Selenocysteine
  MOD_RES (229)..(229): Selenocysteine
  MOD_RES (244)..(244): Selenocysteine
  MOD_RES (250)..(250): Selenocysteine
  MOD_RES (265)..(265): Selenocysteine
  MOD_RES (267)..(267): Selenocysteine
  MOD_RES (293)..(293): Selenocysteine
  MOD_RES (318)..(318): Selenocysteine
  MOD_RES (328)..(328): Selenocysteine
  MOD_RES (334)..(334): Selenocysteine
  MOD_RES (344)..(344): Selenocysteine
  MOD_RES (346)..(346): Selenocysteine
  MOD_RES (367)..(367): Selenocysteine
  MOD_RES (394)..(394): Selenocysteine
  MOD_RES (413)..(413): Selenocysteine
  MOD_RES (530)..(530): Selenocysteine
  MOD_RES (539)..(539): Selenocysteine
  MOD_RES (541)..(541): Selenocysteine
  MOD_RES (559)..(559): Selenocysteine
  MOD_RES (563)..(563): Selenocysteine
  MOD_RES (630)..(630): Selenocysteine
  MOD_RES (701)..(701): Selenocysteine
  MOD_RES (734)..(734): Selenocysteine
  MOD_RES (743)..(743): Selenocysteine
  MOD_RES (763)..(763): Selenocysteine
  MOD_RES (839)..(839): Selenocysteine
  MOD_RES (854)..(854): Selenocysteine
  MOD_RES (858)..(858): Selenocysteine
  MOD_RES (880)..(880): Selenocysteine
  MOD_RES (906)..(906): Selenocysteine
  MOD_RES (955)..(955): Selenocysteine
  MOD_RES (978)..(978): Selenocysteine
  MOD_RES (986)..(986): Selenocysteine
  MOD_RES (1004)..(1004): Selenocysteine
  MOD_RES (1032)..(1032): Selenocysteine
  MOD_RES (1044)..(1044): Selenocysteine
  MOD_RES (1062)..(1062): Selenocysteine
  MOD_RES (1094)..(1094): Selenocysteine
  MOD_RES (1107)..(1107): Selenocysteine
  MOD_RES (1153)..(1153): Selenocysteine
  MOD_RES (1156)..(1156): Selenocysteine
  MOD_RES (1167)..(1167): Selenocysteine
  MOD_RES (1207)..(1207): Selenocysteine
MNXKDXXEVAENSHHLKIFLPKKLLECLPRCPLLPPERLRWNXNEEIASYLIXFEKHDEWLSCAPKXRPQNGSIILYNRKKVKYRKDGYLWKKRKDGKXXREDHMKLKVQGMEPVSWQCLYGCYVHSSIVPXFHRRCYWLLQNPDIVLVHYLNVPALEDCGKGCSPIFCSISSDRREWLKWSREELLGQLKPMFHGIKWSCGNGXEEFSVEHLVQQILDXHPXKPAPRXHACLCSGGLGSGSLXHKCSSXKHRIISPKVEPRALXLXSIPHAHPPEPPPLIAPLPPELPKAHXSPSSSSSSSSSGFAEPLEIRPSPPXSRGGSSRGGXAILLLXGLEQRAGGLXPXRHLAPQADPRPSMSLAVVVGXEPSAPPAPPSPAFDPDRFLNSPQRGQXYGGGQGVSPDFPEAEAAHXPCSALEPAAALEPQAAARGPPPQSVAGGRRGNCFFIQDDDSGEELKGHGAAPPIPSPPPSPPPSPAPLEPSSRVGRGEALFGGPVGASELEPFSLSSFPDLMGELISDEAPSIPAPXPQLSPALSXIXDFSPEWSYPEGGVKVLIXGPWXEAAEHYSCVFDHIAVPASLVQPGVLRCYCPAHEVGLVSLQVAGREGPLSASVLFEYRARRFLSLPSXQLDWLSLDDNQFRMSILERLEQMEKRMAEIAAAGQVPCQGPDAPPVQDEGQGPGFEARVVVLVESMIPRSXWKGPERLAHGSPFRGMSLLHLAAAQGYARLIEXLSQWRSVEXGSLDLEQEVDPLNVDHFSCXPLMWACALGHLEAAVLLFRWNRQALSIPDSLGRLPLSVAHSRGHVRLARCLEELQRQEPSVEPPFALSPPSSSPDXGLSSVSSPSELSDGXFSVXSAYSSAPDGSPPPAPLPASEMXMEDMAPGQLSSGVPEAPLLLMDYEAXNSKGPLSSLPALPPASDDGAAPEDADSPQAVDVIPVDMISLAKQIIEAXPERIKREDFVGLPEAGASMRERXGAVGLSEXMSWLASYLENVDHFPSSXPPSELPFERGRLAVPSAPSWAEFLSASXSGKMESDFALLXLSDHEQRELYEAARVIQXAFRKYKGRRLKEQQEVAAAVIQRCYRKYKQLXWIALKFALYKKMXQAAILIQSKFRSYYEQKRFQQSRRAAVLIQQHYRSYRRRPGPPHRXSAXLPARNKGSFLXKKQDQAARKIMRFLRRCRHRMRELKQNQELEGLPQPGLAX

SEQ ID NO: 4884 - protein, 15 aa, Homo sapiens
MPVQLSEHPEWNESM

SEQ ID NO: 4885 - protein, 38 aa, Homo sapiens
  MOD_RES (32)..(32): Selenocysteine
MPVQLSEHPEWNESMHSLRISVGGLPVLASMXKAADPR

SEQ ID NO: 4886 - protein, 118 aa, Homo sapiens
  MOD_RES (32)..(32): Selenocysteine
  MOD_RES (46)..(46): Selenocysteine
MPVQLSEHPEWNESMHSLRISVGGLPVLASMXKAADPRFRPRWKDXGWDSVSNRSYRRPGHRVKGPRGKHLVQLPEKGLPDPVRQWGQGGRGMGQRPWGPGVPPGGEGERHGAIRPDC

SEQ ID NO: 4887 - protein, 61 aa, Homo sapiens
  MOD_RES (32)..(32): Selenocysteine
  MOD_RES (48)..(48): Selenocysteine
MPVQLSEHPEWNESMHSLRISVGGLPVLASMXKAADPRFRPRWKVILXFFVGAAILWLLCS

SEQ ID NO: 4888 - protein, 65 aa, Homo sapiens
  MOD_RES (32)..(32): Selenocysteine
  MOD_RES (48)..(48): Selenocysteine
MPVQLSEHPEWNESMHSLRISVGGLPVLASMXKAADPRFRPRWKVILXFFVGAAILWLLCSHRPA

SEQ ID NO: 4889 - protein, 76 aa, Homo sapiens
  MOD_RES (32)..(32): Selenocysteine
  MOD_RES (48)..(48): Selenocysteine
  MOD_RES (71)..(71): Selenocysteine
MPVQLSEHPEWNESMHSLRISVGGLPVLASMXKAADPRFRPRWKVILXFFVGAAILWLLCSHRPAPGRPPXHNAHN

SEQ ID NO: 4890 - protein, 401 aa, Homo sapiens
  MOD_RES (32)..(32): Selenocysteine
  MOD_RES (48)..(48): Selenocysteine
  MOD_RES (71)..(71): Selenocysteine
  MOD_RES (90)..(90): Selenocysteine
  MOD_RES (99)..(99): Selenocysteine
  MOD_RES (115)..(115): Selenocysteine
  MOD_RES (124)..(124): Selenocysteine
  MOD_RES (135)..(135): Selenocysteine
  MOD_RES (184)..(184): Selenocysteine
  MOD_RES (207)..(207): Selenocysteine
  MOD_RES (234)..(237): Selenocysteine
  MOD_RES (291)..(291): Selenocysteine
  MOD_RES (341)..(341): Selenocysteine
  MOD_RES (353)..(353): Selenocysteine
  MOD_RES (378)..(378): Selenocysteine
  MOD_RES (388)..(388): Selenocysteine
MPVQLSEHPEWNESMHSLRISVGGLPVLASMXKAADPRFRPRWKVILXFFVGAAILWLLCSHRPAPGRPPXHNAHNWRLGQAPANWYNDXYPLSPPQRXPAGIRYRIAVIADLDXESRAQEENXWFSYLKKGYLXLSDSGDKVAVEWDKDHGVLESHLAEKGRGMELSDLIVFNGKLYSVDDRXGVVYQIEGSKAVPWVILSDGDGXVEKGFKAEWLAVKDERLYVGGLGKEWXXXXGDVVNENPEWVKVVGYKGSVDHENWVSNYNALRAAAGIQPPGYLIHESACWSDXLQRWFFLPRRASQERYSEKDDERKGANLLLSASPDFGDIAVSHVGAVVPXHGFSSFKFIPNXDDQIIVALKSEEDSGRVASYIMAFXLDGRFLLPEXKIGSVKYEGIEFI

SEQ ID NO: 4891 - protein, 264 aa, Homo sapiens
  MOD_RES (32)..(32): Selenocysteine
  MOD_RES (48)..(48): Selenocysteine
  MOD_RES (71)..(71): Selenocysteine
  MOD_RES (90)..(90): Selenocysteine
  MOD_RES (99)..(99): Selenocysteine
  MOD_RES (115)..(115): Selenocysteine
  MOD_RES (124)..(124): Selenocysteine
  MOD_RES (135)..(135): Selenocysteine
  MOD_RES (184)..(184): Selenocysteine
  MOD_RES (207)..(207): Selenocysteine
  MOD_RES (214)..(214): Selenocysteine
  MOD_RES (233)..(233): Selenocysteine
  MOD_RES (242)..(242): Selenocysteine
MPVQLSEHPEWNESMHSLRISVGGLPVLASMXKAADPRFRPRWKVILXFFVGAAILWLLCSHRPAPGRPPXHNAHNWRLGQAPANWYNDXYPLSPPQRXPAGIRYRIAVIADLDXESRAQEENXWFSYLKKGYLXLSDSGDKVAVEWDKDHGVLESHLAEKGRGMELSDLIVFNGKLYSVDDRXGVVYQIEGSKAVPWVILSDGDGXVEKGNWXLSSAGDCKEAVAAGEASLXCRRSWPMDXKIKKMLPFSRNCQKSSCLSRLL

SEQ ID NO: 4892 - protein, 58 aa, Homo sapiens
  MOD_RES (24)..(24): Selenocysteine
MADMQNLVERLERAVGRLEAVSHXSDMHRGYADSPSKAGAAPYVQAFDSLLAGPVAEY

SEQ ID NO: 4893 - protein, 174 aa, Homo sapiens
  MOD_RES (24)..(24): Selenocysteine
  MOD_RES (78)..(78): Selenocysteine
  MOD_RES (89)..(89): Selenocysteine
  MOD_RES (117)..(117): Selenocysteine
  MOD_RES (165)..(165): Selenocysteine
MADMQNLVERLERAVGRLEAVSHXSDMHRGYADSPSKAGAAPYVQAFDSLLAGPVAEYLKISKEIGGDVQKHAEMVHXGLKLERALLVXASQCQQPAENKLSDLLAPISEQIKEVIXFREKNRGSKLFNHLSAVSESIQALGWVAMAPKPGPYVKEMNDAAMFYXNRVLKEYKD

SEQ ID NO: 4894 - protein, 176 aa, Homo sapiens
  MOD_RES (24)..(24): Selenocysteine
  MOD_RES (78)..(78): Selenocysteine
  MOD_RES (89)..(89): Selenocysteine
  MOD_RES (117)..(117): Selenocysteine
  MOD_RES (165)..(165): Selenocysteine
MADMQNLVERLERAVGRLEAVSHXSDMHRGYADSPSKAGAAPYVQAFDSLLAGPVAEYLKISKEIGGDVQKHAEMVHXGLKLERALLVXASQCQQPAENKLSDLLAPISEQIKEVIXFREKNRGSKLFNHLSAVSESIQALGWVAMAPKPGPYVKEMNDAAMFYXNRVLKEYKDVD

SEQ ID NO: 4895 - protein, 180 aa, Homo sapiens
  MOD_RES (24)..(24): Selenocysteine
  MOD_RES (78)..(78): Selenocysteine
  MOD_RES (89)..(89): Selenocysteine
  MOD_RES (117)..(117): Selenocysteine
  MOD_RES (165)..(165): Selenocysteine
MADMQNLVERLERAVGRLEAVSHXSDMHRGYADSPSKAGAAPYVQAFDSLLAGPVAEYLKISKEIGGDVQKHAEMVHXGLKLERALLVXASQCQQPAENKLSDLLAPISEQIKEVIXFREKNRGSKLFNHLSAVSESIQALGWVAMAPKPGPYVKEMNDAAMFYXNRVLKEYKDVDKKHV

SEQ ID NO: 4896 - protein, 202 aa, Homo sapiens
  MOD_RES (24)..(24): Selenocysteine
  MOD_RES (78)..(78): Selenocysteine
  MOD_RES (89)..(89): Selenocysteine
  MOD_RES (117)..(117): Selenocysteine
  MOD_RES (165)..(165): Selenocysteine
  MOD_RES (191)..(191): Selenocysteine
  MOD_RES (202)..(202): Selenocysteine
MADMQNLVERLERAVGRLEAVSHXSDMHRGYADSPSKAGAAPYVQAFDSLLAGPVAEYLKISKEIGGDVQKHAEMVHXGLKLERALLVXASQCQQPAENKLSDLLAPISEQIKEVIXFREKNRGSKLFNHLSAVSESIQALGWVAMAPKPGPYVKEMNDAAMFYXNRVLKEYKDVDKKHVDWVKAYLSIWXELQAYIKEFHX

SEQ ID NO: 4897 - protein, 203 aa, Homo sapiens
  MOD_RES (24)..(24): Selenocysteine
  MOD_RES (78)..(78): Selenocysteine
  MOD_RES (89)..(89): Selenocysteine
  MOD_RES (117)..(117): Selenocysteine
  MOD_RES (165)..(165): Selenocysteine
  MOD_RES (191)..(191): Selenocysteine
  MOD_RES (202)..(203): Selenocysteine
MADMQNLVERLERAVGRLEAVSHXSDMHRGYADSPSKAGAAPYVQAFDSLLAGPVAEYLKISKEIGGDVQKHAEMVHXGLKLERALLVXASQCQQPAENKLSDLLAPISEQIKEVIXFREKNRGSKLFNHLSAVSESIQALGWVAMAPKPGPYVKEMNDAAMFYXNRVLKEYKDVDKKHVDWVKAYLSIWXELQAYIKEFHXX

SEQ ID NO: 4898 - protein, 208 aa, Homo sapiens
  MOD_RES (24)..(24): Selenocysteine
  MOD_RES (78)..(78): Selenocysteine
  MOD_RES (89)..(89): Selenocysteine
  MOD_RES (117)..(117): Selenocysteine
  MOD_RES (165)..(165): Selenocysteine
  MOD_RES (191)..(191): Selenocysteine
  MOD_RES (202)..(203): Selenocysteine
MADMQNLVERLERAVGRLEAVSHXSDMHRGYADSPSKAGAAPYVQAFDSLLAGPVAEYLKISKEIGGDVQKHAEMVHXGLKLERALLVXASQCQQPAENKLSDLLAPISEQIKEVIXFREKNRGSKLFNHLSAVSESIQALGWVAMAPKPGPYVKEMNDAAMFYXNRVLKEYKDVDKKHVDWVKAYLSIWXELQAYIKEFHXXGLAWS

SEQ ID NO: 4899 - protein, 215 aa, Homo sapiens
  MOD_RES (24)..(24): Selenocysteine
  MOD_RES (78)..(78): Selenocysteine
  MOD_RES (89)..(89): Selenocysteine
  MOD_RES (117)..(117): Selenocysteine
  MOD_RES (165)..(165): Selenocysteine
  MOD_RES (191)..(191): Selenocysteine
  MOD_RES (202)..(203): Selenocysteine
  MOD_RES (210)..(210): Selenocysteine
MADMQNLVERLERAVGRLEAVSHXSDMHRGYADSPSKAGAAPYVQAFDSLLAGPVAEYLKISKEIGGDVQKHAEMVHXGLKLERALLVXASQCQQPAENKLSDLLAPISEQIKEVIXFREKNRGSKLFNHLSAVSESIQALGWVAMAPKPGPYVKEMNDAAMFYXNRVLKEYKDVDKKHVDWVKAYLSIWXELQAYIKEFHXXGLAWSKXGPVAK

SEQ ID NO: 4900 - protein, 475 aa, Homo sapiens
  MOD_RES (24)..(24): Selenocysteine
  MOD_RES (78)..(78): Selenocysteine
  MOD_RES (89)..(89): Selenocysteine
  MOD_RES (117)..(117): Selenocysteine
  MOD_RES (165)..(165): Selenocysteine
  MOD_RES (191)..(191): Selenocysteine
  MOD_RES (202)..(203): Selenocysteine
  MOD_RES (210)..(210): Selenocysteine
  MOD_RES (244)..(244): Selenocysteine
  MOD_RES (268)..(268): Selenocysteine
  MOD_RES (280)..(280): Selenocysteine
  MOD_RES (307)..(307): Selenocysteine
  MOD_RES (315)..(315): Selenocysteine
  MOD_RES (345)..(345): Selenocysteine
  MOD_RES (359)..(360): Selenocysteine
  MOD_RES (371)..(371): Selenocysteine
  MOD_RES (407)..(407): Selenocysteine
  MOD_RES (413)..(413): Selenocysteine
  MOD_RES (443)..(443): Selenocysteine
  MOD_RES (459)..(459): Selenocysteine
  MOD_RES (468)..(469): Selenocysteine
  MOD_RES (471)..(471): Selenocysteine
MADMQNLVERLERAVGRLEAVSHXSDMHRGYADSPSKAGAAPYVQAFDSLLAGPVAEYLKISKEIGGDVQKHAEMVHXGLKLERALLVXASQCQQPAENKLSDLLAPISEQIKEVIXFREKNRGSKLFNHLSAVSESIQALGWVAMAPKPGPYVKEMNDAAMFYXNRVLKEYKDVDKKHVDWVKAYLSIWXELQAYIKEFHXXGLAWSKXGPVAKELSGLPSGPSAGSCPPPPPPCPPPPPVSXISCSYESASRSSLFAQINQGESIXHALKHVSDDMKXHKNPALKAQSGPVRSGPKPFSAPKPQXSPSPKRAXKKEPAVLELEGKKWRVENQENVSNLVIEDXELKQVAYIYKCVNXXLQIKGKINSIXVDNCKKLGLVFDDVVGIVEIINSKDVKVQVMGKVPXISINKXDGCHAYLSKNSLDCEIVSAKSSEMNVLIPXEGGDFNEFPVPEQFKXLWNGQKLVXXVXEIAG

SEQ ID NO: 4901 - protein, 145 aa, Homo sapiens
  MOD_RES (24)..(24): Selenocysteine
  MOD_RES (53)..(54): Selenocysteine
  MOD_RES (61)..(61): Selenocysteine
  MOD_RES (95)..(95): Selenocysteine
  MOD_RES (119)..(119): Selenocysteine
  MOD_RES (131)..(131): Selenocysteine
MADMQNLVERLERAVGRLEAVSHXSDMHRGYADSPSKAGAAPYVQAYIKEFHXXGLAWSKXGPVAKELSGLPSGPSAGSCPPPPPPCPPPPPVSXISCSYESASRSSLFAQINQGESIXHALKHVSDDMKXHKNPALKAQSGPVR

SEQ ID NO: 4902 - protein, 263 aa, Homo sapiens
  MOD_RES (24)..(24): Selenocysteine
  MOD_RES (77)..(77): Selenocysteine
  MOD_RES (88)..(88): Selenocysteine
  MOD_RES (116)..(116): Selenocysteine
  MOD_RES (164)..(164): Selenocysteine
  MOD_RES (190)..(190): Selenocysteine
  MOD_RES (201)..(202): Selenocysteine
  MOD_RES (209)..(209): Selenocysteine
  MOD_RES (243)..(243): Selenocysteine
MADMQNLVERLERAVGRLEAVSHXSDMHRGYADSPSKGAAPYVQAFDSLLAGPVAEYLKISKEIGGDVQKHAEMVHXGLKLERALLVXASQCQQPAENKLSDLLAPISEQIKEVIXFREKNRGSKLFNHLSAVSESIQALGWVAMAPKPGPYVKEMNDAAMFYXNRVLKEYKDVDKKHVDWVKAYLSIWXELQAYIKEFHXXGLAWSKXGPVAKELSGLPSGPSAGSCPPPPPPCPPPPPVSXISCSYESASRSSLFAQINQG

SEQ ID NO: 4903 - protein, 474 aa, Homo sapiens
  MOD_RES (24)..(24): Selenocysteine
  MOD_RES (77)..(77): Selenocysteine
  MOD_RES (88)..(88): Selenocysteine
  MOD_RES (116)..(116): Selenocysteine
  MOD_RES (164)..(164): Selenocysteine
  MOD_RES (190)..(190): Selenocysteine
  MOD_RES (201)..(202): Selenocysteine
  MOD_RES (209)..(209): Selenocysteine
  MOD_RES (243)..(243): Selenocysteine
  MOD_RES (267)..(267): Selenocysteine
  MOD_RES (279)..(279): Selenocysteine
  MOD_RES (306)..(306): Selenocysteine
  MOD_RES (314)..(314): Selenocysteine
  MOD_RES (344)..(344): Selenocysteine
  MOD_RES (358)..(359): Selenocysteine
  MOD_RES (370)..(370): Selenocysteine
  MOD_RES (406)..(406): Selenocysteine
  MOD_RES (412)..(412): Selenocysteine
  MOD_RES (442)..(442): Selenocysteine
  MOD_RES (458)..(458): Selenocysteine
  MOD_RES (467)..(468): Selenocysteine
  MOD_RES (470)..(470): Selenocysteine
MADMQNLVERLERAVGRLEAVSHXSDMHRGYADSPSKGAAPYVQAFDSLLAGPVAEYLKISKEIGGDVQKHAEMVHXGLKLERALLVXASQCQQPAENKLSDLLAPISEQIKEVIXFREKNRGSKLFNHLSAVSESIQALGWVAMAPKPGPYVKEMNDAAMFYXNRVLKEYKDVDKKHVDWVKAYLSIWXELQAYIKEFHXXGLAWSKXGPVAKELSGLPSGPSAGSCPPPPPPCPPPPPVSXISCSYESASRSSLFAQINQGESIXHALKHVSDDMKXHKNPALKAQSGPVRSGPKPFSAPKPQXSPSPKRAXKKEPAVLELEGKKWRVENQENVSNLVIEDXELKQVAYIYKCVNXXLQIKGKINSIXVDNCKKLGLVFDDVVGIVEIINSKDVKVQVMGKVPXISINKXDGCHAYLSKNSLDCEIVSAKSSEMNVLIPXEGGDFNEFPVPEQFKXLWNGQKLVXXVXEIAG

SEQ ID NO: 4904 - protein, 104 aa, Homo sapiens
  MOD_RES (73)..(73): Selenocysteine
MANMQGLVERLERAVSRLESLSAESHRPPGNCGEVNGVIAGVAPSVEAFDKLMDSMVAEFLKNSRILAGDVEXHAEMVHSAFQAQRAFLLMASQYQQPHEANKF

SEQ ID NO: 4905 - protein, 365 aa, Homo sapiens
  MOD_RES (73)..(73): Selenocysteine
  MOD_RES (106)..(106): Selenocysteine
  MOD_RES (162)..(162): Selenocysteine
  MOD_RES (169)..(169): Selenocysteine
  MOD_RES (174)..(174): Selenocysteine
  MOD_RES (187)..(187): Selenocysteine
  MOD_RES (191)..(191): Selenocysteine
  MOD_RES (195)..(195): Selenocysteine
  MOD_RES (199)..(199): Selenocysteine
  MOD_RES (236)..(236): Selenocysteine
  MOD_RES (251)..(251): Selenocysteine
  MOD_RES (298)..(298): Selenocysteine
  MOD_RES (304)..(304): Selenocysteine
  MOD_RES (349)..(349): Selenocysteine
  MOD_RES (358)..(358): Selenocysteine
MANMQGLVERLERAVSRLESLSAESHRPPGNCGEVNGVIAGVAPSVEAFDKLMDSMVAEFLKNSRILAGDVEXHAEMVHSAFQAQRAFLLMASQYQQPHEGPVASXVSAFSVLSSGPGLPPPPPPLPPPGPPPLFENEGKKEESSPSRSALFAQLNQGEAIXKGLRHVXDDQKXYKNPSLRAQGGQXQSPXKSHXPSPXSPKSYPSQKHAPVLELEGKKWRVEYQEDRNDLVISEXELKQVAYIFKCEKSXIQIKGKVNSIIIDNCKKLGLVFDNVVGIVEVINSQDIQIQVMGRVPXISINKXEGCHIYLSEDALDCEIVSAKSSEMNILIPQDGDYREFPIPEQFKXAWDGSKLIXEPAEIMA

SEQ ID NO: 4906 - protein, 413 aa, Homo sapiens
  MOD_RES (73)..(73): Selenocysteine
  MOD_RES (119)..(119): Selenocysteine
  MOD_RES (154)..(154): Selenocysteine
  MOD_RES (210)..(210): Selenocysteine
  MOD_RES (217)..(217): Selenocysteine
  MOD_RES (222)..(222): Selenocysteine
  MOD_RES (235)..(235): Selenocysteine
  MOD_RES (239)..(239): Selenocysteine
  MOD_RES (243)..(243): Selenocysteine
  MOD_RES (247)..(247): Selenocysteine
  MOD_RES (284)..(284): Selenocysteine
  MOD_RES (299)..(299): Selenocysteine
  MOD_RES (346)..(346): Selenocysteine
  MOD_RES (352)..(352): Selenocysteine
  MOD_RES (397)..(397): Selenocysteine
  MOD_RES (406)..(406): Selenocysteine
MANMQGLVERLERAVSRLESLSAESHRPPGNCGEVNGVIAGVAPSVEAFDKLMDSMVAEFLKNSRILAGDVEXHAEMVHSAFQAQRAFLLMASQYQQPHENDVAALLKPISEKIQEIQXFRERNRGSNMFNHLSAVSESIPALGWIAVGPVASXVSAFSVLSSGPGLPPPPPPLPPPGPPPLFENEGKKEESSPSRSALFAQLNQGEAIXKGLRHVXDDQKXYKNPSLRAQGGQXQSPXKSHXPSPXSPKSYPSQKHAPVLELEGKKWRVEYQEDRNDLVISEXELKQVAYIFKCEKSXIQIKGKVNSIIIDNCKKLGLVFDNVVGIVEVINSQDIQIQVMGRVPXISINKXEGCHIYLSEDALDCEIVSAKSSEMNILIPQDGDYREFPIPEQFKXAWDGSKLIXEPAEIMA

SEQ ID NO: 4907 - protein, 394 aa, Homo sapiens
  MOD_RES (73)..(73): Selenocysteine
  MOD_RES (119)..(119): Selenocysteine
  MOD_RES (191)..(191): Selenocysteine
  MOD_RES (198)..(198): Selenocysteine
  MOD_RES (203)..(203): Selenocysteine
  MOD_RES (216)..(216): Selenocysteine
  MOD_RES (220)..(220): Selenocysteine
  MOD_RES (224)..(224): Selenocysteine
  MOD_RES (228)..(228): Selenocysteine
  MOD_RES (265)..(265): Selenocysteine
  MOD_RES (280)..(280): Selenocysteine
  MOD_RES (327)..(327): Selenocysteine
  MOD_RES (333)..(333): Selenocysteine
  MOD_RES (378)..(378): Selenocysteine
  MOD_RES (387)..(387): Selenocysteine
MANMQGLVERLERAVSRLESLSAESHRPPGNCGEVNGVIAGVAPSVEAFDKLMDSMVAEFLKNSRILAGDVEXHAEMVHSAFQAQRAFLLMASQYQQPHENDVAALLKPISEKIQEIQXFRERNRGSNMFNHLSAVSESIPALGWIAVPPPPPPLPPPGPPPLFENEGKKEESSPSRSALFAQLNQGEAIXKGLRHVXDDQKXYKNPSLRAQGGQXQSPXKSHXPSPXSPKSYPSQKHAPVLELEGKKWRVEYQEDRNDLVISEXELKQVAYIFKCEKSXIQIKGKVNSIIIDNCKKLGLVFDNVVGIVEVINSQDIQIQVMGRVPXISINKXEGCHIYLSEDALDCEIVSAKSSEMNILIPQDGDYREFPIPEQFKXAWDGSKLIXEPAEIMA

SEQ ID NO: 4908 - protein, 477 aa, Homo sapiens
  MOD_RES (73)..(73): Selenocysteine
  MOD_RES (119)..(119): Selenocysteine
  MOD_RES (164)..(164): Selenocysteine
  MOD_RES (167)..(167): Selenocysteine
  MOD_RES (204)..(205): Selenocysteine
  MOD_RES (208)..(208): Selenocysteine
  MOD_RES (212)..(212): Selenocysteine
  MOD_RES (218)..(218): Selenocysteine
  MOD_RES (274)..(274): Selenocysteine
  MOD_RES (281)..(281): Selenocysteine
  MOD_RES (286)..(286): Selenocysteine
  MOD_RES (299)..(299): Selenocysteine
  MOD_RES (303)..(303): Selenocysteine
  MOD_RES (307)..(307): Selenocysteine
  MOD_RES (311)..(311): Selenocysteine
  MOD_RES (348)..(348): Selenocysteine
  MOD_RES (363)..(363): Selenocysteine
  MOD_RES (410)..(410): Selenocysteine
  MOD_RES (416)..(416): Selenocysteine
  MOD_RES (461)..(461): Selenocysteine
  MOD_RES (470)..(470): Selenocysteine
MANMQGLVERLERAVSRLESLSAESHRPPGNCGEVNGVIAGVAPSVEAFDKLMDSMVAEFLKNSRILAGDVEXHAEMVHSAFQAQRAFLLMASQYQQPHENDVAALLKPISEKIQEIQXFRERNRGSNMFNHLSAVSESIPALGWIAVSPKPGPYVKEMNDAAXFYXNRVLKDYKHSDLRHVDWVKSYLNIWSELQAYIKEHHXXGLXWSKXGPVASXVSAFSVLSSGPGLPPPPPPLPPPGPPPLFENEGKKEESSPSRSALFAQLNQGEAIXKGLRHVXDDQKXYKNPSLRAQGGQXQSPXKSHXPSPXSPKSYPSQKHAPVLELEGKKWRVEYQEDRNDLVISEXELKQVAYIFKCEKSXIQIKGKVNSIIIDNCKKLGLVFDNVVGIVEVINSQDIQIQVMGRVPXISINKXEGCHIYLSEDALDCEIVSAKSSEMNILIPQDGDYREFPIPEQFKXAWDGSKLIXEPAEIMA

SEQ ID NO: 4909 - protein, 394 aa, Homo sapiens
  MOD_RES (73)..(73): Selenocysteine
  MOD_RES (119)..(119): Selenocysteine
  MOD_RES (191)..(191): Selenocysteine
  MOD_RES (198)..(198): Selenocysteine
  MOD_RES (203)..(203): Selenocysteine
  MOD_RES (216)..(216): Selenocysteine
  MOD_RES (220)..(220): Selenocysteine
  MOD_RES (224)..(224): Selenocysteine
  MOD_RES (228)..(228): Selenocysteine
  MOD_RES (265)..(265): Selenocysteine
  MOD_RES (280)..(280): Selenocysteine
  MOD_RES (327)..(327): Selenocysteine
  MOD_RES (333)..(333): Selenocysteine
  MOD_RES (378)..(378): Selenocysteine
  MOD_RES (387)..(387): Selenocysteine
MANMQGLVERLERAVSRLESLSAESHRPPGNCGEVNGVIAGVAPSVEAFDKLMDSMVAEFLKNSRILAGDVEXHAEMVHSAFQAQRAFLLMASQYQQPHENDVAALLKPISEKIQEIQXFRERNRGSNMFNHLSAVSESIPALGWIAVSPKPPPLPPPGPPPLFENEGKKEESSPSRSALFAQLNQGEAIXKGLRHVXDDQKXYKNPSLRAQGGQXQSPXKSHXPSPXSPKSYPSQKHAPVLELEGKKWRVEYQEDRNDLVISEXELKQVAYIFKCEKSXIQIKGKVNSIIIDNCKKLGLVFDNVVGIVEVINSQDIQIQVMGRVPXISINKXEGCHIYLSEDALDCEIVSAKSSEMNILIPQDGDYREFPIPEQFKXAWDGSKLIXEPAEIMA

SEQ ID NO: 4910 - protein, 217 aa, Homo sapiens
  MOD_RES (73)..(73): Selenocysteine
  MOD_RES (88)..(88): Selenocysteine
  MOD_RES (103)..(103): Selenocysteine
  MOD_RES (150)..(150): Selenocysteine
  MOD_RES (156)..(156): Selenocysteine
  MOD_RES (201)..(201): Selenocysteine
  MOD_RES (210)..(210): Selenocysteine
MANMQGLVERLERAVSRLESLSAESHRPPGNCGEVNGVIAGVAPSVEAFDKLMDSMVAEFLKNSRILAGDVEXHEYQEDRNDLVISEXELKQVAYIFKCEKSXIQIKGKVNSIIIDNCKKLGLVFDNVVGIVEVINSQDIQIQVMGRVPXISINKXEGCHIYLSEDALDCEIVSAKSSEMNILIPQDGDYREFPIPEQFKXAWDGSKLIXEPAEIMA

SEQ ID NO: 4911 - protein, 451 aa, Homo sapiens
  MOD_RES (73)..(73): Selenocysteine
  MOD_RES (93)..(93): Selenocysteine
  MOD_RES (138)..(138): Selenocysteine
  MOD_RES (141)..(141): Selenocysteine
  MOD_RES (178)..(179): Selenocysteine
  MOD_RES (182)..(182): Selenocysteine
  MOD_RES (186)..(186): Selenocysteine
  MOD_RES (192)..(192): Selenocysteine
  MOD_RES (248)..(248): Selenocysteine
  MOD_RES (255)..(255): Selenocysteine
  MOD_RES (260)..(260): Selenocysteine
  MOD_RES (273)..(273): Selenocysteine
  MOD_RES (277)..(277): Selenocysteine
  MOD_RES (281)..(281): Selenocysteine
  MOD_RES (285)..(285): Selenocysteine
  MOD_RES (322)..(322): Selenocysteine
  MOD_RES (337)..(337): Selenocysteine
  MOD_RES (384)..(384): Selenocysteine
  MOD_RES (390)..(390): Selenocysteine
  MOD_RES (435)..(435): Selenocysteine
  MOD_RES (444)..(444): Selenocysteine
MANMQGLVERLERAVSRLESLSAESHRPPGNCGEVNGVIAGVAPSVEAFDKLMDSMVAEFLKNSRILAGDVEXHNDVAALLKPISEKIQEIQXFRERNRGSNMFNHLSAVSESIPALGWIAVSPKPGPYVKEMNDAAXFYXNRVLKDYKHSDLRHVDWVKSYLNIWSELQAYIKEHHXXGLXWSKXGPVASXVSAFSVLSSGPGLPPPPPPLPPPGPPPLFENEGKKEESSPSRSALFAQLNQGEAIXKGLRHVXDDQKXYKNPSLRAQGGQXQSPXKSHXPSPXSPKSYPSQKHAPVLELEGKKWRVEYQEDRNDLVISEXELKQVAYIFKCEKSXIQIKGKVNSIIIDNCKKLGLVFDNVVGIVEVINSQDIQIQVMGRVPXISINKXEGCHIYLSEDALDCEIVSAKSSEMNILIPQDGDYREFPIPEQFKXAWDGSKLIXEPAEIMA

SEQ ID NO: 4912 - protein, 194 aa, Homo sapiens
  MOD_RES (73)..(73): Selenocysteine
  MOD_RES (93)..(93): Selenocysteine
  MOD_RES (138)..(138): Selenocysteine
  MOD_RES (141)..(141): Selenocysteine
  MOD_RES (178)..(179): Selenocysteine
  MOD_RES (182)..(182): Selenocysteine
  MOD_RES (186)..(186): Selenocysteine
MANMQGLVERLERAVSRLESLSAESHRPPGNCGEVNGVIAGVAPSVEAFDKLMDSMVAEFLKNSRILAGDVEXHNDVAALLKPISEKIQEIQXFRERNRGSNMFNHLSAVSESIPALGWIAVSPKPGPYVKEMNDAAXFYXNRVLKDYKHSDLRHVDWVKSYLNIWSELQAYIKEHHXXGLXWSKXNEKRRRQR

SEQ ID NO: 4913 - protein, 185 aa, Homo sapiens
  MOD_RES (3)..(3): Selenocysteine
  MOD_RES (13)..(13): Selenocysteine
  MOD_RES (54)..(54): Selenocysteine
  MOD_RES (70)..(70): Selenocysteine
  MOD_RES (110)..(110): Selenocysteine
  MOD_RES (116)..(116): Selenocysteine
  MOD_RES (153)..(153): Selenocysteine
  MOD_RES (157)..(157): Selenocysteine
MAXVGEWSCVRCXFLNPAGQRQCSICEAPRHKPDLNHILRLSVEEQKWPCARCXFRNFLGKEACEVCGFXPEPAPGAAFLPVLNGVLPKPPAILGEPKGSCQEEAGPVRXAGLVAXEPARGQCEDKDEEEKEEQEEEEGAAEPRGGWACPRCXLHNXPVASSCSVCGGPRRLSLPRIPPEALVVP

SEQ ID NO: 4914 - protein, 1086 aa, Homo sapiens
  MOD_RES (3)..(3): Selenocysteine
  MOD_RES (13)..(13): Selenocysteine
  MOD_RES (54)..(54): Selenocysteine
  MOD_RES (70)..(70): Selenocysteine
  MOD_RES (110)..(110): Selenocysteine
  MOD_RES (116)..(116): Selenocysteine
  MOD_RES (153)..(153): Selenocysteine
  MOD_RES (157)..(157): Selenocysteine
  MOD_RES (216)..(216): Selenocysteine
  MOD_RES (238)..(238): Selenocysteine
  MOD_RES (303)..(303): Selenocysteine
  MOD_RES (307)..(307): Selenocysteine
  MOD_RES (316)..(316): Selenocysteine
  MOD_RES (328)..(328): Selenocysteine
  MOD_RES (332)..(332): Selenocysteine
  MOD_RES (342)..(343): Selenocysteine
  MOD_RES (350)..(350): Selenocysteine
  MOD_RES (355)..(355): Selenocysteine
  MOD_RES (379)..(379): Selenocysteine
  MOD_RES (422)..(422): Selenocysteine
  MOD_RES (437)..(437): Selenocysteine
  MOD_RES (465)..(465): Selenocysteine
  MOD_RES (532)..(532): Selenocysteine
  MOD_RES (538)..(538): Selenocysteine
  MOD_RES (574)..(574): Selenocysteine
  MOD_RES (592)..(592): Selenocysteine
  MOD_RES (594)..(595): Selenocysteine
  MOD_RES (650)..(650): Selenocysteine
  MOD_RES (652)..(652): Selenocysteine
  MOD_RES (666)..(666): Selenocysteine
  MOD_RES (675)..(675): Selenocysteine
  MOD_RES (730)..(730): Selenocysteine
  MOD_RES (816)..(816): Selenocysteine
  MOD_RES (819)..(819): Selenocysteine
  MOD_RES (856)..(856): Selenocysteine
  MOD_RES (908)..(908): Selenocysteine
  MOD_RES (950)..(951): Selenocysteine
  MOD_RES (960)..(960): Selenocysteine
  MOD_RES (974)..(974): Selenocysteine
  MOD_RES (979)..(979): Selenocysteine
  MOD_RES (1005)..(1005): Selenocysteine
  MOD_RES (1013)..(1013): Selenocysteine
  MOD_RES (1019)..(1019): Selenocysteine
  MOD_RES (1046)..(1046): Selenocysteine
  MOD_RES (1063)..(1063): Selenocysteine
  MOD_RES (1068)..(1068): Selenocysteine
  MOD_RES (1074)..(1074): Selenocysteine
MAXVGEWSCVRCXFLNPAGQRQCSICEAPRHKPDLNHILRLSVEEQKWPCARCXFRNFLGKEACEVCGFXPEPAPGAAFLPVLNGVLPKPPAILGEPKGSCQEEAGPVRXAGLVAXEPARGQCEDKDEEEKEEQEEEEGAAEPRGGWACPRCXLHNXPVASSCSVCGGPRRLSLPRIPPEALVVPEVVAPAGFHVVPAAPPPGLPGEGAEANPPAXSQGPAAEPEPPRVPPFSPFSSXLQNNPVPRSRREVPPQLQPPVPEAAQPSPSAGCRGAPQGSGWAGASRLAELLSGKRLSVLEEEAXEGGXSRVEAGSSXSGSDIIDLAGDXVRYXPASPSSPDFXXWSCAKCXLRNPXVAPRCSACGCSKLHGFQEHGEPPXHCPDCGADKPSPCGRSCGRVSSAQKAARVLPERPGQWACPACXLLNALRAKHCAACHXPQLLVAQRRGAAPLRRRESMHVEQRRQXDEGEAKALWENIVAFCRENNVSFVDDSFPPGPESVGFPAGDSVQQRVRQWLRPQEINCSVFRDHRAXWSVFHXLRPSDILQGLLGNCWFLSALAVLAERPDLVERVMVXRSLCAEGAYQVRLCKDGXWXXVLVDDMLPCDEAGCLLFSQAQRKQLWVALIEKALAKLHGSYFALQAGRAIEGLAXLXGAPCESLALQLSSXNPREEPVDXDLIWAKMLSSKEAGFLMGASCGGGNMKVDDSAYESLGLRPRHAYSILDVRDVQGXRLLRLRNPWGRFSWNGSWSDEWPHWPGHLRGELMPHGSSEGVFWMEYGDFVRYFDSVDICKVHSDWQEARVQGCFPSSASAPVGVXALXVLERASLEFALFQEGSRRSDAVDSHLLDLCILVFRAXFGSGGHLSLGRLLAHSKRAVKKFVSCDVMLEPGEYAVVCCAFNHWGPPLPGXPAPQASSPSAGVPRASPEPPGHVLAVYSSRLVMVEPVEAQPXXLADAIILLXESRGERHEGREGMXCYYLXHGWAGLIVVVENRHPKAYLHVQCDCXDSFNVVSXRGSLRXQDSVPPLHRQVLVILSQLEGNAGFSIXHRLAHRKAAQAFLSDWXASKGXHSPPLXPEVAGLHGPRPL

SEQ ID NO: 4915 - protein, 112 aa, Homo sapiens
  MOD_RES (23)..(23): Selenocysteine
  MOD_RES (53)..(53): Selenocysteine
  MOD_RES (82)..(82): Selenocysteine
MCQVHAQKPHSGPQVLGLRLLQXARLPGAWRAPHPLPRLWGRQAQPLRQKLRXGVLGPEGRPRPARAPGPVGLPCLYPAQRXAGQALRRLPHASAPGGPAAGGRAPEAQGEH

SEQ ID NO: 4916 - protein, 466 aa, Homo sapiens
  MOD_RES (12)..(12): Selenocysteine
  MOD_RES (63)..(63): Selenocysteine
  MOD_RES (71)..(71): Selenocysteine
  MOD_RES (81)..(81): Selenocysteine
  MOD_RES (122)..(122): Selenocysteine
  MOD_RES (138)..(138): Selenocysteine
  MOD_RES (178)..(178): Selenocysteine
  MOD_RES (184)..(184): Selenocysteine
  MOD_RES (221)..(221): Selenocysteine
  MOD_RES (225)..(225): Selenocysteine
  MOD_RES (284)..(284): Selenocysteine
  MOD_RES (306)..(306): Selenocysteine
  MOD_RES (371)..(371): Selenocysteine
  MOD_RES (375)..(375): Selenocysteine
  MOD_RES (384)..(384): Selenocysteine
  MOD_RES (396)..(396): Selenocysteine
  MOD_RES (400)..(400): Selenocysteine
  MOD_RES (410)..(411): Selenocysteine
  MOD_RES (418)..(418): Selenocysteine
  MOD_RES (423)..(423): Selenocysteine
  MOD_RES (447)..(447): Selenocysteine
MGSSASSLAAEXESDHSFPGGPPYPGPPAAAGWCRSGPGGPVWGGALVSRQHQPPRPRARSHXHSPGSMAXVGEWSCVRCXFLNPAGQRQCSICEAPRHKPDLNHILRLSVEEQKWPCARCXFRNFLGKEACEVCGFXPEPAPGAAFLPVLNGVLPKPPAILGEPKGSCQEEAGPVRXAGLVAXEPARGQCEDKDEEEKEEQEEEEGAAEPRGGWACPRCXLHNXPVASSCSVCGGPRRLSLPRIPPEALVVPEVVAPAGFHVVPAAPPPGLPGEGAEANPPAXSQGPAAEPEPPRVPPFSPFSSXLQNNPVPRSRREVPPQLQPPVPEAAQPSPSAGCRGAPQGSGWAGASRLAELLSGKRLSVLEEEAXEGGXSRVEAGSSXSGSDIIDLAGDXVRYXPASPSSPDFXXWSCAKCXLRNPXVAPRCSACGCSKLHGFQEHGEPPXHCPDCGADKPSPCGRSCGR

SEQ ID NO: 4917 - protein, 71 aa, Homo sapiens
  MOD_RES (1)..(1): Any amino acid
  MOD_RES (12)..(12): Selenocysteine
  MOD_RES (17)..(17): Selenocysteine
  MOD_RES (43)..(43): Selenocysteine
  MOD_RES (51)..(51): Selenocysteine
  MOD_RES (57)..(57): Selenocysteine
XGERHEGREGMXCYYLXHGWAGLIVVVENRHPKAYLHVQCDCXDSFNVVSXRGSLRXQDSVPPLHSPVPLP

SEQ ID NO: 4918 - protein, 93 aa, Homo sapiens
  MOD_RES (8)..(8): Selenocysteine
  MOD_RES (13)..(13): Selenocysteine
  MOD_RES (39)..(39): Selenocysteine
  MOD_RES (90)..(90): Selenocysteine
KIFKHYDXDQSGXINSYEMRNAVNDAGFHLNNQLYDIIXMRYADKHMNIDFDSFICCFVRLEGMFRAFHAFDKDGDGIIKLNVLEWLQLXMYA

SEQ ID NO: 4919 - protein, 110 aa, Homo sapiens
  MOD_RES (3)..(3): Selenocysteine
  MOD_RES (32)..(32): Selenocysteine
  MOD_RES (83)..(83): Selenocysteine
  MOD_RES (93)..(93): Selenocysteine
  MOD_RES (97)..(97): Selenocysteine
KKXKPIIFVSDRANSNKELGVDQESEEGKGKXSPDKQKQSPQPQPGSSDQESEEQQQFRNIFKQIAGDDMEICADELKKVLNXVVNKHKDLKXHGFXLESCRSMIALMDP

SEQ ID NO: 4920 - protein, 191 aa, Homo sapiens
  MOD_RES (14)..(14): Selenocysteine
  MOD_RES (24)..(24): Selenocysteine
  MOD_RES (28)..(28): Selenocysteine
  MOD_RES (41)..(41): Selenocysteine
  MOD_RES (71)..(71): Selenocysteine
  MOD_RES (76)..(76): Selenocysteine
  MOD_RES (102)..(102): Selenocysteine
  MOD_RES (154)..(154): Selenocysteine
  MOD_RES (181)..(181): Selenocysteine
  MOD_RES (183)..(183): Selenocysteine
MEICADELKKVLNXVVNKHKDLKXHGFXLESCRSMIALMDXDGSGKLNLQEFHHLWNKIKAWQKIFKHYDXDQSGXINSYEMRNAVNDAGFHLNNQLYDIIXMRYADKHMNIDFDSFICCFVRLEGMFRAFHAFDKDGDGIIKLNVLEAVCRSXCRWHSAPPCARALHHLHAVPPWARNQXSXGFYCCGVN

SEQ ID NO: 4921 - protein, 156 aa, Homo sapiens
  MOD_RES (14)..(14): Selenocysteine
  MOD_RES (24)..(24): Selenocysteine
  MOD_RES (28)..(28): Selenocysteine
  MOD_RES (41)..(41): Selenocysteine
  MOD_RES (71)..(71): Selenocysteine
  MOD_RES (76)..(76): Selenocysteine
  MOD_RES (102)..(102): Selenocysteine
  MOD_RES (153)..(153): Selenocysteine
MEICADELKKVLNXVVNKHKDLKXHGFXLESCRSMIALMDXDGSGKLNLQEFHHLWNKIKAWQKIFKHYDXDQSGXINSYEMRNAVNDAGFHLNNQLYDIIXMRYADKHMNIDFDSFICCFVRLEGMFRAFHAFDKDGDGIIKLNVLEWLQLXMYA

SEQ ID NO: 4922 - protein, 157 aa, Homo sapiens
  MOD_RES (7)..(7): Selenocysteine
  MOD_RES (18)..(18): Selenocysteine
  MOD_RES (73)..(73): Selenocysteine
  MOD_RES (83)..(83): Selenocysteine
  MOD_RES (87)..(87): Selenocysteine
  MOD_RES (100)..(100): Selenocysteine
  MOD_RES (130)..(130): Selenocysteine
  MOD_RES (135)..(135): Selenocysteine
MGGVASXLQGLPMRLGYXGAGGFPGVCLEHLEPQPGSSDQESEEQQQFRNIFKQIAGDDMEICADELKKVLNXVVNKHKDLKXHGFXLESCRSMIALMDXDGSGKLNLQEFHHLWNKIKAWQKIFKHYDXDQSGXINSYEMRNAVNDAGFHLNNQLY

SEQ ID NO: 4923 - protein, 309 aa, Homo sapiens
  MOD_RES (24)..(24): Selenocysteine
  MOD_RES (48)..(48): Selenocysteine
  MOD_RES (75)..(75): Selenocysteine
  MOD_RES (87)..(87): Selenocysteine
  MOD_RES (116)..(116): Selenocysteine
  MOD_RES (167)..(167): Selenocysteine
  MOD_RES (177)..(177): Selenocysteine
  MOD_RES (181)..(181): Selenocysteine
  MOD_RES (194)..(194): Selenocysteine
  MOD_RES (224)..(224): Selenocysteine
  MOD_RES (229)..(229): Selenocysteine
  MOD_RES (255)..(255): Selenocysteine
  MOD_RES (306)..(306): Selenocysteine
MHGNKQHLQKDFFLYNASKARSKXYINMREVSQRFRLPPSEYVIVPSXYEPHQEGEFILRVFSEKRNLSEEVENXISVDRPVKKKKXKPIIFVSDRANSNKELGVDQESEEGKGKXSPDKQKQSPQPQPGSSDQESEEQQQFRNIFKQIAGDDMEICADELKKVLNXVVNKHKDLKXHGFXLESCRSMIALMDXDGSGKLNLQEFHHLWNKIKAWQKIFKHYDXDQSGXINSYEMRNAVNDAGFHLNNQLYDIIXMRYADKHMNIDFDSFICCFVRLEGMFRAFHAFDKDGDGIIKLNVLEWLQLXMYA

SEQ ID NO: 4924 - protein, 256 aa, Homo sapiens
  MOD_RES (24)..(24): Selenocysteine
  MOD_RES (48)..(48): Selenocysteine
  MOD_RES (75)..(75): Selenocysteine
  MOD_RES (123)..(123): Selenocysteine
  MOD_RES (133)..(133): Selenocysteine
  MOD_RES (137)..(137): Selenocysteine
  MOD_RES (150)..(150): Selenocysteine
  MOD_RES (180)..(180): Selenocysteine
  MOD_RES (185)..(185): Selenocysteine
  MOD_RES (211)..(211): Selenocysteine
MHGNKQHLQKDFFLYNASKARSKXYINMREVSQRFRLPPSEYVIVPSXYEPHQEGEFILRVFSEKRNLSEEVENXISVDRPVPQPGSSDQESEEQQQFRNIFKQIAGDDMEICADELKKVLNXVVNKHKDLKXHGFXLESCRSMIALMDXDGSGKLNLQEFHHLWNKIKAWQKIFKHYDXDQSGXINSYEMRNAVNDAGFHLNNQLYDIIXMRYADKHMNIDFDSFICCFVRLEGMFRAFHAFDKDGDGIIKLNVL

SEQ ID NO: 4925 - protein, 729 aa, Homo sapiens
  MOD_RES (3)..(3): Selenocysteine
  MOD_RES (13)..(13): Selenocysteine
  MOD_RES (32)..(32): Selenocysteine
  MOD_RES (60)..(60): Selenocysteine
  MOD_RES (85)..(85): Selenocysteine
  MOD_RES (119)..(119): Selenocysteine
  MOD_RES (139)..(139): Selenocysteine
  MOD_RES (184)..(184): Selenocysteine
  MOD_RES (192)..(192): Selenocysteine
  MOD_RES (224)..(225): Selenocysteine
  MOD_RES (232)..(232): Selenocysteine
  MOD_RES (268)..(268): Selenocysteine
  MOD_RES (276)..(276): Selenocysteine
  MOD_RES (291)..(291): Selenocysteine
  MOD_RES (344)..(344): Selenocysteine
  MOD_RES (361)..(361): Selenocysteine
  MOD_RES (369)..(369): Selenocysteine
  MOD_RES (380)..(380): Selenocysteine
  MOD_RES (382)..(382): Selenocysteine
  MOD_RES (405)..(405): Selenocysteine
  MOD_RES (408)..(408): Selenocysteine
  MOD_RES (453)..(453): Selenocysteine
  MOD_RES (488)..(488): Selenocysteine
  MOD_RES (512)..(512): Selenocysteine
  MOD_RES (539)..(539): Selenocysteine
  MOD_RES (587)..(587): Selenocysteine
  MOD_RES (597)..(597): Selenocysteine
  MOD_RES (601)..(601): Selenocysteine
  MOD_RES (614)..(614): Selenocysteine
  MOD_RES (644)..(644): Selenocysteine
  MOD_RES (649)..(649): Selenocysteine
  MOD_RES (675)..(675): Selenocysteine
  MOD_RES (726)..(726): Selenocysteine
MPXVISASVAPRXAAEPRSPGPVPHPAQSKAXEAGGGNPSGIYSAIISRNFPIIGVKEKXFEQLHKKCLEKKVLYVDPEFPPDEXSLFYSQKFPIQFVWKRPPEICENPRFIIDGANRXDICQGELGDCWFLAAIACLXLNQHLLFRVIPHDQSFIENYAGIFHFQFWRYGEWVDVVIDDCLPXYNNQLVFXKSNHRNEFWSALLEKAYAKLHGSYEALKGGNXXEAMEDFXGGVAEFFEIRDAPSDMYKIMKKAIERGSLMGCSIDXIIPVQYEXRMACGLVRGHAYSVXGLDEVPFKGEKVKLVRLRNPWGQVEWNGSWSDRWKDWSFVDKDEKARLQHQVXEDGEFWMSYEDFIYHFXKLEICNLXADALQSDKLQXWXVSVNEGRWVRGCSAGGCRNFPDXFWXNPQYRLKLLEEDDDPDDSEVICSFLVALMQKNRRKDRKLGASLFXIGFAIYEVPKEMHGNKQHLQKDFFLYNASKARSKXYINMREVSQRFRLPPSEYVIVPSXYEPHQEGEFILRVFSEKRNLSEEVENXISVDRPVPQPGSSDQESEEQQQFRNIFKQIAGDDMEICADELKKVLNXVVNKHKDLKXHGFXLESCRSMIALMDXDGSGKLNLQEFHHLWNKIKAWQKIFKHYDXDQSGXINSYEMRNAVNDAGFHLNNQLYDIIXMRYADKHMNIDFDSFICCFVRLEGMFRAFHAFDKDGDGIIKLNVLEWLQLXMYA

SEQ ID NO: 4926 - protein, 773 aa, Homo sapiens
  MOD_RES (3)..(3): Selenocysteine
  MOD_RES (13)..(13): Selenocysteine
  MOD_RES (32)..(32): Selenocysteine
  MOD_RES (60)..(60): Selenocysteine
  MOD_RES (85)..(85): Selenocysteine
  MOD_RES (119)..(119): Selenocysteine
  MOD_RES (139)..(139): Selenocysteine
  MOD_RES (184)..(184): Selenocysteine
  MOD_RES (192)..(192): Selenocysteine
  MOD_RES (224)..(225): Selenocysteine
  MOD_RES (232)..(232): Selenocysteine
  MOD_RES (268)..(268): Selenocysteine
  MOD_RES (276)..(276): Selenocysteine
  MOD_RES (291)..(291): Selenocysteine
  MOD_RES (344)..(344): Selenocysteine
  MOD_RES (361)..(361): Selenocysteine
  MOD_RES (369)..(369): Selenocysteine
  MOD_RES (380)..(380): Selenocysteine
  MOD_RES (382)..(382): Selenocysteine
  MOD_RES (405)..(405): Selenocysteine
  MOD_RES (408)..(408): Selenocysteine
  MOD_RES (453)..(453): Selenocysteine
  MOD_RES (488)..(488): Selenocysteine
  MOD_RES (512)..(512): Selenocysteine
  MOD_RES (539)..(539): Selenocysteine
  MOD_RES (551)..(551): Selenocysteine
  MOD_RES (580)..(580): Selenocysteine
  MOD_RES (631)..(631): Selenocysteine
  MOD_RES (641)..(641): Selenocysteine
  MOD_RES (645)..(645): Selenocysteine
  MOD_RES (658)..(658): Selenocysteine
  MOD_RES (688)..(688): Selenocysteine
  MOD_RES (693)..(693): Selenocysteine
  MOD_RES (719)..(719): Selenocysteine
  MOD_RES (770)..(770): Selenocysteine
MPXVISASVAPRXAAEPRSPGPVPHPAQSKAXEAGGGNPSGIYSAIISRNFPIIGVKEKXFEQLHKKCLEKKVLYVDPEFPPDEXSLFYSQKFPIQFVWKRPPEICENPRFIIDGANRXDICQGELGDCWFLAAIACLXLNQHLLFRVIPHDQSFIENYAGIFHFQFWRYGEWVDVVIDDCLPXYNNQLVFXKSNHRNEFWSALLEKAYAKLHGSYEALKGGNXXEAMEDFXGGVAEFFEIRDAPSDMYKIMKKAIERGSLMGCSIDXIIPVQYEXRMACGLVRGHAYSVXGLDEVPFKGEKVKLVRLRNPWGQVEWNGSWSDRWKDWSFVDKDEKARLQHQVXEDGEFWMSYEDFIYHFXKLEICNLXADALQSDKLQXWXVSVNEGRWVRGCSAGGCRNFPDXFWXNPQYRLKLLEEDDDPDDSEVICSFLVALMQKNRRKDRKLGASLFXIGFAIYEVPKEMHGNKQHLQKDFFLYNASKARSKXYINMREVSQRFRLPPSEYVIVPSXYEPHQEGEFILRVFSEKRNLSEEVENXISVDRPVKKKKXKPIIFVSDRANSNKELGVDQESEEGKGKXSPDKQKQSPQPQPGSSDQESEEQQQFRNIFKQIAGDDMEICADELKKVLNXVVNKHKDLKXHGFXLESCRSMIALMDXDGSGKLNLQEFHHLWNKIKAWQKIFKHYDXDQSGXINSYEMRNAVNDAGFHLNNQLYDIIXMRYADKHMNIDFDSFICCFVRLEGMFRAFHAFDKDGDGIIKLNVLEWLQLXMYA

SEQ ID NO: 4927 - protein, 815 aa, Homo sapiens
  MOD_RES (3)..(3): Selenocysteine
  MOD_RES (13)..(13): Selenocysteine
  MOD_RES (32)..(32): Selenocysteine
  MOD_RES (60)..(60): Selenocysteine
  MOD_RES (85)..(85): Selenocysteine
  MOD_RES (119)..(119): Selenocysteine
  MOD_RES (139)..(139): Selenocysteine
  MOD_RES (184)..(184): Selenocysteine
  MOD_RES (192)..(192): Selenocysteine
  MOD_RES (224)..(225): Selenocysteine
  MOD_RES (232)..(232): Selenocysteine
  MOD_RES (270)..(270): Selenocysteine
  MOD_RES (273)..(273): Selenocysteine
  MOD_RES (276)..(276): Selenocysteine
  MOD_RES (314)..(314): Selenocysteine
  MOD_RES (316)..(316): Selenocysteine
  MOD_RES (324)..(324): Selenocysteine
  MOD_RES (339)..(339): Selenocysteine
  MOD_RES (392)..(392): Selenocysteine
  MOD_RES (409)..(409): Selenocysteine
  MOD_RES (417)..(417): Selenocysteine
  MOD_RES (428)..(428): Selenocysteine
  MOD_RES (430)..(430): Selenocysteine
  MOD_RES (453)..(453): Selenocysteine
  MOD_RES (456)..(456): Selenocysteine
  MOD_RES (501)..(501): Selenocysteine
  MOD_RES (536)..(536): Selenocysteine
  MOD_RES (560)..(560): Selenocysteine
  MOD_RES (587)..(587): Selenocysteine
  MOD_RES (622)..(622): Selenocysteine
  MOD_RES (673)..(673): Selenocysteine
  MOD_RES (683)..(683): Selenocysteine
  MOD_RES (687)..(687): Selenocysteine
  MOD_RES (700)..(700): Selenocysteine
  MOD_RES (730)..(730): Selenocysteine
  MOD_RES (735)..(735): Selenocysteine
  MOD_RES (761)..(761): Selenocysteine
  MOD_RES (812)..(812): Selenocysteine
MPXVISASVAPRXAAEPRSPGPVPHPAQSKAXEAGGGNPSGIYSAIISRNFPIIGVKEKXFEQLHKKCLEKKVLYVDPEFPPDEXSLFYSQKFPIQFVWKRPPEICENPRFIIDGANRXDICQGELGDCWFLAAIACLXLNQHLLFRVIPHDQSFIENYAGIFHFQFWRYGEWVDVVIDDCLPXYNNQLVFXKSNHRNEFWSALLEKAYAKLHGSYEALKGGNXXEAMEDFXGGVAEFFEIRDAPSDMYKIMKKAIERGSLMGCSIDDGXNMXYGXSPSGLNMGELIARMVRNMDNSLLQDSDLDPRGSDERPXRXIIPVQYEXRMACGLVRGHAYSVXGLDEVPFKGEKVKLVRLRNPWGQVEWNGSWSDRWKDWSFVDKDEKARLQHQVXEDGEFWMSYEDFIYHFXKLEICNLXADALQSDKLQXWXVSVNEGRWVRGCSAGGCRNFPDXFWXNPQYRLKLLEEDDDPDDSEVICSFLVALMQKNRRKDRKLGASLFXIGFAIYEVPKEMHGNKQHLQKDFFLYNASKARSKXYINMREVSQRFRLPPSEYVIVPSXYEPHQEGEFILRVFSEKRNLSEEVENXISVDRPVPIIFVSDRANSNKELGVDQESEEGKGKXSPDKQKQSPQPQPGSSDQESEEQQQFRNIFKQIAGDDMEICADELKKVLNXVVNKHKDLKXHGFXLESCRSMIALMDXDGSGKLNLQEFHHLWNKIKAWQKIFKHYDXDQSGXINSYEMRNAVNDAGFHLNNQLYDIIXMRYADKHMNIDFDSFICCFVRLEGMFRAFHAFDKDGDGIIKLNVLEWLQLXMYA

SEQ ID NO: 4928 - protein, 821 aa, Homo sapiens
  MOD_RES (3)..(3): Selenocysteine
  MOD_RES (13)..(13): Selenocysteine
  MOD_RES (32)..(32): Selenocysteine
  MOD_RES (60)..(60): Selenocysteine
  MOD_RES (85)..(85): Selenocysteine
  MOD_RES (119)..(119): Selenocysteine
  MOD_RES (139)..(139): Selenocysteine
  MOD_RES (184)..(184): Selenocysteine
  MOD_RES (192)..(192): Selenocysteine
  MOD_RES (224)..(225): Selenocysteine
  MOD_RES (232)..(232): Selenocysteine
  MOD_RES (270)..(270): Selenocysteine
  MOD_RES (273)..(273): Selenocysteine
  MOD_RES (276)..(276): Selenocysteine
  MOD_RES (314)..(314): Selenocysteine
  MOD_RES (316)..(316): Selenocysteine
  MOD_RES (324)..(324): Selenocysteine
  MOD_RES (339)..(339): Selenocysteine
  MOD_RES (392)..(392): Selenocysteine
  MOD_RES (409)..(409): Selenocysteine
  MOD_RES (417)..(417): Selenocysteine
  MOD_RES (428)..(428): Selenocysteine
  MOD_RES (430)..(430): Selenocysteine
  MOD_RES (453)..(453): Selenocysteine
  MOD_RES (456)..(456): Selenocysteine
  MOD_RES (501)..(501): Selenocysteine
  MOD_RES (536)..(536): Selenocysteine
  MOD_RES (560)..(560): Selenocysteine
  MOD_RES (587)..(587): Selenocysteine
  MOD_RES (599)..(599): Selenocysteine
  MOD_RES (628)..(628): Selenocysteine
  MOD_RES (679)..(679): Selenocysteine
  MOD_RES (689)..(689): Selenocysteine
  MOD_RES (693)..(693): Selenocysteine
  MOD_RES (706)..(706): Selenocysteine
  MOD_RES (736)..(736): Selenocysteine
  MOD_RES (741)..(741): Selenocysteine
  MOD_RES (767)..(767): Selenocysteine
  MOD_RES (818)..(818): Selenocysteine
MPXVISASVAPRXAAEPRSPGPVPHPAQSKAXEAGGGNPSGIYSAIISRNFPIIGVKEKXFEQLHKKCLEKKVLYVDPEFPPDEXSLFYSQKFPIQFVWKRPPEICENPRFIIDGANRXDICQGELGDCWFLAAIACLXLNQHLLFRVIPHDQSFIENYAGIFHFQFWRYGEWVDVVIDDCLPXYNNQLVFXKSNHRNEFWSALLEKAYAKLHGSYEALKGGNXXEAMEDFXGGVAEFFEIRDAPSDMYKIMKKAIERGSLMGCSIDDGXNMXYGXSPSGLNMGELIARMVRNMDNSLLQDSDLDPRGSDERPXRXIIPVQYEXRMACGLVRGHAYSVXGLDEVPFKGEKVKLVRLRNPWGQVEWNGSWSDRWKDWSFVDKDEKARLQHQVXEDGEFWMSYEDFIYHFXKLEICNLXADALQSDKLQXWXVSVNEGRWVRGCSAGGCRNFPDXFWXNPQYRLKLLEEDDDPDDSEVICSFLVALMQKNRRKDRKLGASLFXIGFAIYEVPKEMHGNKQHLQKDFFLYNASKARSKXYINMREVSQRFRLPPSEYVIVPSXYEPHQEGEFILRVFSEKRNLSEEVENXISVDRPVKKKKXKPIIFVSDRANSNKELGVDQESEEGKGKXSPDKQKQSPQPQPGSSDQESEEQQQFRNIFKQIAGDDMEICADELKKVLNXVVNKHKDLKXHGFXLESCRSMIALMDXDGSGKLNLQEFHHLWNKIKAWQKIFKHYDXDQSGXINSYEMRNAVNDAGFHLNNQLYDIIXMRYADKHMNIDFDSFICCFVRLEGMFRAFHAFDKDGDGIIKLNVLEWLQLXMYA

SEQ ID NO: 4929 - protein, 67 aa, Homo sapiens
  MOD_RES (1)..(1): Any amino acid
  MOD_RES (13)..(13): Selenocysteine
  MOD_RES (64)..(64): Selenocysteine
XFHLNNQLYDIIXMRYADKHMNIDFDSFICCFVRLEGMFRAFHAFDKDGDGIIKLNVLEWLQLXMYA

SEQ ID NO: 4930 - protein, 188 aa, Homo sapiens
  MOD_RES (1)..(1): Any amino acid
  MOD_RES (23)..(23): Selenocysteine
  MOD_RES (47)..(47): Selenocysteine
  MOD_RES (74)..(74): Selenocysteine
  MOD_RES (86)..(86): Selenocysteine
  MOD_RES (115)..(115): Selenocysteine
  MOD_RES (173)..(173): Selenocysteine
  MOD_RES (183)..(183): Selenocysteine
  MOD_RES (187)..(187): Selenocysteine
XGNKQHLQKDFFLYNASKARSKXYINMREVSQRFRLPPSEYVIVPSXYEPHQEGEFILRVFSEKRNLSEEVENXISVDRPVKKKKXKPIIFVSDRANSNKELGVDQESEEGKGKXSPDKQKQSPQFSFVPPQPQPGSSDQESEEQQQFRNIFKQIAGDDMEICADELKKVLNXVVNKHKDLKXHGFXL

SEQ ID NO: 4931 - protein, 169 aa, Homo sapiens
  MOD_RES (1)..(1): Any amino acid
  MOD_RES (45)..(45): Selenocysteine
  MOD_RES (55)..(55): Selenocysteine
  MOD_RES (59)..(59): Selenocysteine
  MOD_RES (72)..(72): Selenocysteine
  MOD_RES (115)..(115): Selenocysteine
  MOD_RES (166)..(166): Selenocysteine
XSPQPQPGSSDQESEEQQQFRNIFKQIAGDDMEICADELKKVLNXVVNKHKDLKXHGFXLESCRSMIALMDXDGSGKLNLQEFHHLWNKIKAWQMRNAVNDAGFHLNNQLYDIIXMRYADKHMNIDFDSFICCFVRLEGMFRAFHAFDKDGDGIIKLNVLEWLQLXMYA

SEQ ID NO: 4932 - protein, 52 aa, Homo sapiens
  MOD_RES (35)..(35): Selenocysteine
  MOD_RES (44)..(44): Selenocysteine
  MOD_RES (52)..(52): Selenocysteine
MFSCVKPYEDQNYSALRRDCRRRKVLFEDPLFPAXDDSLYYKGXPGPAVRCX

SEQ ID NO: 4933 - protein, 97 aa, Homo sapiens
  MOD_RES (35)..(35): Selenocysteine
  MOD_RES (44)..(44): Selenocysteine
MFSCVKPYEDQNYSALRRDCRRRKVLFEDPLFPAXDDSLYYKGXPGPAVRWKRPKGICEDPRLFVDGISSHDLHQGQVGNCWFVAACSSLASRESLW

SEQ ID NO: 4934 - protein, 640 aa, Homo sapiens
  MOD_RES (35)..(35): Selenocysteine
  MOD_RES (44)..(44): Selenocysteine
  MOD_RES (142)..(142): Selenocysteine
  MOD_RES (182)..(182): Selenocysteine
  MOD_RES (190)..(190): Selenocysteine
  MOD_RES (200)..(200): Selenocysteine
  MOD_RES (209)..(209): Selenocysteine
  MOD_RES (236)..(236): Selenocysteine
  MOD_RES (257)..(257): Selenocysteine
  MOD_RES (298)..(298): Selenocysteine
  MOD_RES (316)..(316): Selenocysteine
  MOD_RES (326)..(326): Selenocysteine
  MOD_RES (335)..(335): Selenocysteine
  MOD_RES (345)..(345): Selenocysteine
  MOD_RES (353)..(353): Selenocysteine
  MOD_RES (364)..(364): Selenocysteine
  MOD_RES (383)..(383): Selenocysteine
  MOD_RES (413)..(413): Selenocysteine
  MOD_RES (461)..(461): Selenocysteine
  MOD_RES (473)..(474): Selenocysteine
  MOD_RES (480)..(480): Selenocysteine
  MOD_RES (489)..(489): Selenocysteine
  MOD_RES (506)..(506): Selenocysteine
  MOD_RES (519)..(519): Selenocysteine
  MOD_RES (534)..(534): Selenocysteine
  MOD_RES (557)..(557): Selenocysteine
  MOD_RES (559)..(559): Selenocysteine
  MOD_RES (578)..(578): Selenocysteine
  MOD_RES (609)..(609): Selenocysteine
  MOD_RES (626)..(626): Selenocysteine
  MOD_RES (635)..(635): Selenocysteine
MFSCVKPYEDQNYSALRRDCRRRKVLFEDPLFPAXDDSLYYKGXPGPAVRWKRPKGICEDPRLFVDGISSHDLHQGQVGNCWFVAACSSLASRESLWQKVIPDWKEQEWDPEKPNAYAGIFHFHFWRFGEWVDVVIDDRLPXVNNQLIYCHSNSRNEFWCALVEKAYAKLAGCYQALDGGNXADALVDFXGGVSEPIDLXEGDFANDEXKRNQLFERMLKVHSRGGLISASIKAVXAADMEARLACGLVKGHAYAVXDVRKVRLGHGLLAFFKSEKLDMIRLRNPWGEREWNGPWSDXSEEWQKVSKSEREKMGVXVQDDGEFWMXFEDVCRYFXDIIKCRVINXSHLSIHKXWEEARLHGAWXLHEDPRQNRGGGCINHKDXFFQNPQYIFEVKKPEDEVLICIQQRPKRSXRREGKGENLAIGFDIYKVEENRQYRMHSLQHKAASSIYINSRSVFLRXDQPEGRYVIIPXXFEPGHXGEFLLRVFXDVPSNCRELRLDEPPHXCWSSLCGYPQLVXQVHVLGAAGLKDSPXGANSYVIIKCEGDKVRSAVQKGXSXPEYNVKGIFYRKKLSQPIXVQVWNHRVLKDEFLGQVHLKADPDNLQALHXLHLRDRNSRQPSNLPGXVAVHILSSXSLMAV

SEQ ID NO: 4935 - protein, 680 aa, Homo sapiens
  MOD_RES (35)..(35): Selenocysteine
  MOD_RES (44)..(44): Selenocysteine
  MOD_RES (182)..(182): Selenocysteine
  MOD_RES (222)..(222): Selenocysteine
  MOD_RES (230)..(230): Selenocysteine
  MOD_RES (240)..(240): Selenocysteine
  MOD_RES (249)..(249): Selenocysteine
  MOD_RES (276)..(276): Selenocysteine
  MOD_RES (297)..(297): Selenocysteine
  MOD_RES (338)..(338): Selenocysteine
  MOD_RES (356)..(356): Selenocysteine
  MOD_RES (366)..(366): Selenocysteine
  MOD_RES (375)..(375): Selenocysteine
  MOD_RES (385)..(385): Selenocysteine
  MOD_RES (393)..(393): Selenocysteine
  MOD_RES (404)..(404): Selenocysteine
  MOD_RES (423)..(423): Selenocysteine
  MOD_RES (453)..(453): Selenocysteine
  MOD_RES (501)..(501): Selenocysteine
  MOD_RES (513)..(514): Selenocysteine
  MOD_RES (520)..(520): Selenocysteine
  MOD_RES (529)..(529): Selenocysteine
  MOD_RES (546)..(546): Selenocysteine
  MOD_RES (559)..(559): Selenocysteine
  MOD_RES (574)..(574): Selenocysteine
  MOD_RES (597)..(597): Selenocysteine
  MOD_RES (599)..(599): Selenocysteine
  MOD_RES (618)..(618): Selenocysteine
  MOD_RES (649)..(649): Selenocysteine
  MOD_RES (666)..(666): Selenocysteine
  MOD_RES (675)..(675): Selenocysteine
MFSCVKPYEDQNYSALRRDCRRRKVLFEDPLFPAXDDSLYYKGXPGPAVRWKRPKYSGHSLAPHRPGWGDARRMENVPRPGSSGCPSSSLRARDLGICEDPRLFVDGISSHDLHQGQVGNCWFVAACSSLASRESLWQKVIPDWKEQEWDPEKPNAYAGIFHFHFWRFGEWVDVVIDDRLPXVNNQLIYCHSNSRNEFWCALVEKAYAKLAGCYQALDGGNXADALVDFXGGVSEPIDLXEGDFANDEXKRNQLFERMLKVHSRGGLISASIKAVXAADMEARLACGLVKGHAYAVXDVRKVRLGHGLLAFFKSEKLDMIRLRNPWGEREWNGPWSDXSEEWQKVSKSEREKMGVXVQDDGEFWMXFEDVCRYFXDIIKCRVINXSHLSIHKXWEEARLHGAWXLHEDPRQNRGGGCINHKDXFFQNPQYIFEVKKPEDEVLICIQQRPKRSXRREGKGENLAIGFDIYKVEENRQYRMHSLQHKAASSIYINSRSVFLRXDQPEGRYVIIPXXFEPGHXGEFLLRVFXDVPSNCRELRLDEPPHXCWSSLCGYPQLVXQVHVLGAAGLKDSPXGANSYVIIKCEGDKVRSAVQKGXSXPEYNVKGIFYRKKLSQPIXVQVWNHRVLKDEFLGQVHLKADPDNLQALHXLHLRDRNSRQPSNLPGXVAVHILSSXSLMAV

SEQ ID NO: 4936 - protein, 135 aa, Homo sapiens
  MOD_RES (40)..(40): Selenocysteine
  MOD_RES (73)..(73): Selenocysteine
  MOD_RES (85)..(85): Selenocysteine
  MOD_RES (118)..(118): Selenocysteine
  MOD_RES (129)..(129): Selenocysteine
  MOD_RES (134)..(134): Selenocysteine
EDYKDRLKSGEHLNPDQLEAVEKYEEVLHNLEFAKELQKXFSGLSLDLLKAQKKAQRREHMLKLEAEKKKLRXILQVQYVLQNLXQEHVQKDFKGGLNGAVYLPSKELDYLIKFSKLXCPERNESLRQXLEGSXV

SEQ ID NO: 4937 - protein, 706 aa, Homo sapiens
  MOD_RES (7)..(7): Selenocysteine
  MOD_RES (42)..(43): Selenocysteine
  MOD_RES (88)..(88): Selenocysteine
  MOD_RES (93)..(93): Selenocysteine
  MOD_RES (122)..(122): Selenocysteine
  MOD_RES (154)..(154): Selenocysteine
  MOD_RES (192)..(192): Selenocysteine
  MOD_RES (198)..(198): Selenocysteine
  MOD_RES (222)..(222): Selenocysteine
  MOD_RES (239)..(239): Selenocysteine
  MOD_RES (257)..(257): Selenocysteine
  MOD_RES (262)..(262): Selenocysteine
  MOD_RES (271)..(272): Selenocysteine
  MOD_RES (276)..(277): Selenocysteine
  MOD_RES (290)..(290): Selenocysteine
  MOD_RES (306)..(306): Selenocysteine
  MOD_RES (320)..(320): Selenocysteine
  MOD_RES (336)..(336): Selenocysteine
  MOD_RES (354)..(354): Selenocysteine
  MOD_RES (371)..(371): Selenocysteine
  MOD_RES (376)..(376): Selenocysteine
  MOD_RES (396)..(396): Selenocysteine
  MOD_RES (403)..(403): Selenocysteine
  MOD_RES (429)..(429): Selenocysteine
  MOD_RES (434)..(434): Selenocysteine
  MOD_RES (443)..(444): Selenocysteine
  MOD_RES (453)..(453): Selenocysteine
  MOD_RES (457)..(457): Selenocysteine
  MOD_RES (460)..(460): Selenocysteine
  MOD_RES (500)..(500): Selenocysteine
  MOD_RES (503)..(503): Selenocysteine
  MOD_RES (511)..(511): Selenocysteine
  MOD_RES (541)..(542): Selenocysteine
  MOD_RES (545)..(545): Selenocysteine
  MOD_RES (547)..(547): Selenocysteine
  MOD_RES (561)..(561): Selenocysteine
  MOD_RES (567)..(567): Selenocysteine
  MOD_RES (575)..(575): Selenocysteine
  MOD_RES (590)..(590): Selenocysteine
  MOD_RES (597)..(597): Selenocysteine
  MOD_RES (611)..(611): Selenocysteine
  MOD_RES (618)..(618): Selenocysteine
  MOD_RES (632)..(632): Selenocysteine
  MOD_RES (666)..(666): Selenocysteine
IKFSKLXCPERNESLSVEDQMEQSSLYFWDLLEGSEKAVVGXXYKHLKDLLSKLLNSGYFESIPVPKNAKEKEVPLEEEMLIQSEKKXQLSKXESVKESESLMEFAQPEIQPQEFLNRRYMXEVDYSNKQGEEQPWEADYARKPNLPKRWDMLXEPDGQEKKQESFKSWEASGKHQEVSKPAVSLEQRKQDXSKLRSXLPEEQKKQEISKSKPSPSQWKQDXPKSKAGYVQEEQKKQEXPKLWPVQLQKEQDPKKQXPKSWXPSMQSEQNXXKSWXXPMCEEQDSKQPEXPKSWENNVESQKHSLXSQSQISPKSWGVAXASLIPNDQLLPRKLNXEPKDVPKPVHQPVGSSSXLPKDPVLRKEKLQDLMXQIQGXCNFMQESVLDFDKPSSAIPXSQPPSAXPGSPVASKEQNLSSQSDFLQEPLQAXSSPVXCSSNACLVXXDQASSGSEXEFMXSEXPEAAIPPGKQPSSLASPNPPMAKGSEQGFQSPPASSSSVXINXAPFQAMQXVFNVNAPLPPRKEQEIKESPYSPGYNQSFXXASXQXPPQCQLPSIHVEQXVHSQEXANYHPDGXIQVSNGSLAFYPAQXNVFPRPXQPFVNSRGSVRGCXRGGRLIXNSYRSPGGYKGFDXYRGLPSISNGNYSQLQFQAREYSGAPYSQRCLEXSEPLWLLGKARIISSSVISEEGHLVVHEQIREQGGVILLR

SEQ ID NO: 4938 - protein, 278 aa, Homo sapiens
  MOD_RES (15)..(15): Selenocysteine
  MOD_RES (107)..(107): Selenocysteine
  MOD_RES (120)..(120): Selenocysteine
  MOD_RES (183)..(183): Selenocysteine
  MOD_RES (216)..(216): Selenocysteine
  MOD_RES (228)..(228): Selenocysteine
  MOD_RES (261)..(261): Selenocysteine
  MOD_RES (272)..(272): Selenocysteine
  MOD_RES (277)..(277): Selenocysteine
MEVQVSQASLGFELXSVEKSLREWSRLSREVIAWLCPSSPNFILNFPPPPSASSVSMVQLFSSPFGYQSPSGHSEEEREGNMKSAKPQVNHSQHGESQRALSPLQSXLSSAASPSQAYEXYIENGLICLKHKIRNIEKKKLKLEDYKDRLKSGEHLNPDQLEAVEKYEEVLHNLEFAKELQKXFSGLSLDLLKAQKKAQRREHMLKLEAEKKKLRXILQVQYVLQNLXQEHVQKDFKGGLNGAVYLPSKELDYLIKFSKLXCPERNESLRQXLEGSXV

SEQ ID NO: 4939 - protein, 905 aa, Homo sapiens
  MOD_RES (15)..(15): Selenocysteine
  MOD_RES (107)..(107): Selenocysteine
  MOD_RES (120)..(120): Selenocysteine
  MOD_RES (183)..(183): Selenocysteine
  MOD_RES (216)..(216): Selenocysteine
  MOD_RES (228)..(228): Selenocysteine
  MOD_RES (261)..(261): Selenocysteine
  MOD_RES (296)..(297): Selenocysteine
  MOD_RES (342)..(342): Selenocysteine
  MOD_RES (347)..(347): Selenocysteine
  MOD_RES (376)..(376): Selenocysteine
  MOD_RES (408)..(408): Selenocysteine
  MOD_RES (446)..(446): Selenocysteine
  MOD_RES (452)..(452): Selenocysteine
  MOD_RES (476)..(476): Selenocysteine
  MOD_RES (493)..(493): Selenocysteine
  MOD_RES (511)..(511): Selenocysteine
  MOD_RES (516)..(516): Selenocysteine
  MOD_RES (525)..(526): Selenocysteine
  MOD_RES (530)..(531): Selenocysteine
  MOD_RES (544)..(544): Selenocysteine
  MOD_RES (560)..(560): Selenocysteine
  MOD_RES (574)..(574): Selenocysteine
  MOD_RES (590)..(590): Selenocysteine
  MOD_RES (608)..(608): Selenocysteine
  MOD_RES (625)..(625): Selenocysteine
  MOD_RES (630)..(630): Selenocysteine
  MOD_RES (650)..(650): Selenocysteine
  MOD_RES (657)..(657): Selenocysteine
  MOD_RES (719)..(719): Selenocysteine
  MOD_RES (722)..(722): Selenocysteine
  MOD_RES (730)..(730): Selenocysteine
  MOD_RES (760)..(761): Selenocysteine
  MOD_RES (764)..(764): Selenocysteine
  MOD_RES (766)..(766): Selenocysteine
  MOD_RES (780)..(780): Selenocysteine
  MOD_RES (786)..(786): Selenocysteine
  MOD_RES (789)..(789): Selenocysteine
  MOD_RES (796)..(796): Selenocysteine
  MOD_RES (810)..(810): Selenocysteine
  MOD_RES (817)..(817): Selenocysteine
  MOD_RES (831)..(831): Selenocysteine
  MOD_RES (873)..(873): Selenocysteine
MEVQVSQASLGFELXSVEKSLREWSRLSREVIAWLCPSSPNFILNFPPPPSASSVSMVQLFSSPFGYQSPSGHSEEEREGNMKSAKPQVNHSQHGESQRALSPLQSXLSSAASPSQAYEXYIENGLICLKHKIRNIEKKKLKLEDYKDRLKSGEHLNPDQLEAVEKYEEVLHNLEFAKELQKXFSGLSLDLLKAQKKAQRREHMLKLEAEKKKLRXILQVQYVLQNLXQEHVQKDFKGGLNGAVYLPSKELDYLIKFSKLXCPERNESLSVEDQMEQSSLYFWDLLEGSEKAVVGXXYKHLKDLLSKLLNSGYFESIPVPKNAKEKEVPLEEEMLIQSEKKXQLSKXESVKESESLMEFAQPEIQPQEFLNRRYMXEVDYSNKQGEEQPWEADYARKPNLPKRWDMLXEPDGQEKKQESFKSWEASGKHQEVSKPAVSLEQRKQDXSKLRSXLPEEQKKQEISKSKPSPSQWKQDXPKSKAGYVQEEQKKQEXPKLWPVQLQKEQDPKKQXPKSWXPSMQSEQNXXKSWXXPMCEEQDSKQPEXPKSWENNVESQKHSLXSQSQISPKSWGVAXASLIPNDQLLPRKLNXEPKDVPKPVHQPVGSSSXLPKDPVLRKEKLQDLMXQIQGXCNFMQESVLDFDKPSSAIPXSQPPSAXPGSPVASKEQNLSSQSDFLQEPLQAAIPPGKQPSSLASPNPPMAKGSEQGFQSPPASSSSVXINXAPFQAMQXVFNVNAPLPPRKEQEIKESPYSPGYNQSFXXASXQXPPQCQLPSIHVEQXVHSQEXAQXNVFPRPXQPFVNSRGSVRGCXRGGRLIXNSYRSPGGYKGFDXYRGLPSISNGNYSQLQFQAREYSGAPYSQRDNFQQCYKRGGXSGGPRANSRANCFIMRNSLLLIKQQGGVILLR

SEQ ID NO: 4940 - protein, 960 aa, Homo sapiens
  MOD_RES (15)..(15): Selenocysteine
  MOD_RES (107)..(107): Selenocysteine
  MOD_RES (120)..(120): Selenocysteine
  MOD_RES (183)..(183): Selenocysteine
  MOD_RES (216)..(216): Selenocysteine
  MOD_RES (228)..(228): Selenocysteine
  MOD_RES (261)..(261): Selenocysteine
  MOD_RES (296)..(297): Selenocysteine
  MOD_RES (342)..(342): Selenocysteine
  MOD_RES (347)..(347): Selenocysteine
  MOD_RES (376)..(376): Selenocysteine
  MOD_RES (408)..(408): Selenocysteine
  MOD_RES (446)..(446): Selenocysteine
  MOD_RES (452)..(452): Selenocysteine
  MOD_RES (476)..(476): Selenocysteine
  MOD_RES (493)..(493): Selenocysteine
  MOD_RES (511)..(511): Selenocysteine
  MOD_RES (516)..(516): Selenocysteine
  MOD_RES (525)..(526): Selenocysteine
  MOD_RES (530)..(531): Selenocysteine
  MOD_RES (544)..(544): Selenocysteine
  MOD_RES (560)..(560): Selenocysteine
  MOD_RES (574)..(574): Selenocysteine
  MOD_RES (590)..(590): Selenocysteine
  MOD_RES (608)..(608): Selenocysteine
  MOD_RES (625)..(625): Selenocysteine
  MOD_RES (630)..(630): Selenocysteine
  MOD_RES (650)..(650): Selenocysteine
  MOD_RES (657)..(657): Selenocysteine
  MOD_RES (683)..(683): Selenocysteine
  MOD_RES (688)..(688): Selenocysteine
  MOD_RES (697)..(698): Selenocysteine
  MOD_RES (707)..(707): Selenocysteine
  MOD_RES (711)..(711): Selenocysteine
  MOD_RES (714)..(714): Selenocysteine
  MOD_RES (754)..(754): Selenocysteine
  MOD_RES (757)..(757): Selenocysteine
  MOD_RES (765)..(765): Selenocysteine
  MOD_RES (795)..(796): Selenocysteine
  MOD_RES (799)..(799): Selenocysteine
  MOD_RES (801)..(801): Selenocysteine
  MOD_RES (815)..(815): Selenocysteine
  MOD_RES (821)..(821): Selenocysteine
  MOD_RES (829)..(829): Selenocysteine
  MOD_RES (844)..(844): Selenocysteine
  MOD_RES (851)..(851): Selenocysteine
  MOD_RES (865)..(865): Selenocysteine
  MOD_RES (872)..(872): Selenocysteine
  MOD_RES (886)..(886): Selenocysteine
  MOD_RES (928)..(928): Selenocysteine
MEVQVSQASLGFELXSVEKSLREWSRLSREVIAWLCPSSPNFILNFPPPPSASSVSMVQLFSSPFGYQSPSGHSEEEREGNMKSAKPQVNHSQHGESQRALSPLQSXLSSAASPSQAYEXYIENGLICLKHKIRNIEKKKLKLEDYKDRLKSGEHLNPDQLEAVEKYEEVLHNLEFAKELQKXFSGLSLDLLKAQKKAQRREHMLKLEAEKKKLRXILQVQYVLQNLXQEHVQKDFKGGLNGAVYLPSKELDYLIKFSKLXCPERNESLSVEDQMEQSSLYFWDLLEGSEKAVVGXXYKHLKDLLSKLLNSGYFESIPVPKNAKEKEVPLEEEMLIQSEKKXQLSKXESVKESESLMEFAQPEIQPQEFLNRRYMXEVDYSNKQGEEQPWEADYARKPNLPKRWDMLXEPDGQEKKQESFKSWEASGKHQEVSKPAVSLEQRKQDXSKLRSXLPEEQKKQEISKSKPSPSQWKQDXPKSKAGYVQEEQKKQEXPKLWPVQLQKEQDPKKQXPKSWXPSMQSEQNXXKSWXXPMCEEQDSKQPEXPKSWENNVESQKHSLXSQSQISPKSWGVAXASLIPNDQLLPRKLNXEPKDVPKPVHQPVGSSSXLPKDPVLRKEKLQDLMXQIQGXCNFMQESVLDFDKPSSAIPXSQPPSAXPGSPVASKEQNLSSQSDFLQEPLQAXSSPVXCSSNACLVXXDQASSGSEXEFMXSEXPEAAIPPGKQPSSLASPNPPMAKGSEQGFQSPPASSSSVXINXAPFQAMQXVFNVNAPLPPRKEQEIKESPYSPGYNQSFXXASXQXPPQCQLPSIHVEQXVHSQEXANYHPDGXIQVSNGSLAFYPAQXNVFPRPXQPFVNSRGSVRGCXRGGRLIXNSYRSPGGYKGFDXYRGLPSISNGNYSQLQFQAREYSGAPYSQRDNFQQCYKRGGXSGGPRANSRANCFIMRNSLLLIKQQGGVILLR

SEQ ID NO: 4941 - protein, 1077 aa, Homo sapiens
  MOD_RES (15)..(15): Selenocysteine
  MOD_RES (107)..(107): Selenocysteine
  MOD_RES (120)..(120): Selenocysteine
  MOD_RES (183)..(183): Selenocysteine
  MOD_RES (216)..(216): Selenocysteine
  MOD_RES (228)..(228): Selenocysteine
  MOD_RES (261)..(261): Selenocysteine
  MOD_RES (296)..(297): Selenocysteine
  MOD_RES (342)..(342): Selenocysteine
  MOD_RES (347)..(347): Selenocysteine
  MOD_RES (376)..(376): Selenocysteine
  MOD_RES (408)..(408): Selenocysteine
  MOD_RES (446)..(446): Selenocysteine
  MOD_RES (452)..(452): Selenocysteine
  MOD_RES (476)..(476): Selenocysteine
  MOD_RES (493)..(493): Selenocysteine
  MOD_RES (511)..(511): Selenocysteine
  MOD_RES (516)..(516): Selenocysteine
  MOD_RES (525)..(526): Selenocysteine
  MOD_RES (530)..(531): Selenocysteine
  MOD_RES (544)..(544): Selenocysteine
  MOD_RES (560)..(560): Selenocysteine
  MOD_RES (574)..(574): Selenocysteine
  MOD_RES (590)..(590): Selenocysteine
  MOD_RES (608)..(608): Selenocysteine
  MOD_RES (625)..(625): Selenocysteine
  MOD_RES (630)..(630): Selenocysteine
  MOD_RES (650)..(650): Selenocysteine
  MOD_RES (657)..(657): Selenocysteine
  MOD_RES (683)..(683): Selenocysteine
  MOD_RES (688)..(688): Selenocysteine
  MOD_RES (697)..(698): Selenocysteine
  MOD_RES (707)..(707): Selenocysteine
  MOD_RES (711)..(711): Selenocysteine
  MOD_RES (714)..(714): Selenocysteine
  MOD_RES (746)..(747): Selenocysteine
  MOD_RES (750)..(750): Selenocysteine
  MOD_RES (752)..(752): Selenocysteine
  MOD_RES (766)..(766): Selenocysteine
  MOD_RES (772)..(772): Selenocysteine
  MOD_RES (780)..(780): Selenocysteine
  MOD_RES (795)..(795): Selenocysteine
  MOD_RES (802)..(802): Selenocysteine
  MOD_RES (816)..(816): Selenocysteine
  MOD_RES (823)..(823): Selenocysteine
  MOD_RES (837)..(837): Selenocysteine
  MOD_RES (879)..(879): Selenocysteine
  MOD_RES (906)..(906): Selenocysteine
  MOD_RES (921)..(921): Selenocysteine
  MOD_RES (928)..(928): Selenocysteine
  MOD_RES (933)..(933): Selenocysteine
  MOD_RES (955)..(955): Selenocysteine
  MOD_RES (962)..(962): Selenocysteine
  MOD_RES (979)..(979): Selenocysteine
  MOD_RES (994)..(994): Selenocysteine
  MOD_RES (1035)..(1035): Selenocysteine
  MOD_RES (1068)..(1068): Selenocysteine
MEVQVSQASLGFELXSVEKSLREWSRLSREVIAWLCPSSPNFILNFPPPPSASSVSMVQLFSSPFGYQSPSGHSEEEREGNMKSAKPQVNHSQHGESQRALSPLQSXLSSAASPSQAYEXYIENGLICLKHKIRNIEKKKLKLEDYKDRLKSGEHLNPDQLEAVEKYEEVLHNLEFAKELQKXFSGLSLDLLKAQKKAQRREHMLKLEAEKKKLRXILQVQYVLQNLXQEHVQKDFKGGLNGAVYLPSKELDYLIKFSKLXCPERNESLSVEDQMEQSSLYFWDLLEGSEKAVVGXXYKHLKDLLSKLLNSGYFESIPVPKNAKEKEVPLEEEMLIQSEKKXQLSKXESVKESESLMEFAQPEIQPQEFLNRRYMXEVDYSNKQGEEQPWEADYARKPNLPKRWDMLXEPDGQEKKQESFKSWEASGKHQEVSKPAVSLEQRKQDXSKLRSXLPEEQKKQEISKSKPSPSQWKQDXPKSKAGYVQEEQKKQEXPKLWPVQLQKEQDPKKQXPKSWXPSMQSEQNXXKSWXXPMCEEQDSKQPEXPKSWENNVESQKHSLXSQSQISPKSWGVAXASLIPNDQLLPRKLNXEPKDVPKPVHQPVGSSSXLPKDPVLRKEKLQDLMXQIQGXCNFMQESVLDFDKPSSAIPXSQPPSAXPGSPVASKEQNLSSQSDFLQEPLQAXSSPVXCSSNACLVXXDQASSGSEXEFMXSEXPEVFNVNAPLPPRKEQEIKESPYSPGYNQSFXXASXQXPPQCQLPSIHVEQXVHSQEXANYHPDGXIQVSNGSLAFYPAQXNVFPRPXQPFVNSRGSVRGCXRGGRLIXNSYRSPGGYKGFDXYRGLPSISNGNYSQLQFQAREYSGAPYSQRDNFQQCYKRGGXSGGPRANSRAGWSDSSQVSSPERDNEXFNSGDSGQGDSRSMXPVDVPVXNPAAXILPVHVYPLPQQMRVAFSAARXSNLAPGXLDQPIVFDLLLNNLGEXFDLQLGRFNCPVNGXYVFIFHMLKLAVNVPLYVNLMKNEEVLVSAYANDGAPDHEXASNHAILQLFQGDQIWLRLHRGAIYGSSWKYSXFSGYLLYQD

SEQ ID NO: 4942 - protein, 119 aa, Homo sapiens
  MOD_RES (26)..(26): Selenocysteine
  MOD_RES (39)..(39): Selenocysteine
  MOD_RES (102)..(102): Selenocysteine
MKSAKPQVNHSQHGESQRALSPLQSXLSSAASPSQAYEXYIENGLICLKHKIRNIEKKKLKLEDYKDRLKSGEHLNPDQLEAVEKYEEVLHNLEFAKELQKXFSGLSLDLLKAQKKAQR

SEQ ID NO: 4943 - protein, 126 aa, Homo sapiens
  MOD_RES (26)..(26): Selenocysteine
  MOD_RES (39)..(39): Selenocysteine
  MOD_RES (102)..(102): Selenocysteine
MKSAKPQVNHSQHGESQRALSPLQSXLSSAASPSQAYEXYIENGLICLKHKIRNIEKKKLKLEDYKDRLKSGEHLNPDQLEAVEKYEEVLHNLEFAKELQKXFSGLSLDLLKAQKKAQRREHMLKL

SEQ ID NO: 4944 - protein, 186 aa, Homo sapiens
  MOD_RES (26)..(26): Selenocysteine
  MOD_RES (39)..(39): Selenocysteine
  MOD_RES (102)..(102): Selenocysteine
  MOD_RES (135)..(135): Selenocysteine
  MOD_RES (147)..(147): Selenocysteine
  MOD_RES (180)..(180): Selenocysteine
MKSAKPQVNHSQHGESQRALSPLQSXLSSAASPSQAYEXYIENGLICLKHKIRNIEKKKLKLEDYKDRLKSGEHLNPDQLEAVEKYEEVLHNLEFAKELQKXFSGLSLDLLKAQKKAQRREHMLKLEAEKKKLRXILQVQYVLQNLXQEHVQKDFKGGLNGAVYLPSKELDYLIKFSKLXCPERNE

SEQ ID NO: 4945 - protein, 702 aa, Homo sapiens
  MOD_RES (26)..(26): Selenocysteine
  MOD_RES (39)..(39): Selenocysteine
  MOD_RES (102)..(102): Selenocysteine
  MOD_RES (135)..(135): Selenocysteine
  MOD_RES (147)..(147): Selenocysteine
  MOD_RES (180)..(180): Selenocysteine
  MOD_RES (215)..(216): Selenocysteine
  MOD_RES (261)..(261): Selenocysteine
  MOD_RES (266)..(266): Selenocysteine
  MOD_RES (295)..(295): Selenocysteine
  MOD_RES (327)..(327): Selenocysteine
  MOD_RES (365)..(365): Selenocysteine
  MOD_RES (371)..(371): Selenocysteine
  MOD_RES (395)..(395): Selenocysteine
  MOD_RES (412)..(412): Selenocysteine
  MOD_RES (430)..(430): Selenocysteine
  MOD_RES (435)..(435): Selenocysteine
  MOD_RES (444)..(445): Selenocysteine
  MOD_RES (449)..(450): Selenocysteine
  MOD_RES (463)..(463): Selenocysteine
  MOD_RES (479)..(479): Selenocysteine
  MOD_RES (493)..(493): Selenocysteine
  MOD_RES (509)..(509): Selenocysteine
  MOD_RES (527)..(527): Selenocysteine
  MOD_RES (544)..(544): Selenocysteine
  MOD_RES (549)..(549): Selenocysteine
  MOD_RES (569)..(569): Selenocysteine
  MOD_RES (576)..(576): Selenocysteine
  MOD_RES (602)..(602): Selenocysteine
  MOD_RES (607)..(607): Selenocysteine
  MOD_RES (616)..(617): Selenocysteine
  MOD_RES (626)..(626): Selenocysteine
  MOD_RES (630)..(630): Selenocysteine
  MOD_RES (633)..(633): Selenocysteine
  MOD_RES (673)..(673): Selenocysteine
  MOD_RES (676)..(676): Selenocysteine
  MOD_RES (684)..(684): Selenocysteine
MKSAKPQVNHSQHGESQRALSPLQSXLSSAASPSQAYEXYIENGLICLKHKIRNIEKKKLKLEDYKDRLKSGEHLNPDQLEAVEKYEEVLHNLEFAKELQKXFSGLSLDLLKAQKKAQRREHMLKLEAEKKKLRXILQVQYVLQNLXQEHVQKDFKGGLNGAVYLPSKELDYLIKFSKLXCPERNESLSVEDQMEQSSLYFWDLLEGSEKAVVGXXYKHLKDLLSKLLNSGYFESIPVPKNAKEKEVPLEEEMLIQSEKKXQLSKXESVKESESLMEFAQPEIQPQEFLNRRYMXEVDYSNKQGEEQPWEADYARKPNLPKRWDMLXEPDGQEKKQESFKSWEASGKHQEVSKPAVSLEQRKQDXSKLRSXLPEEQKKQEISKSKPSPSQWKQDXPKSKAGYVQEEQKKQEXPKLWPVQLQKEQDPKKQXPKSWXPSMQSEQNXXKSWXXPMCEEQDSKQPEXPKSWENNVESQKHSLXSQSQISPKSWGVAXASLIPNDQLLPRKLNXEPKDVPKPVHQPVGSSSXLPKDPVLRKEKLQDLMXQIQGXCNFMQESVLDFDKPSSAIPXSQPPSAXPGSPVASKEQNLSSQSDFLQEPLQAXSSPVXCSSNACLVXXDQASSGSEXEFMXSEXPEAAIPPGKQPSSLASPNPPMAKGSEQGFQSPPASSSSVXINXAPFQAMQXVFNVNAPLPPRKEQEIKE

SEQ ID NO: 4946 - protein, 68 aa, Homo sapiens
  MOD_RES (13)..(13): Selenocysteine
  MOD_RES (25)..(25): Selenocysteine
  MOD_RES (58)..(58): Selenocysteine
MLKLEAEKKKLRXILQVQYVLQNLXQEHVQKDFKGGLNGAVYLPSKELDYLIKFSKLXCPERNESLSV

SEQ ID NO: 4947 - protein, 84 aa, Homo sapiens
  MOD_RES (13)..(13): Selenocysteine
  MOD_RES (25)..(25): Selenocysteine
  MOD_RES (58)..(58): Selenocysteine
MLKLEAEKKKLRXILQVQYVLQNLXQEHVQKDFKGGLNGAVYLPSKELDYLIKFSKLXCPERNESLSVEDQMEQSSLYFWDLLE

SEQ ID NO: 4948 - protein, 174 aa, Homo sapiens
  MOD_RES (1)..(1): Any amino acid
  MOD_RES (73)..(73): Selenocysteine
  MOD_RES (86)..(86): Selenocysteine
  MOD_RES (149)..(149): Selenocysteine
  MOD_RES (158)..(159): Selenocysteine
  MOD_RES (174)..(174): Selenocysteine
XCPSSPNFILNFPPPPSASSVSMVQLFSSPFGYQSPSGHSEEEREGNMKSAKPQVNHSQHGESQRALSPLQSXLSSAASPSQAYEXYIENGLICLKHKIRNIEKKKLKLEDYKDRLKSGEHLNPDQLEAVEKYEEVLHNLEFAKELQKXFSGLSLDVXXKSAKEGPEKGAHAKX

SEQ ID NO: 4949 - protein, 134 aa, Homo sapiens
  MOD_RES (7)..(7): Selenocysteine
  MOD_RES (76)..(76): Selenocysteine
  MOD_RES (114)..(114): Selenocysteine
MDAVDAXMEKLRAQCLSRGASGIQGLARFFRQLDRDGSRSLDADEFRQGLAKLGLVLDQAEAEGVCRKWDRNGSGXLDLEEFLRALRPPMSQAREAVIAAAFAKLDRSGDGVVXVDDLRGVYSGRAHPKVRSGE

SEQ ID NO: 4950 - protein, 189 aa, Homo sapiens
  MOD_RES (7)..(7): Selenocysteine
  MOD_RES (76)..(76): Selenocysteine
  MOD_RES (114)..(114): Selenocysteine
  MOD_RES (136)..(136): Selenocysteine
  MOD_RES (158)..(158): Selenocysteine
  MOD_RES (175)..(175): Selenocysteine
  MOD_RES (184)..(184): Selenocysteine
MDAVDAXMEKLRAQCLSRGASGIQGLARFFRQLDRDGSRSLDADEFRQGLAKLGLVLDQAEAEGVCRKWDRNGSGXLDLEEFLRALRPPMSQAREAVIAAAFAKLDRSGDGVVXVDDLRGVYSGRAHPKVRSGEWXEDEVLRRFLDNFDSSEKDGQVXLAEFQDYYSGVSASMNXDEEFVAMMXSAWQL

SEQ ID NO: 4951 - protein, 162 aa, Homo sapiens
  MOD_RES (7)..(7): Selenocysteine
  MOD_RES (76)..(76): Selenocysteine
  MOD_RES (114)..(114): Selenocysteine
  MOD_RES (131)..(131): Selenocysteine
  MOD_RES (148)..(148): Selenocysteine
  MOD_RES (157)..(157): Selenocysteine
MDAVDAXMEKLRAQCLSRGASGIQGLARFFRQLDRDGSRSLDADEFRQGLAKLGLVLDQAEAEGVCRKWDRNGSGXLDLEEFLRALRPPMSQAREAVIAAAFAKLDRSGDGVVXVDDLRGVYSGRAHPKVXLAEFQDYYSGVSASMNXDEEFVAMMXSAWQL

SEQ ID NO: 4952 - protein, 275 aa, Homo sapiens
  MOD_RES (37)..(37): Selenocysteine
  MOD_RES (56)..(56): Selenocysteine
  MOD_RES (61)..(62): Selenocysteine
  MOD_RES (65)..(65): Selenocysteine
  MOD_RES (72)..(72): Selenocysteine
  MOD_RES (76)..(76): Selenocysteine
  MOD_RES (93)..(93): Selenocysteine
  MOD_RES (162)..(162): Selenocysteine
  MOD_RES (200)..(200): Selenocysteine
  MOD_RES (222)..(222): Selenocysteine
  MOD_RES (244)..(244): Selenocysteine
  MOD_RES (261)..(261): Selenocysteine
  MOD_RES (270)..(270): Selenocysteine
MQCHRDLALSQALWGWQLSKQSGWAHPSLPHSPLPSXVHSCSWAPPHLQRHLPLAXVSPGXXQLXQGPAGRXLGQXQASCPEPRPSMDAVDAXMEKLRAQCLSRGASGIQGLARFFRQLDRDGSRSLDADEFRQGLAKLGLVLDQAEAEGVCRKWDRNGSGXLDLEEFLRALRPPMSQAREAVIAAAFAKLDRSGDGVVXVDDLRGVYSGRAHPKVRSGEWXEDEVLRRFLDNFDSSEKDGQVXLAEFQDYYSGVSASMNXDEEFVAMMXSAWQL

SEQ ID NO: 4953 - protein, 248 aa, Homo sapiens
  MOD_RES (37)..(37): Selenocysteine
  MOD_RES (56)..(56): Selenocysteine
  MOD_RES (61)..(62): Selenocysteine
  MOD_RES (65)..(65): Selenocysteine
  MOD_RES (72)..(72): Selenocysteine
  MOD_RES (76)..(76): Selenocysteine
  MOD_RES (93)..(93): Selenocysteine
  MOD_RES (162)..(162): Selenocysteine
  MOD_RES (200)..(200): Selenocysteine
  MOD_RES (217)..(217): Selenocysteine
  MOD_RES (234)..(234): Selenocysteine
  MOD_RES (243)..(243): Selenocysteine
MQCHRDLALSQALWGWQLSKQSGWAHPSLPHSPLPSXVHSCSWAPPHLQRHLPLAXVSPGXXQLXQGPAGRXLGQXQASCPEPRPSMDAVDAXMEKLRAQCLSRGASGIQGLARFFRQLDRDGSRSLDADEFRQGLAKLGLVLDQAEAEGVCRKWDRNGSGXLDLEEFLRALRPPMSQAREAVIAAAFAKLDRSGDGVVXVDDLRGVYSGRAHPKVXLAEFQDYYSGVSASMNXDEEFVAMMXSAWQL

SEQ ID NO: 4954 - protein, 301 aa, Homo sapiens
  MOD_RES (21)..(21): Selenocysteine
  MOD_RES (193)..(193): Selenocysteine
  MOD_RES (199)..(199): Selenocysteine
  MOD_RES (201)..(201): Selenocysteine
  MOD_RES (208)..(208): Selenocysteine
  MOD_RES (215)..(215): Selenocysteine
  MOD_RES (223)..(223): Selenocysteine
  MOD_RES (231)..(231): Selenocysteine
  MOD_RES (256)..(256): Selenocysteine
  MOD_RES (265)..(265): Selenocysteine
  MOD_RES (277)..(277): Selenocysteine
MHPSRRSLPFPLNCQLARVGXADYGSPSDQSDQQLDCALDLMRRLPPQQIEKNLSDLIDLVPSLCEDLLSSVDQPLKIARDKVVGKDYLLCDYNRDGDSYRSPWSNKYDPPLEDGAMPSARLRKLEVEANNAFDQYRDLYFEGGVSSVYLWDLDHGFAGVILIKKAGDGSKKIKGCWDSIHVVEVQEKSSGRXAHYKLXSXVMLWLQXNKSGSGXMNLGGSLXRQMEKDEXVSDCSPHIANIGRLVEDMENKIRSXLNEIYFGKXKDIVNGLRSVQXFADKSKQEALKNDLVEALKRKQQC

SEQ ID NO: 4955 - protein, 260 aa, Homo sapiens
  MOD_RES (8)..(8): Selenocysteine
  MOD_RES (190)..(190): Selenocysteine
  MOD_RES (196)..(196): Selenocysteine
  MOD_RES (198)..(198): Selenocysteine
  MOD_RES (205)..(205): Selenocysteine
  MOD_RES (212)..(212): Selenocysteine
  MOD_RES (220)..(220): Selenocysteine
  MOD_RES (228)..(228): Selenocysteine
  MOD_RES (255)..(255): Selenocysteine
MPRQFQDXGFSRPGLGQPRRCDPEPRKSDQQLDCALDLMRRLPPQQIEKNLSDLIDLVPSLCEDLLSSVDQPLKIARDKVVGKDYLLCDYNRDGDSYRSPWSNKYDPPLEDGAMPSARLRKLEVEANNAFDQYRDLYFEGGVSSVYLWDLDHGFAGVILIKKAGDGSKKIKGCWDSIHVVEVQEKSSGRXAHYKLXSXVMLWLQXNKSGSGXMNLGGSLXRQMEKDEXVSDCSPHIANIGRLVEVCADFCRQIKXRSSEE

SEQ ID NO: 4956 - protein, 260 aa, Homo sapiens
  MOD_RES (152)..(152): Selenocysteine
  MOD_RES (158)..(158): Selenocysteine
  MOD_RES (160)..(160): Selenocysteine
  MOD_RES (167)..(167): Selenocysteine
  MOD_RES (174)..(174): Selenocysteine
  MOD_RES (182)..(182): Selenocysteine
  MOD_RES (190)..(190): Selenocysteine
  MOD_RES (215)..(215): Selenocysteine
  MOD_RES (224)..(224): Selenocysteine
  MOD_RES (236)..(236): Selenocysteine
MRRLPPQQIEKNLSDLIDLVPSLCEDLLSSVDQPLKIARDKVVGKDYLLCDYNRDGDSYRSPWSNKYDPPLEDGAMPSARLRKLEVEANNAFDQYRDLYFEGGVSSVYLWDLDHGFAGVILIKKAGDGSKKIKGCWDSIHVVEVQEKSSGRXAHYKLXSXVMLWLQXNKSGSGXMNLGGSLXRQMEKDEXVSDCSPHIANIGRLVEDMENKIRSXLNEIYFGKXKDIVNGLRSVQXFADKSKQEALKNDLVEALKRKQQC

SEQ ID NO: 4957 - protein, 277 aa, Homo sapiens
  MOD_RES (164)..(164): Selenocysteine
  MOD_RES (170)..(170): Selenocysteine
  MOD_RES (172)..(172): Selenocysteine
  MOD_RES (179)..(179): Selenocysteine
  MOD_RES (186)..(186): Selenocysteine
  MOD_RES (194)..(194): Selenocysteine
  MOD_RES (202)..(202): Selenocysteine
  MOD_RES (227)..(227): Selenocysteine
  MOD_RES (236)..(236): Selenocysteine
  MOD_RES (267)..(267): Selenocysteine
MSDQQLDCALDLMRRLPPQQIEKNLSDLIDLVPSLCEDLLSSVDQPLKIARDKVVGKDYLLCDYNRDGDSYRSPWSNKYDPPLEDGAMPSARLRKLEVEANNAFDQYRDLYFEGGVSSVYLWDLDHGFAGVILIKKAGDGSKKIKGCWDSIHVVEVQEKSSGRXAHYKLXSXVMLWLQXNKSGSGXMNLGGSLXRQMEKDEXVSDCSPHIANIGRLVEDMENKIRSXLNEIYFGKXKDIVNGLRSIDAIPDNQKFKQLQRELSQVLXQRQIYIQPDN

SEQ ID NO: 4958 - protein, 272 aa, Homo sapiens
  MOD_RES (164)..(164): Selenocysteine
  MOD_RES (170)..(170): Selenocysteine
  MOD_RES (172)..(172): Selenocysteine
  MOD_RES (179)..(179): Selenocysteine
  MOD_RES (186)..(186): Selenocysteine
  MOD_RES (194)..(194): Selenocysteine
  MOD_RES (202)..(202): Selenocysteine
  MOD_RES (227)..(227): Selenocysteine
  MOD_RES (236)..(236): Selenocysteine
  MOD_RES (248)..(248): Selenocysteine
MSDQQLDCALDLMRRLPPQQIEKNLSDLIDLVPSLCEDLLSSVDQPLKIARDKVVGKDYLLCDYNRDGDSYRSPWSNKYDPPLEDGAMPSARLRKLEVEANNAFDQYRDLYFEGGVSSVYLWDLDHGFAGVILIKKAGDGSKKIKGCWDSIHVVEVQEKSSGRXAHYKLXSXVMLWLQXNKSGSGXMNLGGSLXRQMEKDEXVSDCSPHIANIGRLVEDMENKIRSXLNEIYFGKXKDIVNGLRSVQXFADKSKQEALKNDLVEALKRKQQC

SEQ ID NO: 4959 - protein, 480 aa, Homo sapiens
  MOD_RES (10)..(10): Selenocysteine
  MOD_RES (24)..(24): Selenocysteine
  MOD_RES (76)..(77): Selenocysteine
  MOD_RES (79)..(79): Selenocysteine
  MOD_RES (84)..(84): Selenocysteine
  MOD_RES (99)..(99): Selenocysteine
  MOD_RES (117)..(117): Selenocysteine
  MOD_RES (133)..(133): Selenocysteine
  MOD_RES (151)..(151): Selenocysteine
  MOD_RES (195)..(195): Selenocysteine
  MOD_RES (199)..(199): Selenocysteine
  MOD_RES (311)..(311): Selenocysteine
  MOD_RES (319)..(319): Selenocysteine
  MOD_RES (355)..(355): Selenocysteine
  MOD_RES (389)..(389): Selenocysteine
  MOD_RES (395)..(395): Selenocysteine
  MOD_RES (403)..(403): Selenocysteine
MEDLRLKHRXLQKDCDLYKHRMAXVLAQLEEIEKERDQAIQSRDRIQLQYSQSLIEKDQYRKQVRGLEAERDELLXXLXSLEGXKALLEVQLQRAQGGXCLKACASSHSLCSNLSSXWSLSEFPSPLGGPEAXGEAAVMGGPEPHNSEEAXDSEKEINRLSILPFPPSAGSILRRQREEDPAPPKRSFSSMSDIXGSVXLKPWSPGLSSSSSSDSVWPLGKPEGLLARGCGLDFLNRSLAIRVSGRSPPGGPEPQDKGPDGLSFYGDRWSGAVVRRVLSGPGSARMEPREQRVEAAGLEGACLEAEAQQRXLLWNQGSXLPSLMDSKACQSFHEALEAWAKGPGAEPFYIRANLXLPERADPHALCVKAQEILRLVDSAYKRRQEWFCXRVDPLXLRDLDRGXVPNYQRAQQLLEVQEKCLPSSRHRGPRSNLKKRALDQLRLVRPKPVGAPAGDSPDQLLLEPCAEPERSLRPYSLVRP

SEQ ID NO: 4960 - protein, 746 aa, Homo sapiens
  MOD_RES (83)..(83): Selenocysteine
  MOD_RES (97)..(97): Selenocysteine
  MOD_RES (149)..(150): Selenocysteine
  MOD_RES (152)..(152): Selenocysteine
  MOD_RES (157)..(157): Selenocysteine
  MOD_RES (172)..(172): Selenocysteine
  MOD_RES (190)..(190): Selenocysteine
  MOD_RES (206)..(206): Selenocysteine
  MOD_RES (224)..(224): Selenocysteine
  MOD_RES (268)..(268): Selenocysteine
  MOD_RES (272)..(272): Selenocysteine
  MOD_RES (384)..(384): Selenocysteine
  MOD_RES (392)..(392): Selenocysteine
  MOD_RES (428)..(428): Selenocysteine
  MOD_RES (462)..(462): Selenocysteine
  MOD_RES (468)..(468): Selenocysteine
  MOD_RES (476)..(476): Selenocysteine
  MOD_RES (615)..(615): Selenocysteine
  MOD_RES (661)..(661): Selenocysteine
MGVGVGLGNGLRLLPWMEASRPGAPGSERILLDILEHDWREAQDSRQELCQKLHAVQGELQWAEELRDQYLQEMEDLRLKHRXLQKDCDLYKHRMAXVLAQLEEIEKERDQAIQSRDRIQLQYSQSLIEKDQYRKQVRGLEAERDELLXXLXSLEGXKALLEVQLQRAQGGXCLKACASSHSLCSNLSSXWSLSEFPSPLGGPEAXGEAAVMGGPEPHNSEEAXDSEKEINRLSILPFPPSAGSILRRQREEDPAPPKRSFSSMSDIXGSVXLKPWSPGLSSSSSSDSVWPLGKPEGLLARGCGLDFLNRSLAIRVSGRSPPGGPEPQDKGPDGLSFYGDRWSGAVVRRVLSGPGSARMEPREQRVEAAGLEGACLEAEAQQRXLLWNQGSXLPSLMDSKACQSFHEALEAWAKGPGAEPFYIRANLXLPERADPHALCVKAQEILRLVDSAYKRRQEWFCXRVDPLXLRDLDRGXVPNYQRAQQLLEVQEKCLPSSRHRGPRSNLKKRALDQLRLVRPKPVGAPAGDSPDQLLLEPCAEPERSLRPYSLVRPLLVSALRPVVLLPECLAPRLIRNLLDLPSSRLDFQVCPAESLSGEELCPSSAPGAPKAQPAXPGLGSRIRAIQESVGKKHCLLELGARGVRELVQNEIYPIVIHVEVXEKNVREVRGLLGRPGWRDSELLRQCRGSEQVLWGLPCSWVQVPAHEWGHAEELAKVVRGRILQEQARLVWVECGSSRGCPSSSEA

SEQ ID NO: 4961 - protein, 1032 aa, Homo sapiens
  MOD_RES (48)..(48): Selenocysteine
  MOD_RES (68)..(68): Selenocysteine
  MOD_RES (78)..(78): Selenocysteine
  MOD_RES (109)..(109): Selenocysteine
  MOD_RES (112)..(112): Selenocysteine
  MOD_RES (133)..(133): Selenocysteine
  MOD_RES (138)..(138): Selenocysteine
  MOD_RES (291)..(291): Selenocysteine
  MOD_RES (369)..(369): Selenocysteine
  MOD_RES (383)..(383): Selenocysteine
  MOD_RES (435)..(436): Selenocysteine
  MOD_RES (438)..(438): Selenocysteine
  MOD_RES (443)..(443): Selenocysteine
  MOD_RES (458)..(458): Selenocysteine
  MOD_RES (476)..(476): Selenocysteine
  MOD_RES (492)..(492): Selenocysteine
  MOD_RES (510)..(510): Selenocysteine
  MOD_RES (554)..(554): Selenocysteine
  MOD_RES (558)..(558): Selenocysteine
  MOD_RES (670)..(670): Selenocysteine
  MOD_RES (678)..(678): Selenocysteine
  MOD_RES (714)..(714): Selenocysteine
  MOD_RES (748)..(748): Selenocysteine
  MOD_RES (754)..(754): Selenocysteine
  MOD_RES (762)..(762): Selenocysteine
  MOD_RES (901)..(901): Selenocysteine
  MOD_RES (947)..(947): Selenocysteine
MPGRAEAGEAEEEAGAGSGSEAEEDALWERIEGVRHRLARALNPAKLXPYLRQCRVIDEQDEEEVLSXYRFPCRVNRXGRLMDILRCRGKRGYEAFLEALEFYYPEHFXLLXGQEPAQRCSMILDEEGPEGLXQFLMXEVRRLREARKSQLQREQQLQARGRVLEEERAGLEQRLRDQQQAQERCQRLREDWEAGSLELLRLKDENYMIAMRLAQLSEEKNSAVLRSRDLQLAVDQLKLKVSRLEEECALLRRARGPPPGAEEKEKEKEKEKEPDNVDLVSELRAENQRLXASLRELQEGLQQEASRPGAPGSERILLDILEHDWREAQDSRQELCQKLHAVQGELQWAEELRDQYLQEMEDLRLKHRXLQKDCDLYKHRMAXVLAQLEEIEKERDQAIQSRDRIQLQYSQSLIEKDQYRKQVRGLEAERDELLXXLXSLEGXKALLEVQLQRAQGGXCLKACASSHSLCSNLSSXWSLSEFPSPLGGPEAXGEAAVMGGPEPHNSEEAXDSEKEINRLSILPFPPSAGSILRRQREEDPAPPKRSFSSMSDIXGSVXLKPWSPGLSSSSSSDSVWPLGKPEGLLARGCGLDFLNRSLAIRVSGRSPPGGPEPQDKGPDGLSFYGDRWSGAVVRRVLSGPGSARMEPREQRVEAAGLEGACLEAEAQQRXLLWNQGSXLPSLMDSKACQSFHEALEAWAKGPGAEPFYIRANLXLPERADPHALCVKAQEILRLVDSAYKRRQEWFCXRVDPLXLRDLDRGXVPNYQRAQQLLEVQEKCLPSSRHRGPRSNLKKRALDQLRLVRPKPVGAPAGDSPDQLLLEPCAEPERSLRPYSLVRPLLVSALRPVVLLPECLAPRLIRNLLDLPSSRLDFQVCPAESLSGEELCPSSAPGAPKAQPAXPGLGSRIRAIQESVGKKHCLLELGARGVRELVQNEIYPIVIHVEVXEKNVREVRGLLGRPGWRDSELLRQCRGSEQVLWGLPCSWVQVPAHEWGHAEELAKVVRGRILQEQARLVWVECGSSRGCPSSSEA

SEQ ID NO: 4962 - protein, 193 aa, Homo sapiens
  MOD_RES (1)..(1): Selenocysteine
  MOD_RES (14)..(14): Selenocysteine
  MOD_RES (26)..(26): Selenocysteine
  MOD_RES (30)..(30): Selenocysteine
  MOD_RES (142)..(142): Selenocysteine
  MOD_RES (150)..(150): Selenocysteine
  MOD_RES (186)..(186): Selenocysteine
XSLYCPQMAGALEXQVLSFSSMSDIXGSVXLKPWSPGLSSSSSSDSVWPLGKPEGLLARGCGLDFLNRSLAIRVSGRSPPGGPEPQDKGPDGLSFYGDRWSGAVVRRVLSGPGSARMEPREQRVEAAGLEGACLEAEAQQRXLLWNQGSXLPSLMDSKACQSFHEALEAWAKGPGAEPFYIRANLXLPERADP

SEQ ID NO: 4963 - protein, 272 aa, Homo sapiens
  MOD_RES (4)..(4): Selenocysteine
  MOD_RES (17)..(17): Selenocysteine
  MOD_RES (21)..(21): Selenocysteine
  MOD_RES (35)..(35): Selenocysteine
  MOD_RES (57)..(57): Selenocysteine
  MOD_RES (125)..(125): Selenocysteine
  MOD_RES (140)..(141): Selenocysteine
  MOD_RES (148)..(148): Selenocysteine
  MOD_RES (152)..(152): Selenocysteine
  MOD_RES (201)..(201): Selenocysteine
  MOD_RES (203)..(203): Selenocysteine
  MOD_RES (210)..(210): Selenocysteine
  MOD_RES (219)..(219): Selenocysteine
  MOD_RES (242)..(242): Selenocysteine
  MOD_RES (263)..(263): Selenocysteine
EEGXDASPSSCGSLPIXNSFXKMPPRSRSSIMSIXAEPPGNDSIVRRYKEDAPHRSXVEEDNDSGGFDALDLDDDSHERYSFGPSSIHSSSSSHQSEGLDAYDLEQVNLMFRKFSLERPFRPSVXSVGHVRGPGPSVQHXXLNGDSLXSQLXLLGGNARGSFVHSVKPGSLAEKAGLREGHQLLLLEGCIRGERQSVPLDXCXKEEAHWXIQRCSGPVXLHYKVNHEGYRKLVKDMEDGLIXSGDSFYIRLNLNISSQLDACXMSLKCDDVV

SEQ ID NO: 4964 - protein, 73 aa, Homo sapiens
  MOD_RES (14)..(14): Selenocysteine
  MOD_RES (43)..(43): Selenocysteine
MPGGGPEMDDYMEXLKDEEDALWENVECNRHMLSRYINPAKLXPYLRQCKVIDEQDEDEVLNAPMLPSKINRA

SEQ ID NO: 4965 - protein, 1154 aa, Homo sapiens
  MOD_RES (14)..(14): Selenocysteine
  MOD_RES (43)..(43): Selenocysteine
  MOD_RES (82)..(82): Selenocysteine
  MOD_RES (107)..(107): Selenocysteine
  MOD_RES (112)..(112): Selenocysteine
  MOD_RES (117)..(117): Selenocysteine
  MOD_RES (128)..(128): Selenocysteine
  MOD_RES (167)..(167): Selenocysteine
  MOD_RES (169)..(169): Selenocysteine
  MOD_RES (175)..(175): Selenocysteine
  MOD_RES (278)..(278): Selenocysteine
  MOD_RES (353)..(353): Selenocysteine
  MOD_RES (367)..(367): Selenocysteine
  MOD_RES (391)..(391): Selenocysteine
  MOD_RES (456)..(456): Selenocysteine
  MOD_RES (469)..(469): Selenocysteine
  MOD_RES (479)..(479): Selenocysteine
  MOD_RES (519)..(519): Selenocysteine
  MOD_RES (532)..(532): Selenocysteine
  MOD_RES (545)..(545): Selenocysteine
  MOD_RES (549)..(549): Selenocysteine
  MOD_RES (564)..(564): Selenocysteine
  MOD_RES (586)..(586): Selenocysteine
  MOD_RES (654)..(654): Selenocysteine
  MOD_RES (669)..(670): Selenocysteine
  MOD_RES (677)..(677): Selenocysteine
  MOD_RES (681)..(681): Selenocysteine
  MOD_RES (730)..(730): Selenocysteine
  MOD_RES (732)..(732): Selenocysteine
  MOD_RES (739)..(739): Selenocysteine
  MOD_RES (748)..(748): Selenocysteine
  MOD_RES (771)..(771): Selenocysteine
  MOD_RES (792)..(792): Selenocysteine
  MOD_RES (806)..(806): Selenocysteine
  MOD_RES (823)..(823): Selenocysteine
  MOD_RES (831)..(831): Selenocysteine
  MOD_RES (861)..(861): Selenocysteine
  MOD_RES (864)..(864): Selenocysteine
  MOD_RES (871)..(871): Selenocysteine
  MOD_RES (880)..(880): Selenocysteine
  MOD_RES (938)..(938): Selenocysteine
  MOD_RES (942)..(942): Selenocysteine
  MOD_RES (980)..(980): Selenocysteine
  MOD_RES (982)..(982): Selenocysteine
  MOD_RES (987)..(987): Selenocysteine
  MOD_RES (1002)..(1002): Selenocysteine
  MOD_RES (1010)..(1010): Selenocysteine
  MOD_RES (1020)..(1020): Selenocysteine
  MOD_RES (1022)..(1022): Selenocysteine
  MOD_RES (1061)..(1061): Selenocysteine
  MOD_RES (1095)..(1095): Selenocysteine
  MOD_RES (1119)..(1119): Selenocysteine
  MOD_RES (1146)..(1146): Selenocysteine
MPGGGPEMDDYMEXLKDEEDALWENVECNRHMLSRYINPAKLXPYLRQCKVIDEQDEDEVLNAPMLPSKINRAGRLLDILHXKGQRGYVVFLESLEFYYPELYKLVXGKEPXRRFSXIVVEEGHEGLXHFLMNEVIKLQQQMKAKDLQRCELLARLRQLEDEKKQMXLXRVELLXFQERYYKMKEERDSYNDELVKVKDDNYNLAMRYAQLSEEKNMAVMRSRDLQLEIDQLKHRLNKMEEECKLERNQSLKLKNDIENRPKKEQVLELERENEMLKXKNQELQSIIQAGKRSLPDSDKAILDILEHDRKEALEDRQELVNRIYNLQEEARQAEELRDKYLEEKEDLELKCSXLGKDCEMYKHRMNXVMLQLEEVERERDQAFHSRDEAQXQYSQCLIEKDKYRKQIRELEEKNDEMRIEMVRREACIVNLESKLRRLSKDSNNLDQSLPRNLPVXIISQDFGDASPRXNGQEADDSSXSEESPEDSKYFLPYHPPQRRMNLKGIQLQRAKSPISLKRXSDFQAKGHEEEGXDASPSSCGSLPIXNSFXKMQPPRSRSSIMSIXAEPPGNDSIVRRYKEDAPHRSXVEEDNDSGGFDALDLDDDSHERYSFGPSSIHSSSSSHQSEGLDAYDLEQVNLMFRKFSLERPFRPSVXSVGHVRGPGPSVQHXXLNGDSLXSQLXLLGGNARGSFVHSVKPGSLAEKAGLREGHQLLLLEGCIRGERQSVPLDXCXKEEAHWXIQRCSGPVXLHYKVNHEGYRKLVKDMEDGLIXSGDSFYIRLNLNISSQLDACXMSLKCDDVVHVRDXMYQDRHEWLCARVDPFXDHDLDMGXIPSYSRAQQLLLVKLQRLMHRGSREEVDGXHHXLRALRNXLQPEEALSXSDPRVSPRLSRASFLFGQLLQFVSRSENKYKRMNSNERVRIISGSPLGSLARSSLDAXKLLXEKQEELDPESELGKNLSLIPYSLVRAFYCERRRPVLFXPXVLAKXLVQRLLNSGGAMEFXICKSDIVXRDEFLRRQKXEXIIYSREKNPNAFECIAPANIEAVAAKNKHCLLEAGIGCXRDLIKSNIYPIVLFIRVCEKNIKRFRKLLPRPEXEEEFLRVCRLKEKELEALPCLYAXVEPDMWGSVEELLRVVKDKIGEEQRKXIWVDEDQL

SEQ ID NO: 4966 - protein, 44 aa, Homo sapiens
  MOD_RES (12)..(12): Selenocysteine
  MOD_RES (18)..(18): Selenocysteine
  MOD_RES (40)..(40): Selenocysteine
MGELCRRDSALXALDEEXLWEMMESHRHRIVRCICPSRLXPYLR

SEQ ID NO: 4967 - protein, 70 aa, Homo sapiens
  MOD_RES (12)..(12): Selenocysteine
  MOD_RES (18)..(18): Selenocysteine
  MOD_RES (40)..(40): Selenocysteine
  MOD_RES (64)..(64): Selenocysteine
MGELCRRDSALXALDEEXLWEMMESHRHRIVRCICPSRLXPYLRQAKVLCQLDEEEVLHSPRLXNSAMRA

SEQ ID NO: 4968 - protein, 493 aa, Homo sapiens
  MOD_RES (12)..(12): Selenocysteine
  MOD_RES (18)..(18): Selenocysteine
  MOD_RES (40)..(40): Selenocysteine
  MOD_RES (64)..(64): Selenocysteine
  MOD_RES (79)..(79): Selenocysteine
  MOD_RES (101)..(101): Selenocysteine
  MOD_RES (104)..(104): Selenocysteine
  MOD_RES (121)..(121): Selenocysteine
  MOD_RES (125)..(125): Selenocysteine
  MOD_RES (165)..(165): Selenocysteine
  MOD_RES (253)..(253): Selenocysteine
  MOD_RES (278)..(278): Selenocysteine
  MOD_RES (379)..(379): Selenocysteine
  MOD_RES (403)..(403): Selenocysteine
  MOD_RES (473)..(473): Selenocysteine
MGELCRRDSALXALDEEXLWEMMESHRHRIVRCICPSRLXPYLRQAKVLCQLDEEEVLHSPRLXNSAMRAGHLLDLLKXRGKNGAIAFLESLKFHNPDVYXLVXGLQPDVDFSNFSGLMEXSKLXECLAGAIGSLQEELNQEKGQKEVLLRRCQQLQEHLGLAEXRAEGLHQLEADHSRMKREVSAHFHEVLRLKDEMLSLSLHYSNALQEKELAASRCRSLQEELYLLKQELQRANMVSSCELELQEQSLRXASDQESGDEELNRLKEENEKLRSLXFSLAEKDILEQSLDEARGSRQELVERIHSLRERAVAAERQREQGEGECAAGPGVRAAEGARPGVLREGQCSEGDFPEPGGEGLPPQAGVRADGPGLRAAHXASPAAGRASGCAQAGSQDQGALSXGEAAAGADACHLPQRRQRLQPRQLHRVSALVGPECHVQPRAGGQLPLQQPRAPQPAVPVQAGGRGLRGRXLVFQQLPGDPGGRPGSPAGS

SEQ ID NO: 4969 - protein, 740 aa, Homo sapiens
  MOD_RES (12)..(12): Selenocysteine
  MOD_RES (18)..(18): Selenocysteine
  MOD_RES (40)..(40): Selenocysteine
  MOD_RES (64)..(64): Selenocysteine
  MOD_RES (79)..(79): Selenocysteine
  MOD_RES (101)..(101): Selenocysteine
  MOD_RES (104)..(104): Selenocysteine
  MOD_RES (121)..(121): Selenocysteine
  MOD_RES (125)..(125): Selenocysteine
  MOD_RES (165)..(165): Selenocysteine
  MOD_RES (253)..(253): Selenocysteine
  MOD_RES (278)..(278): Selenocysteine
  MOD_RES (329)..(329): Selenocysteine
  MOD_RES (393)..(393): Selenocysteine
  MOD_RES (401)..(401): Selenocysteine
  MOD_RES (420)..(420): Selenocysteine
  MOD_RES (451)..(451): Selenocysteine
  MOD_RES (462)..(462): Selenocysteine
  MOD_RES (530)..(530): Selenocysteine
  MOD_RES (570)..(570): Selenocysteine
  MOD_RES (591)..(591): Selenocysteine
  MOD_RES (599)..(599): Selenocysteine
  MOD_RES (613)..(613): Selenocysteine
  MOD_RES (634)..(635): Selenocysteine
  MOD_RES (658)..(658): Selenocysteine
  MOD_RES (674)..(674): Selenocysteine
  MOD_RES (706)..(706): Selenocysteine
  MOD_RES (708)..(708): Selenocysteine
  MOD_RES (725)..(725): Selenocysteine
  MOD_RES (729)..(729): Selenocysteine
  MOD_RES (734)..(734): Selenocysteine
MGELCRRDSALXALDEEXLWEMMESHRHRIVRCICPSRLXPYLRQAKVLCQLDEEEVLHSPRLXNSAMRAGHLLDLLKXRGKNGAIAFLESLKFHNPDVYXLVXGLQPDVDFSNFSGLMEXSKLXECLAGAIGSLQEELNQEKGQKEVLLRRCQQLQEHLGLAEXRAEGLHQLEADHSRMKREVSAHFHEVLRLKDEMLSLSLHYSNALQEKELAASRCRSLQEELYLLKQELQRANMVSSCELELQEQSLRXASDQESGDEELNRLKEENEKLRSLXFSLAEKDILEQSLDEARGSRQELVERIHSLRERAVAAERQREQYWEEKEQXLLQFQKSKMACQLYREKVNALQAQVCELQKERDQAYSARDSAQREISQSLVEKDSLRRQVFELXDQVCELRXQLRQLQAEPPGVLKQEARXREPCPREKQRLVRMHAICPRDDSDCSLVSSXESQLLSDLSAXSSRELVDSFRSSSPAPPSQQSLYKRVAEDFGEEPWSFSSCLEIPEGDPGALPGAKAGDPHLDYELLDXADLPQLESSLQPVSPGRLDVSESGVLMRRRPARRILSQVXMLAFQGDALLEQISVIGGNLXGIFIHRVXPGSAADQMALRPGXQIVMVDYEASEPLFKAVLEDXXLEEAVGLLRRVDGFCCLSVKVNXDGYKRLLQDLEAKVAXSGDSFYIRVNLAMEGRAKGELQVHCNEVLHVXDXMFQGCGCWHAHRVNSYXMKDXAAHGXIPNYSR

SEQ ID NO: 4970 - protein, 1004 aa, Homo sapiens
  MOD_RES (12)..(12): Selenocysteine
  MOD_RES (18)..(18): Selenocysteine
  MOD_RES (40)..(40): Selenocysteine
  MOD_RES (64)..(64): Selenocysteine
  MOD_RES (79)..(79): Selenocysteine
  MOD_RES (101)..(101): Selenocysteine
  MOD_RES (104)..(104): Selenocysteine
  MOD_RES (121)..(121): Selenocysteine
  MOD_RES (125)..(125): Selenocysteine
  MOD_RES (165)..(165): Selenocysteine
  MOD_RES (253)..(253): Selenocysteine
  MOD_RES (278)..(278): Selenocysteine
  MOD_RES (329)..(329): Selenocysteine
  MOD_RES (393)..(393): Selenocysteine
  MOD_RES (401)..(401): Selenocysteine
  MOD_RES (420)..(420): Selenocysteine
  MOD_RES (451)..(451): Selenocysteine
  MOD_RES (462)..(462): Selenocysteine
  MOD_RES (530)..(530): Selenocysteine
  MOD_RES (570)..(570): Selenocysteine
  MOD_RES (591)..(591): Selenocysteine
  MOD_RES (599)..(599): Selenocysteine
  MOD_RES (613)..(613): Selenocysteine
  MOD_RES (634)..(635): Selenocysteine
  MOD_RES (658)..(658): Selenocysteine
  MOD_RES (674)..(674): Selenocysteine
  MOD_RES (706)..(706): Selenocysteine
  MOD_RES (708)..(708): Selenocysteine
  MOD_RES (725)..(725): Selenocysteine
  MOD_RES (729)..(729): Selenocysteine
  MOD_RES (734)..(734): Selenocysteine
  MOD_RES (753)..(753): Selenocysteine
  MOD_RES (757)..(757): Selenocysteine
  MOD_RES (759)..(759): Selenocysteine
  MOD_RES (803)..(803): Selenocysteine
  MOD_RES (812)..(812): Selenocysteine
  MOD_RES (817)..(817): Selenocysteine
  MOD_RES (887)..(887): Selenocysteine
  MOD_RES (899)..(899): Selenocysteine
  MOD_RES (912)..(912): Selenocysteine
  MOD_RES (944)..(944): Selenocysteine
  MOD_RES (999)..(999): Selenocysteine
MGELCRRDSALXALDEEXLWEMMESHRHRIVRCICPSRLXPYLRQAKVLCQLDEEEVLHSPRLXNSAMRAGHLLDLLKXRGKNGAIAFLESLKFHNPDVYXLVXGLQPDVDFSNFSGLMEXSKLXECLAGAIGSLQEELNQEKGQKEVLLRRCQQLQEHLGLAEXRAEGLHQLEADHSRMKREVSAHFHEVLRLKDEMLSLSLHYSNALQEKELAASRCRSLQEELYLLKQELQRANMVSSCELELQEQSLRXASDQESGDEELNRLKEENEKLRSLXFSLAEKDILEQSLDEARGSRQELVERIHSLRERAVAAERQREQYWEEKEQXLLQFQKSKMACQLYREKVNALQAQVCELQKERDQAYSARDSAQREISQSLVEKDSLRRQVFELXDQVCELRXQLRQLQAEPPGVLKQEARXREPCPREKQRLVRMHAICPRDDSDCSLVSSXESQLLSDLSAXSSRELVDSFRSSSPAPPSQQSLYKRVAEDFGEEPWSFSSCLEIPEGDPGALPGAKAGDPHLDYELLDXADLPQLESSLQPVSPGRLDVSESGVLMRRRPARRILSQVXMLAFQGDALLEQISVIGGNLXGIFIHRVXPGSAADQMALRPGXQIVMVDYEASEPLFKAVLEDXXLEEAVGLLRRVDGFCCLSVKVNXDGYKRLLQDLEAKVAXSGDSFYIRVNLAMEGRAKGELQVHCNEVLHVXDXMFQGCGCWHAHRVNSYXMKDXAAHGXIPNYSRAQQQLIALIQDMXQQCXVXRKPSSGGPQKLVRIVSMDKAKASPLRLSFDRGQLDPSRMEGSSXCFWAESCLXLVPYXLVRPHRPARPRPVLLVPRAVGKILSEKLCLLQGFKKCLAEYLSQEEYEAWSQRGDIIQEGEVSGGRCWVXRHAVESLMEKNXHALLDVQLDSVCXLHRMDIFPIVIHVSVNEKMAKKLKKGLQRLGXSEEQLLEAARQEEGDLDRAPCLYSSLAPDGWSDLDGLLSCVRQAIADEQKKVVWXEQSPR

SEQ ID NO: 4971 - protein, 475 aa, Homo sapiens
  MOD_RES (1)..(1): Any amino acid
  MOD_RES (50)..(50): Selenocysteine
  MOD_RES (75)..(75): Selenocysteine
  MOD_RES (126)..(126): Selenocysteine
  MOD_RES (190)..(190): Selenocysteine
  MOD_RES (198)..(198): Selenocysteine
  MOD_RES (217)..(217): Selenocysteine
  MOD_RES (248)..(248): Selenocysteine
  MOD_RES (259)..(259): Selenocysteine
  MOD_RES (327)..(327): Selenocysteine
  MOD_RES (367)..(367): Selenocysteine
  MOD_RES (388)..(388): Selenocysteine
  MOD_RES (396)..(396): Selenocysteine
  MOD_RES (410)..(410): Selenocysteine
  MOD_RES (422)..(422): Selenocysteine
  MOD_RES (432)..(432): Selenocysteine
  MOD_RES (435)..(435): Selenocysteine
  MOD_RES (439)..(439): Selenocysteine
  MOD_RES (455)..(455): Selenocysteine
  MOD_RES (459)..(459): Selenocysteine
  MOD_RES (462)..(462): Selenocysteine
  MOD_RES (474)..(474): Selenocysteine
XYSNALQEKELAASRCRSLQEELYLLKQELQRANMVSSCELELQEQSLRXASDQESGDEELNRLKEENEKLRSLXFSLAEKDILEQSLDEARGSRQELVERIHSLRERAVAAERQREQYWEEKEQXLLQFQKSKMACQLYREKVNALQAQVCELQKERDQAYSARDSAQREISQSLVEKDSLRRQVFELXDQVCELRXQLRQLQAEPPGVLKQEARXREPCPREKQRLVRMHAICPRDDSDCSLVSSXESQLLSDLSAXSSRELVDSFRSSSPAPPSQQSLYKRVAEDFGEEPWSFSSCLEIPEGDPGALPGAKAGDPHLDYELLDXADLPQLESSLQPVSPGRLDVSESGVLMRRRPARRILSQVXMLAFQGDALLEQISVIGGNLXGIFIHRVXPGSAADQMALRPGXQIVMVIRGYSRXWRPKWRPRGXHSXSGSXWPWRAGPKGSCRCIAXRSCXSPXPCSRAAAAGMPXA

SEQ ID NO: 4972 - protein, 183 aa, Homo sapiens
  MOD_RES (2)..(2): Selenocysteine
  MOD_RES (5)..(5): Selenocysteine
  MOD_RES (14)..(14): Selenocysteine
  MOD_RES (18)..(18): Selenocysteine
  MOD_RES (44)..(44): Selenocysteine
  MOD_RES (107)..(107): Selenocysteine
  MOD_RES (153)..(153): Selenocysteine
MXDQXYCDRLVQDXPFLXGHGRLSEQQVDRIILQLNRYYPQILXNKEAEKFRNPKASLRVRLCDLLSHLQRSGERDCQEFYRALYIHAQPLHSRLPSRHALQNSDCXELDSGSQSGELSNRGPMSFLAGLGLAVGLALLLYCYPPDPKGLPGXRRVLGFSPVIIDRHVSRYLLAFLADDLGGL

SEQ ID NO: 4973 - protein, 228 aa, Homo sapiens
  MOD_RES (2)..(2): Selenocysteine
  MOD_RES (5)..(5): Selenocysteine
  MOD_RES (14)..(14): Selenocysteine
  MOD_RES (18)..(18): Selenocysteine
  MOD_RES (44)..(44): Selenocysteine
  MOD_RES (107)..(107): Selenocysteine
  MOD_RES (132)..(133): Selenocysteine
  MOD_RES (190)..(190): Selenocysteine
  MOD_RES (223)..(223): Selenocysteine
MXDQXYCDRLVQDXPFLXGHGRLSEQQVDRIILQLNRYYPQILXNKEAEKFRNPKASLRVRLCDLLSHLQRSGERDCQEFYRALYIHAQPLHSRLPSRHALRKFHIXNHACLVLARGGHPSLPLMAWMSSMXXQVCCSPGLASPLASAPPQRPPSGPEGRVWQAQAVQMLVSVSHFLPLPPSLSHGSFHXAWGILYVHSCPSFSNLIPRGSLHVCVDSNLVPXAAWRS

SEQ ID NO: 4974 - protein, 39 aa, Homo sapiens
MEKKECPEKSSSSEEELPRRDSGSSRNIDASKLIRLQGS

SEQ ID NO: 4975 - protein, 70 aa, Homo sapiens
  MOD_RES (54)..(54): Selenocysteine
  MOD_RES (56)..(56): Selenocysteine
  MOD_RES (67)..(67): Selenocysteine
  MOD_RES (70)..(70): Selenocysteine
MEKKECPEKSSSSEEELPRRDSGSSRNIDASKLIRLQGSRKLLVDNSIRELQYXKXGIFFQAEACVXNDX

SEQ ID NO: 4976 - protein, 132 aa, Homo sapiens
  MOD_RES (54)..(54): Selenocysteine
  MOD_RES (56)..(56): Selenocysteine
  MOD_RES (67)..(67): Selenocysteine
  MOD_RES (70)..(70): Selenocysteine
  MOD_RES (81)..(81): Selenocysteine
  MOD_RES (95)..(95): Selenocysteine
MEKKECPEKSSSSEEELPRRDSGSSRNIDASKLIRLQGSRKLLVDNSIRELQYXKXGIFFQAEACVXNDXVYRELPCVSEXLCDISHFFQEDDEXEAEPLLFRAVPECQLSGGDIPRRHLLRRESNSFLLCF

SEQ ID NO: 4977 - protein, 138 aa, Homo sapiens
  MOD_RES (54)..(54): Selenocysteine
  MOD_RES (56)..(56): Selenocysteine
  MOD_RES (67)..(67): Selenocysteine
  MOD_RES (70)..(70): Selenocysteine
  MOD_RES (81)..(81): Selenocysteine
  MOD_RES (95)..(95): Selenocysteine
  MOD_RES (136)..(136): Selenocysteine
MEKKECPEKSSSSEEELPRRDSGSSRNIDASKLIRLQGSRKLLVDNSIRELQYXKXGIFFQAEACVXNDXVYRELPCVSEXLCDISHFFQEDDEXEAEPLLFRAVPECQLSGGDIPRYLFFLNLIHVSVSLLVSFXSK

SEQ ID NO: 4978 - protein, 146 aa, Homo sapiens
  MOD_RES (54)..(54): Selenocysteine
  MOD_RES (56)..(56): Selenocysteine
  MOD_RES (67)..(67): Selenocysteine
  MOD_RES (70)..(70): Selenocysteine
  MOD_RES (81)..(81): Selenocysteine
  MOD_RES (95)..(95): Selenocysteine
  MOD_RES (130)..(130): Selenocysteine
MEKKECPEKSSSSEEELPRRDSGSSRNIDASKLIRLQGSRKLLVDNSIRELQYXKXGIFFQAEACVXNDXVYRELPCVSEXLCDISHFFQEDDEXEAEPLLFRAVPECQLSGGDIPSLDPPSLRELSVMXGVFHSLLHSVIAVSDM

SEQ ID NO: 4979 - protein, 392 aa, Homo sapiens
  MOD_RES (54)..(54): Selenocysteine
  MOD_RES (56)..(56): Selenocysteine
  MOD_RES (67)..(67): Selenocysteine
  MOD_RES (70)..(70): Selenocysteine
  MOD_RES (81)..(81): Selenocysteine
  MOD_RES (95)..(95): Selenocysteine
  MOD_RES (177)..(177): Selenocysteine
  MOD_RES (186)..(186): Selenocysteine
  MOD_RES (195)..(195): Selenocysteine
  MOD_RES (206)..(206): Selenocysteine
  MOD_RES (208)..(208): Selenocysteine
  MOD_RES (238)..(238): Selenocysteine
  MOD_RES (309)..(309): Selenocysteine
  MOD_RES (316)..(316): Selenocysteine
  MOD_RES (319)..(319): Selenocysteine
  MOD_RES (344)..(344): Selenocysteine
  MOD_RES (361)..(361): Selenocysteine
MEKKECPEKSSSSEEELPRRDSGSSRNIDASKLIRLQGSRKLLVDNSIRELQYXKXGIFFQAEACVXNDXVYRELPCVSEXLCDISHFFQEDDEXEAEPLLFRAVPECQLSGGDIPSVSEEQESSEGQDSGDICSEENQIVSSYASKVCFEIEEDYKNRQFLGPEGNVDVELIDKSXNRYSVWFPXAGWYLWSAXGLGFLVRDEVXVXIAFGSWSQHLALDLQHHEQWLVGGPLFDVXAEPEEAVAEIHLPHFISLQAGEVDVSWFLVAHFKNEGMVLEHPARVEPFYAVLESPSFSLMGILLRIASGXRLSIPIXSNXLIYYHPHPEDIKFHLYLVPSDALLXKAIDDEEDRFHGVRLQXSPPMEPLNFGSSYIVSNSANLKVMPKWISSL

SEQ ID NO: 4980 - protein, 537 aa, Homo sapiens
  MOD_RES (54)..(54): Selenocysteine
  MOD_RES (56)..(56): Selenocysteine
  MOD_RES (67)..(67): Selenocysteine
  MOD_RES (70)..(70): Selenocysteine
  MOD_RES (81)..(81): Selenocysteine
  MOD_RES (95)..(95): Selenocysteine
  MOD_RES (177)..(177): Selenocysteine
  MOD_RES (186)..(186): Selenocysteine
  MOD_RES (195)..(195): Selenocysteine
  MOD_RES (206)..(206): Selenocysteine
  MOD_RES (208)..(208): Selenocysteine
  MOD_RES (238)..(238): Selenocysteine
  MOD_RES (309)..(309): Selenocysteine
  MOD_RES (316)..(316): Selenocysteine
  MOD_RES (319)..(319): Selenocysteine
  MOD_RES (344)..(344): Selenocysteine
  MOD_RES (361)..(361): Selenocysteine
  MOD_RES (419)..(419): Selenocysteine
  MOD_RES (425)..(425): Selenocysteine
  MOD_RES (430)..(430): Selenocysteine
  MOD_RES (482)..(482): Selenocysteine
  MOD_RES (494)..(494): Selenocysteine
MEKKECPEKSSSSEEELPRRDSGSSRNIDASKLIRLQGSRKLLVDNSIRELQYXKXGIFFQAEACVXNDXVYRELPCVSEXLCDISHFFQEDDEXEAEPLLFRAVPECQLSGGDIPSVSEEQESSEGQDSGDICSEENQIVSSYASKVCFEIEEDYKNRQFLGPEGNVDVELIDKSXNRYSVWFPXAGWYLWSAXGLGFLVRDEVXVXIAFGSWSQHLALDLQHHEQWLVGGPLFDVXAEPEEAVAEIHLPHFISLQAGEVDVSWFLVAHFKNEGMVLEHPARVEPFYAVLESPSFSLMGILLRIASGXRLSIPIXSNXLIYYHPHPEDIKFHLYLVPSDALLXKAIDDEEDRFHGVRLQXSPPMEPLNFGSSYIVSNSANLKVMPKELKLSYRSPGEIQHFSKFYAGQMKEPIQLEIXEKRHGXLVWDXEVKPVDLQLVAASAPPPFSGAAFVKENHRQLQARMGDLKGVLDDLQDNEVLXENEKELVEQEKXRQSKNEALLSMVEKKGDLALDVLFRSISERDPYLVSYLRQQNL

SEQ ID NO: 4981 - protein, 43 aa, Homo sapiens
  MOD_RES (31)..(31): Selenocysteine
MEKKECPEKSSSSEEELPRRVYRELPCVSEXLCDISHFFQEDD

SEQ ID NO: 4982 - protein, 82 aa, Homo sapiens
  MOD_RES (31)..(31): Selenocysteine
  MOD_RES (45)..(45): Selenocysteine
MEKKECPEKSSSSEEELPRRVYRELPCVSEXLCDISHFFQEDDEXEAEPLLFRAVPECQLSGGDIPRRHLLRRESNSFLLCF

SEQ ID NO: 4983 - protein, 132 aa, Homo sapiens
  MOD_RES (31)..(31): Selenocysteine
  MOD_RES (45)..(45): Selenocysteine
  MOD_RES (127)..(127): Selenocysteine
MEKKECPEKSSSSEEELPRRVYRELPCVSEXLCDISHFFQEDDEXEAEPLLFRAVPECQLSGGDIPSVSEEQESSEGQDSGDICSEENQIVSSYASKVCFEIEEDYKNRQFLGPEGNVDVELIDKSXNRYRR

SEQ ID NO: 4984 - protein, 487 aa, Homo sapiens
  MOD_RES (31)..(31): Selenocysteine
  MOD_RES (45)..(45): Selenocysteine
  MOD_RES (127)..(127): Selenocysteine
  MOD_RES (136)..(136): Selenocysteine
  MOD_RES (145)..(145): Selenocysteine
  MOD_RES (156)..(156): Selenocysteine
  MOD_RES (158)..(158): Selenocysteine
  MOD_RES (188)..(188): Selenocysteine
  MOD_RES (259)..(259): Selenocysteine
  MOD_RES (266)..(266): Selenocysteine
  MOD_RES (269)..(269): Selenocysteine
  MOD_RES (294)..(294): Selenocysteine
  MOD_RES (311)..(311): Selenocysteine
  MOD_RES (369)..(369): Selenocysteine
  MOD_RES (375)..(375): Selenocysteine
  MOD_RES (380)..(380): Selenocysteine
  MOD_RES (432)..(432): Selenocysteine
  MOD_RES (444)..(444): Selenocysteine
MEKKECPEKSSSSEEELPRRVYRELPCVSEXLCDISHFFQEDDEXEAEPLLFRAVPECQLSGGDIPSVSEEQESSEGQDSGDICSEENQIVSSYASKVCFEIEEDYKNRQFLGPEGNVDVELIDKSXNRYSVWFPXAGWYLWSAXGLGFLVRDEVXVXIAFGSWSQHLALDLQHHEQWLVGGPLFDVXAEPEEAVAEIHLPHFISLQAGEVDVSWFLVAHFKNEGMVLEHPARVEPFYAVLESPSFSLMGILLRIASGXRLSIPIXSNXLIYYHPHPEDIKFHLYLVPSDALLXKAIDDEEDRFHGVRLQXSPPMEPLNFGSSYIVSNSANLKVMPKELKLSYRSPGEIQHFSKFYAGQMKEPIQLEIXEKRHGXLVWDXEVKPVDLQLVAASAPPPFSGAAFVKENHRQLQARMGDLKGVLDDLQDNEVLXENEKELVEQEKXRQSKNEALLSMVEKKGDLALDVLFRSISERDPYLVSYLRQQNL

SEQ ID NO: 4985 - protein, 283 aa, Homo sapiens
  MOD_RES (2)..(2): Selenocysteine
  MOD_RES (18)..(18): Selenocysteine
  MOD_RES (34)..(34): Selenocysteine
  MOD_RES (54)..(54): Selenocysteine
  MOD_RES (110)..(110): Selenocysteine
  MOD_RES (119)..(119): Selenocysteine
  MOD_RES (128)..(128): Selenocysteine
  MOD_RES (139)..(139): Selenocysteine
  MOD_RES (141)..(141): Selenocysteine
  MOD_RES (171)..(171): Selenocysteine
  MOD_RES (242)..(242): Selenocysteine
  MOD_RES (249)..(249): Selenocysteine
  MOD_RES (252)..(252): Selenocysteine
  MOD_RES (277)..(277): Selenocysteine
MXRNILVPFFVWIQRSEXAYSGHSQLSFDICIPXAPVQFSLQESFRPCLFQPFXSYMSSIFFSGDICSEENQIVSSYASKVCFEIEEDYKNRQFLGPEGNVDVELIDKSXNRYSVWFPXAGWYLWSAXGLGFLVRDEVXVXIAFGSWSQHLALDLQHHEQWLVGGPLFDVXAEPEEAVAEIHLPHFISLQAGEVDVSWFLVAHFKNEGMVLEHPARVEPFYAVLESPSFSLMGILLRIASGXRLSIPIXSNXLIYYHPHPEDIKFHLYLVPSDALLXKVRQSL

SEQ ID NO: 4986 - protein, 70 aa, Homo sapiens
  MOD_RES (1)..(1): Any amino acid
  MOD_RES (13)..(13): Selenocysteine
  MOD_RES (19)..(19): Selenocysteine
  MOD_RES (24)..(24): Selenocysteine
  MOD_RES (58)..(58): Selenocysteine
  MOD_RES (61)..(61): Selenocysteine
XGQMKEPIQLEIXEKRHGXLVWDXEVKPVDLQLVAASAPPPFSGVRMWPGCCPILPRXGCXCLCLNPWLP

SEQ ID NO: 4987 - protein, 24 aa, Homo sapiens
  MOD_RES (1)..(1): Any amino acid
  MOD_RES (20)..(20): Selenocysteine
  MOD_RES (22)..(22): Selenocysteine
XHPEDIKFHLYLVPSDALLXKXLF

SEQ ID NO: 4988 - protein, 366 aa, Homo sapiens
  MOD_RES (20)..(20): Selenocysteine
  MOD_RES (22)..(22): Selenocysteine
  MOD_RES (31)..(31): Selenocysteine
  MOD_RES (71)..(71): Selenocysteine
  MOD_RES (95)..(95): Selenocysteine
  MOD_RES (116)..(116): Selenocysteine
  MOD_RES (121)..(121): Selenocysteine
  MOD_RES (134)..(134): Selenocysteine
  MOD_RES (231)..(231): Selenocysteine
  MOD_RES (300)..(300): Selenocysteine
  MOD_RES (361)..(361): Selenocysteine
MSDYENDDECWSVLEGFRVXLXSVIDPSRIXPYLRQCKVLNPDDEEQVLSDPNLVIRKRKVGVLLDILQRXGHKGYVAFLESLELYYPQLYKKVXGKEPARVFSMIIDASGESGLXQLLMXEVMKLQKKVQDLXALLSSKDDFIKELRVKDSLLRKHQERVQRLKEECEAGSRELKRCKEENYDLAMRLAHQSEEKGAALMRNRDLQLEIDQLKHSLMKAEDDCKVERKHXLKLRHAMEQRPSQELLWELQQEKALLQARVQELEASVQEGKLDRSSPYIQVLEEDWRQALRDHQEQANXIFSLRKDLRQGEARRLRCMEEKEMFELQCLALRKDSKMYKDRIEAILLQMEEVAIERDQSXQMEGL

SEQ ID NO: 4989 - protein, 492 aa, Homo sapiens
  MOD_RES (20)..(20): Selenocysteine
  MOD_RES (22)..(22): Selenocysteine
  MOD_RES (31)..(31): Selenocysteine
  MOD_RES (71)..(71): Selenocysteine
  MOD_RES (95)..(95): Selenocysteine
  MOD_RES (116)..(116): Selenocysteine
  MOD_RES (121)..(121): Selenocysteine
  MOD_RES (134)..(134): Selenocysteine
  MOD_RES (231)..(231): Selenocysteine
  MOD_RES (300)..(300): Selenocysteine
  MOD_RES (363)..(363): Selenocysteine
  MOD_RES (420)..(420): Selenocysteine
  MOD_RES (447)..(447): Selenocysteine
MSDYENDDECWSVLEGFRVXLXSVIDPSRIXPYLRQCKVLNPDDEEQVLSDPNLVIRKRKVGVLLDILQRXGHKGYVAFLESLELYYPQLYKKVXGKEPARVFSMIIDASGESGLXQLLMXEVMKLQKKVQDLXALLSSKDDFIKELRVKDSLLRKHQERVQRLKEECEAGSRELKRCKEENYDLAMRLAHQSEEKGAALMRNRDLQLEIDQLKHSLMKAEDDCKVERKHXLKLRHAMEQRPSQELLWELQQEKALLQARVQELEASVQEGKLDRSSPYIQVLEEDWRQALRDHQEQANXIFSLRKDLRQGEARRLRCMEEKEMFELQCLALRKDSKMYKDRIEAILLQMEEVAIERDQAIAXREELHAQHARGLQEKDALRKQVRELGEKADELQLQVFQCEAQLLAVEGRLRRQQLEXLVLSSDLEDGSPRRSQELSLPQDLEDXQLSDKGCLAGGGSPKQPFAALHQEQVLRNPHDAGPAGLPGIGAVC

SEQ ID NO: 4990 - protein, 536 aa, Homo sapiens
  MOD_RES (20)..(20): Selenocysteine
  MOD_RES (22)..(22): Selenocysteine
  MOD_RES (31)..(31): Selenocysteine
  MOD_RES (71)..(71): Selenocysteine
  MOD_RES (95)..(95): Selenocysteine
  MOD_RES (116)..(116): Selenocysteine
  MOD_RES (121)..(121): Selenocysteine
  MOD_RES (134)..(134): Selenocysteine
  MOD_RES (231)..(231): Selenocysteine
  MOD_RES (300)..(300): Selenocysteine
  MOD_RES (363)..(363): Selenocysteine
  MOD_RES (420)..(420): Selenocysteine
  MOD_RES (447)..(447): Selenocysteine
  MOD_RES (525)..(526): Selenocysteine
  MOD_RES (531)..(531): Selenocysteine
  MOD_RES (533)..(533): Selenocysteine
MSDYENDDECWSVLEGFRVXLXSVIDPSRIXPYLRQCKVLNPDDEEQVLSDPNLVIRKRKVGVLLDILQRXGHKGYVAFLESLELYYPQLYKKVXGKEPARVFSMIIDASGESGLXQLLMXEVMKLQKKVQDLXALLSSKDDFIKELRVKDSLLRKHQERVQRLKEECEAGSRELKRCKEENYDLAMRLAHQSEEKGAALMRNRDLQLEIDQLKHSLMKAEDDCKVERKHXLKLRHAMEQRPSQELLWELQQEKALLQARVQELEASVQEGKLDRSSPYIQVLEEDWRQALRDHQEQANXIFSLRKDLRQGEARRLRCMEEKEMFELQCLALRKDSKMYKDRIEAILLQMEEVAIERDQAIAXREELHAQHARGLQEKDALRKQVRELGEKADELQLQVFQCEAQLLAVEGRLRRQQLEXLVLSSDLEDGSPRRSQELSLPQDLEDXQLSDKGCLAGGGSPKQPFAALHQEQVLRNPHDAGLSSGEPPEKERRRLKESFENYRRKRALRKMQKGWRQGEEDRENXXGSDNXDXEGS

SEQ ID NO: 4991 - protein, 38 aa, Homo sapiens
  MOD_RES (15)..(15): Selenocysteine
  MOD_RES (20)..(21): Selenocysteine
  MOD_RES (38)..(38): Selenocysteine
MDSRDSSFGQNDSPXVLPIXXREANNSLISQNIPGPLX

SEQ ID NO: 4992 - protein, 93 aa, Homo sapiens
  MOD_RES (15)..(15): Selenocysteine
  MOD_RES (20)..(21): Selenocysteine
  MOD_RES (38)..(38): Selenocysteine
  MOD_RES (40)..(40): Selenocysteine
  MOD_RES (42)..(42): Selenocysteine
  MOD_RES (79)..(79): Selenocysteine
  MOD_RES (91)..(91): Selenocysteine
  MOD_RES (93)..(93): Selenocysteine
MDSRDSSFGQNDSPXVLPIXXREANNSLISQNIPGPLXQXQXLSAEQFHLVDQNGQAIQYELQSLGESNAQMMIVASPXENGQVLRVIPPXQX

SEQ ID NO: 4993 - protein, 189 aa, Homo sapiens
  MOD_RES (15)..(15): Selenocysteine
  MOD_RES (20)..(21): Selenocysteine
  MOD_RES (38)..(38): Selenocysteine
  MOD_RES (40)..(40): Selenocysteine
  MOD_RES (42)..(42): Selenocysteine
  MOD_RES (79)..(79): Selenocysteine
  MOD_RES (91)..(91): Selenocysteine
  MOD_RES (93)..(93): Selenocysteine
  MOD_RES (126)..(126): Selenocysteine
  MOD_RES (131)..(131): Selenocysteine
  MOD_RES (136)..(136): Selenocysteine
  MOD_RES (145)..(145): Selenocysteine
  MOD_RES (155)..(155): Selenocysteine
  MOD_RES (173)..(173): Selenocysteine
MDSRDSSFGQNDSPXVLPIXXREANNSLISQNIPGPLXQXQXLSAEQFHLVDQNGQAIQYELQSLGESNAQMMIVASPXENGQVLRVIPPXQXGMAQVIIPQGQLVDVNSPRDVPEEKPSNRNLPXVRVDXLADNXSNYILHPQXSFPLPKKSVXGMLEEPLLGPLQPLSSNXPIWACRLRSCEGVELW

SEQ ID NO: 4994 - protein, 419 aa, Homo sapiens
  MOD_RES (15)..(15): Selenocysteine
  MOD_RES (20)..(21): Selenocysteine
  MOD_RES (38)..(38): Selenocysteine
  MOD_RES (40)..(40): Selenocysteine
  MOD_RES (42)..(42): Selenocysteine
  MOD_RES (79)..(79): Selenocysteine
  MOD_RES (91)..(91): Selenocysteine
  MOD_RES (93)..(93): Selenocysteine
  MOD_RES (126)..(126): Selenocysteine
  MOD_RES (131)..(131): Selenocysteine
  MOD_RES (136)..(136): Selenocysteine
  MOD_RES (145)..(145): Selenocysteine
  MOD_RES (155)..(155): Selenocysteine
  MOD_RES (173)..(173): Selenocysteine
  MOD_RES (198)..(198): Selenocysteine
  MOD_RES (205)..(205): Selenocysteine
  MOD_RES (211)..(211): Selenocysteine
  MOD_RES (217)..(217): Selenocysteine
  MOD_RES (228)..(228): Selenocysteine
  MOD_RES (284)..(284): Selenocysteine
  MOD_RES (304)..(304): Selenocysteine
  MOD_RES (343)..(343): Selenocysteine
  MOD_RES (354)..(354): Selenocysteine
  MOD_RES (358)..(358): Selenocysteine
  MOD_RES (374)..(374): Selenocysteine
MDSRDSSFGQNDSPXVLPIXXREANNSLISQNIPGPLXQXQXLSAEQFHLVDQNGQAIQYELQSLGESNAQMMIVASPXENGQVLRVIPPXQXGMAQVIIPQGQLVDVNSPRDVPEEKPSNRNLPXVRVDXLADNXSNYILHPQXSFPLPKKSVXGMLEEPLLGPLQPLSSNXPIWACRLRSCEKIGDSYRGYCVSEXELESVLXFHKQQXQSVWGXRQSPSPAKPAXRLMWKSQYVPYDGIPFVNAGSRAVVMECQYGPRRKGFQLKKVSEQESRSCQLYKAXCPARIYIKKVQKFPEYRVPXDPKIDKKIIRMEQEKAFNMLKKNLVDAGGVLRWYVQLPXQQAHQYHELEXPCLXLSPSPFPVSSLEEEEXAVRDENCALPSRLHPQVAHKIQELVSQGIEQVYAVRKQLSPSYFI

SEQ ID NO: 4995 - protein, 21 aa, Homo sapiens
  MOD_RES (20)..(20): Selenocysteine
MEQSNDSLRVNHNDGEESKXS

SEQ ID NO: 4996 - protein, 33 aa, Homo sapiens
  MOD_RES (20)..(20): Selenocysteine
  MOD_RES (32)..(32): Selenocysteine
MEQSNDSLRVNHNDGEESKXSAQVFEGFFLWXK

SEQ ID NO: 4997 - protein, 54 aa, Homo sapiens
  MOD_RES (20)..(20): Selenocysteine
  MOD_RES (45)..(45): Selenocysteine
  MOD_RES (50)..(51): Selenocysteine
MEQSNDSLRVNHNDGEESKXSAQVFEHLICMDSRDSSFGQNDSPXVLPIXXREA

SEQ ID NO: 4998 - protein, 73 aa, Homo sapiens
  MOD_RES (20)..(20): Selenocysteine
  MOD_RES (45)..(45): Selenocysteine
  MOD_RES (50)..(51): Selenocysteine
  MOD_RES (68)..(68): Selenocysteine
  MOD_RES (70)..(70): Selenocysteine
  MOD_RES (72)..(72): Selenocysteine
MEQSNDSLRVNHNDGEESKXSAQVFEHLICMDSRDSSFGQNDSPXVLPIXXREANNSLISQNIPGPLXQXQXL

SEQ ID NO: 4999 - protein, 95 aa, Homo sapiens
  MOD_RES (20)..(20): Selenocysteine
  MOD_RES (45)..(45): Selenocysteine
  MOD_RES (50)..(51): Selenocysteine
  MOD_RES (68)..(68): Selenocysteine
  MOD_RES (70)..(70): Selenocysteine
  MOD_RES (72)..(72): Selenocysteine
MEQSNDSLRVNHNDGEESKXSAQVFEHLICMDSRDSSFGQNDSPXVLPIXXREANNSLISQNIPGPLXQXQXLSAEQFHLVDQNGQAIQYELQSL

SEQ ID NO: 5000 - protein, 131 aa, Homo sapiens
  MOD_RES (20)..(20): Selenocysteine
  MOD_RES (45)..(45): Selenocysteine
  MOD_RES (50)..(51): Selenocysteine
  MOD_RES (68)..(68): Selenocysteine
  MOD_RES (70)..(70): Selenocysteine
  MOD_RES (72)..(72): Selenocysteine
  MOD_RES (109)..(109): Selenocysteine
  MOD_RES (121)..(121): Selenocysteine
  MOD_RES (123)..(123): Selenocysteine
MEQSNDSLRVNHNDGEESKXSAQVFEHLICMDSRDSSFGQNDSPXVLPIXXREANNSLISQNIPGPLXQXQXLSAEQFHLVDQNGQAIQYELQSLGESNAQMMIVASPXENGQVLRVIPPXQXGMAQVIIP

SEQ ID NO: 5001 - protein, 309 aa, Homo sapiens
  MOD_RES (20)..(20): Selenocysteine
  MOD_RES (45)..(45): Selenocysteine
  MOD_RES (50)..(51): Selenocysteine
  MOD_RES (68)..(68): Selenocysteine
  MOD_RES (70)..(70): Selenocysteine
  MOD_RES (72)..(72): Selenocysteine
  MOD_RES (109)..(109): Selenocysteine
  MOD_RES (121)..(121): Selenocysteine
  MOD_RES (123)..(123): Selenocysteine
  MOD_RES (156)..(156): Selenocysteine
  MOD_RES (161)..(161): Selenocysteine
  MOD_RES (166)..(166): Selenocysteine
  MOD_RES (175)..(175): Selenocysteine
  MOD_RES (185)..(185): Selenocysteine
  MOD_RES (203)..(203): Selenocysteine
  MOD_RES (228)..(228): Selenocysteine
  MOD_RES (235)..(235): Selenocysteine
  MOD_RES (241)..(241): Selenocysteine
  MOD_RES (247)..(247): Selenocysteine
  MOD_RES (258)..(258): Selenocysteine
  MOD_RES (279)..(279): Selenocysteine
  MOD_RES (305)..(305): Selenocysteine
MEQSNDSLRVNHNDGEESKXSAQVFEHLICMDSRDSSFGQNDSPXVLPIXXREANNSLISQNIPGPLXQXQXLSAEQFHLVDQNGQAIQYELQSLGESNAQMMIVASPXENGQVLRVIPPXQXGMAQVIIPQGQLVDVNSPRDVPEEKPSNRNLPXVRVDXLADNXSNYILHPQXSFPLPKKSVXGMLEEPLLGPLQPLSSNXPIWACRLRSCEKIGDSYRGYCVSEXELESVLXFHKQQXQSVWGXRQSPSPAKPAXRLMWKSQYVPYDGIPFVNAGXFLKNYFKRFSSSHSPLSKCDFPKVIXFLFW

SEQ ID NO: 5002 - protein, 725 aa, Homo sapiens
  MOD_RES (20)..(20): Selenocysteine
  MOD_RES (45)..(45): Selenocysteine
  MOD_RES (50)..(51): Selenocysteine
  MOD_RES (68)..(68): Selenocysteine
  MOD_RES (70)..(70): Selenocysteine
  MOD_RES (72)..(72): Selenocysteine
  MOD_RES (109)..(109): Selenocysteine
  MOD_RES (121)..(121): Selenocysteine
  MOD_RES (123)..(123): Selenocysteine
  MOD_RES (156)..(156): Selenocysteine
  MOD_RES (161)..(161): Selenocysteine
  MOD_RES (166)..(166): Selenocysteine
  MOD_RES (175)..(175): Selenocysteine
  MOD_RES (185)..(185): Selenocysteine
  MOD_RES (203)..(203): Selenocysteine
  MOD_RES (228)..(228): Selenocysteine
  MOD_RES (235)..(235): Selenocysteine
  MOD_RES (241)..(241): Selenocysteine
  MOD_RES (247)..(247): Selenocysteine
  MOD_RES (258)..(258): Selenocysteine
  MOD_RES (314)..(314): Selenocysteine
  MOD_RES (334)..(334): Selenocysteine
  MOD_RES (373)..(373): Selenocysteine
  MOD_RES (384)..(384): Selenocysteine
  MOD_RES (388)..(388): Selenocysteine
  MOD_RES (404)..(404): Selenocysteine
  MOD_RES (468)..(468): Selenocysteine
  MOD_RES (488)..(488): Selenocysteine
  MOD_RES (498)..(498): Selenocysteine
  MOD_RES (502)..(503): Selenocysteine
  MOD_RES (512)..(512): Selenocysteine
  MOD_RES (514)..(514): Selenocysteine
  MOD_RES (516)..(516): Selenocysteine
  MOD_RES (528)..(529): Selenocysteine
  MOD_RES (533)..(533): Selenocysteine
  MOD_RES (536)..(536): Selenocysteine
  MOD_RES (545)..(545): Selenocysteine
  MOD_RES (560)..(560): Selenocysteine
  MOD_RES (572)..(572): Selenocysteine
  MOD_RES (597)..(597): Selenocysteine
  MOD_RES (620)..(620): Selenocysteine
  MOD_RES (623)..(623): Selenocysteine
  MOD_RES (628)..(628): Selenocysteine
  MOD_RES (631)..(631): Selenocysteine
  MOD_RES (657)..(657): Selenocysteine
  MOD_RES (663)..(663): Selenocysteine
  MOD_RES (674)..(674): Selenocysteine
  MOD_RES (694)..(694): Selenocysteine
  MOD_RES (716)..(716): Selenocysteine
  MOD_RES (725)..(725): Selenocysteine
MEQSNDSLRVNHNDGEESKXSAQVFEHLICMDSRDSSFGQNDSPXVLPIXXREANNSLISQNIPGPLXQXQXLSAEQFHLVDQNGQAIQYELQSLGESNAQMMIVASPXENGQVLRVIPPXQXGMAQVIIPQGQLVDVNSPRDVPEEKPSNRNLPXVRVDXLADNXSNYILHPQXSFPLPKKSVXGMLEEPLLGPLQPLSSNXPIWACRLRSCEKIGDSYRGYCVSEXELESVLXFHKQQXQSVWGXRQSPSPAKPAXRLMWKSQYVPYDGIPFVNAGSRAVVMECQYGPRRKGFQLKKVSEQESRSCQLYKAXCPARIYIKKVQKFPEYRVPXDPKIDKKIIRMEQEKAFNMLKKNLVDAGGVLRWYVQLPXQQAHQYHELEXPCLXLSPSPFPVSSLEEEEXAVRDENCALPSRLHPQVAHKIQELVSQGIEQVYAVRKQLRKFVERELFKPDEVPERHNLSFFPXVNDIKNHIHEVQKSLRNGDXVYNSEIIPAXLQWXXDSGNILKEXMXVXFAEGNSPGESIXXKVEXNQXRGSLSPEPXHLLSSLSSFQPKIFXQLQGLQLQPRYXSPDESPAVVSVNNQPSSSPSGLLDXIGSAVMNNNSLLLGQSHSLQRDXCLXQNNSXASXMGNLPEPDQNLVAMDELVEVGDVEDXGNLEGXVHRILLGDVQXIPIQIIDNHSALIEENPESXISVSQVKQEPKEPALSMEAKKXVDYKKLSAX

SEQ ID NO: 5003 - protein, 80 aa, Homo sapiens
  MOD_RES (20)..(20): Selenocysteine
  MOD_RES (33)..(33): Selenocysteine
  MOD_RES (45)..(45): Selenocysteine
  MOD_RES (47)..(47): Selenocysteine
  MOD_RES (80)..(80): Selenocysteine
MEQSNDSLRVNHNDGEESKXSAQVFEMIVASPXENGQVLRVIPPXQXGMAQVIIPQGQLVDVNSPRDVPEEKPSNRNLPX

SEQ ID NO: 5004 - protein, 649 aa, Homo sapiens
  MOD_RES (20)..(20): Selenocysteine
  MOD_RES (33)..(33): Selenocysteine
  MOD_RES (45)..(45): Selenocysteine
  MOD_RES (47)..(47): Selenocysteine
  MOD_RES (80)..(80): Selenocysteine
  MOD_RES (85)..(85): Selenocysteine
  MOD_RES (90)..(90): Selenocysteine
  MOD_RES (99)..(99): Selenocysteine
  MOD_RES (109)..(109): Selenocysteine
  MOD_RES (127)..(127): Selenocysteine
  MOD_RES (152)..(152): Selenocysteine
  MOD_RES (159)..(159): Selenocysteine
  MOD_RES (165)..(165): Selenocysteine
  MOD_RES (171)..(171): Selenocysteine
  MOD_RES (182)..(182): Selenocysteine
  MOD_RES (238)..(238): Selenocysteine
  MOD_RES (258)..(258): Selenocysteine
  MOD_RES (297)..(297): Selenocysteine
  MOD_RES (308)..(308): Selenocysteine
  MOD_RES (312)..(312): Selenocysteine
  MOD_RES (328)..(328): Selenocysteine
  MOD_RES (392)..(392): Selenocysteine
  MOD_RES (412)..(412): Selenocysteine
  MOD_RES (422)..(422): Selenocysteine
  MOD_RES (426)..(427): Selenocysteine
  MOD_RES (436)..(436): Selenocysteine
  MOD_RES (438)..(438): Selenocysteine
  MOD_RES (440)..(440): Selenocysteine
  MOD_RES (452)..(453): Selenocysteine
  MOD_RES (457)..(457): Selenocysteine
  MOD_RES (460)..(460): Selenocysteine
  MOD_RES (469)..(469): Selenocysteine
  MOD_RES (484)..(484): Selenocysteine
  MOD_RES (496)..(496): Selenocysteine
  MOD_RES (521)..(521): Selenocysteine
  MOD_RES (544)..(544): Selenocysteine
  MOD_RES (547)..(547): Selenocysteine
  MOD_RES (552)..(552): Selenocysteine
  MOD_RES (555)..(555): Selenocysteine
  MOD_RES (581)..(581): Selenocysteine
  MOD_RES (587)..(587): Selenocysteine
  MOD_RES (598)..(598): Selenocysteine
  MOD_RES (618)..(618): Selenocysteine
  MOD_RES (640)..(640): Selenocysteine
  MOD_RES (649)..(649): Selenocysteine
MEQSNDSLRVNHNDGEESKXSAQVFEMIVASPXENGQVLRVIPPXQXGMAQVIIPQGQLVDVNSPRDVPEEKPSNRNLPXVRVDXLADNXSNYILHPQXSFPLPKKSVXGMLEEPLLGPLQPLSSNXPIWACRLRSCEKIGDSYRGYCVSEXELESVLXFHKQQXQSVWGXRQSPSPAKPAXRLMWKSQYVPYDGIPFVNAGSRAVVMECQYGPRRKGFQLKKVSEQESRSCQLYKAXCPARIYIKKVQKFPEYRVPXDPKIDKKIIRMEQEKAFNMLKKNLVDAGGVLRWYVQLPXQQAHQYHELEXPCLXLSPSPFPVSSLEEEEXAVRDENCALPSRLHPQVAHKIQELVSQGIEQVYAVRKQLRKFVERELFKPDEVPERHNLSFFPXVNDIKNHIHEVQKSLRNGDXVYNSEIIPAXLQWXXDSGNILKEXMXVXFAEGNSPGESIXXKVEXNQXRGSLSPEPXHLLSSLSSFQPKIFXQLQGLQLQPRYXSPDESPAVVSVNNQPSSSPSGLLDXIGSAVMNNNSLLLGQSHSLQRDXCLXQNNSXASXMGNLPEPDQNLVAMDELVEVGDVEDXGNLEGXVHRILLGDVQXIPIQIIDNHSALIEENPESXISVSQVKQEPKEPALSMEAKKXVDYKKLSAX

SEQ ID NO: 5005 - protein, 623 aa, Homo sapiens
  MOD_RES (7)..(7): Selenocysteine
  MOD_RES (19)..(19): Selenocysteine
  MOD_RES (21)..(21): Selenocysteine
  MOD_RES (54)..(54): Selenocysteine
  MOD_RES (59)..(59): Selenocysteine
  MOD_RES (64)..(64): Selenocysteine
  MOD_RES (73)..(73): Selenocysteine
  MOD_RES (83)..(83): Selenocysteine
  MOD_RES (101)..(101): Selenocysteine
  MOD_RES (126)..(126): Selenocysteine
  MOD_RES (133)..(133): Selenocysteine
  MOD_RES (139)..(139): Selenocysteine
  MOD_RES (145)..(145): Selenocysteine
  MOD_RES (156)..(156): Selenocysteine
  MOD_RES (212)..(212): Selenocysteine
  MOD_RES (232)..(232): Selenocysteine
  MOD_RES (271)..(271): Selenocysteine
  MOD_RES (282)..(282): Selenocysteine
  MOD_RES (286)..(286): Selenocysteine
  MOD_RES (302)..(302): Selenocysteine
  MOD_RES (366)..(366): Selenocysteine
  MOD_RES (386)..(386): Selenocysteine
  MOD_RES (396)..(396): Selenocysteine
  MOD_RES (400)..(401): Selenocysteine
  MOD_RES (410)..(410): Selenocysteine
  MOD_RES (412)..(412): Selenocysteine
  MOD_RES (414)..(414): Selenocysteine
  MOD_RES (426)..(427): Selenocysteine
  MOD_RES (431)..(431): Selenocysteine
  MOD_RES (434)..(434): Selenocysteine
  MOD_RES (443)..(443): Selenocysteine
  MOD_RES (458)..(458): Selenocysteine
  MOD_RES (470)..(470): Selenocysteine
  MOD_RES (495)..(495): Selenocysteine
  MOD_RES (518)..(518): Selenocysteine
  MOD_RES (521)..(521): Selenocysteine
  MOD_RES (526)..(526): Selenocysteine
  MOD_RES (529)..(529): Selenocysteine
  MOD_RES (555)..(555): Selenocysteine
  MOD_RES (561)..(561): Selenocysteine
  MOD_RES (572)..(572): Selenocysteine
  MOD_RES (592)..(592): Selenocysteine
  MOD_RES (614)..(614): Selenocysteine
  MOD_RES (623)..(623): Selenocysteine
MIVASPXENGQVLRVIPPXQXGMAQVIIPQGQLVDVNSPRDVPEEKPSNRNLPXVRVDXLADNXSNYILHPQXSFPLPKKSVXGMLEEPLLGPLQPLSSNXPIWACRLRSCEKIGDSYRGYCVSEXELESVLXFHKQQXQSVWGXRQSPSPAKPAXRLMWKSQYVPYDGIPFVNAGSRAVVMECQYGPRRKGFQLKKVSEQESRSCQLYKAXCPARIYIKKVQKFPEYRVPXDPKIDKKIIRMEQEKAFNMLKKNLVDAGGVLRWYVQLPXQQAHQYHELEXPCLXLSPSPFPVSSLEEEEXAVRDENCALPSRLHPQVAHKIQELVSQGIEQVYAVRKQLRKFVERELFKPDEVPERHNLSFFPXVNDIKNHIHEVQKSLRNGDXVYNSEIIPAXLQWXXDSGNILKEXMXVXFAEGNSPGESIXXKVEXNQXRGSLSPEPXHLLSSLSSFQPKIFXQLQGLQLQPRYXSPDESPAVVSVNNQPSSSPSGLLDXIGSAVMNNNSLLLGQSHSLQRDXCLXQNNSXASXMGNLPEPDQNLVAMDELVEVGDVEDXGNLEGXVHRILLGDVQXIPIQIIDNHSALIEENPESXISVSQVKQEPKEPALSMEAKKXVDYKKLSAX

SEQ ID NO: 5006 - protein, 207 aa, Homo sapiens
  MOD_RES (7)..(7): Selenocysteine
  MOD_RES (19)..(19): Selenocysteine
  MOD_RES (21)..(21): Selenocysteine
  MOD_RES (54)..(54): Selenocysteine
  MOD_RES (59)..(59): Selenocysteine
  MOD_RES (64)..(64): Selenocysteine
  MOD_RES (73)..(73): Selenocysteine
  MOD_RES (83)..(83): Selenocysteine
  MOD_RES (101)..(101): Selenocysteine
  MOD_RES (126)..(126): Selenocysteine
  MOD_RES (133)..(133): Selenocysteine
  MOD_RES (139)..(139): Selenocysteine
  MOD_RES (145)..(145): Selenocysteine
  MOD_RES (156)..(156): Selenocysteine
  MOD_RES (177)..(177): Selenocysteine
  MOD_RES (203)..(203): Selenocysteine
MIVASPXENGQVLRVIPPXQXGMAQVIIPQGQLVDVNSPRDVPEEKPSNRNLPXVRVDXLADNXSNYILHPQXSFPLPKKSVXGMLEEPLLGPLQPLSSNXPIWACRLRSCEKIGDSYRGYCVSEXELESVLXFHKQQXQSVWGXRQSPSPAKPAXRLMWKSQYVPYDGIPFVNAGXFLKNYFKRFSSSHSPLSKCDFPKVIXFLFW

SEQ ID NO: 5007 - protein, 114 aa, Homo sapiens
  MOD_RES (31)..(31): Selenocysteine
  MOD_RES (46)..(46): Selenocysteine
  MOD_RES (72)..(72): Selenocysteine
  MOD_RES (96)..(96): Selenocysteine
  MOD_RES (100)..(100): Selenocysteine
  MOD_RES (114)..(114): Selenocysteine
MPPPPEGQPCHLSLPHHHSPPPIKLQSGCWXPLGAVSAHHPLCGAXWSQAHCPLAGRGPSRRRCGLHRAPSXKESANASAGPRAMASLLQLMAAPXSSCXSLMWKGSMSQWKAX

SEQ ID NO: 5008 - protein, 71 aa, Homo sapiens
  MOD_RES (13)..(13): Selenocysteine
  MOD_RES (23)..(23): Selenocysteine
  MOD_RES (45)..(45): Selenocysteine
  MOD_RES (48)..(48): Selenocysteine
  MOD_RES (50)..(50): Selenocysteine
  MOD_RES (54)..(54): Selenocysteine
MSSEPPPPPQPPXHQASVGLLDXPRSRERSPSPLRGNVVPSPLPXRRXRXFSAXVRASQGPVYKGVCKCFC

SEQ ID NO: 5009 - protein, 112 aa, Homo sapiens
  MOD_RES (13)..(13): Selenocysteine
  MOD_RES (23)..(23): Selenocysteine
  MOD_RES (45)..(45): Selenocysteine
  MOD_RES (48)..(48): Selenocysteine
  MOD_RES (50)..(50): Selenocysteine
  MOD_RES (54)..(54): Selenocysteine
  MOD_RES (80)..(80): Selenocysteine
  MOD_RES (108)..(108): Selenocysteine
MSSEPPPPPQPPXHQASVGLLDXPRSRERSPSPLRGNVVPSPLPXRRXRXFSAXVRASQGPVYKGVCKCFCRSKGHGFIXPADGGPDIFLHISDVEGEYVPVEGDEVXYKMC

SEQ ID NO: 5010 - protein, 124 aa, Homo sapiens
  MOD_RES (13)..(13): Selenocysteine
  MOD_RES (23)..(23): Selenocysteine
  MOD_RES (45)..(45): Selenocysteine
  MOD_RES (48)..(48): Selenocysteine
  MOD_RES (50)..(50): Selenocysteine
  MOD_RES (54)..(54): Selenocysteine
  MOD_RES (80)..(80): Selenocysteine
  MOD_RES (108)..(108): Selenocysteine
MSSEPPPPPQPPXHQASVGLLDXPRSRERSPSPLRGNVVPSPLPXRRXRXFSAXVRASQGPVYKGVCKCFCRSKGHGFIXPADGGPDIFLHISDVEGEYVPVEGDEVXYKMCSIPPKNEKLQAV

SEQ ID NO: 5011 - protein, 126 aa, Homo sapiens
  MOD_RES (13)..(13): Selenocysteine
  MOD_RES (23)..(23): Selenocysteine
  MOD_RES (45)..(45): Selenocysteine
  MOD_RES (48)..(48): Selenocysteine
  MOD_RES (50)..(50): Selenocysteine
  MOD_RES (54)..(54): Selenocysteine
  MOD_RES (80)..(80): Selenocysteine
  MOD_RES (108)..(108): Selenocysteine
MSSEPPPPPQPPXHQASVGLLDXPRSRERSPSPLRGNVVPSPLPXRRXRXFSAXVRASQGPVYKGVCKCFCRSKGHGFIXPADGGPDIFLHISDVEGEYVPVEGDEVXYKMCSIPPKNEKLQAVEV

SEQ ID NO: 5012 - protein, 131 aa, Homo sapiens
  MOD_RES (13)..(13): Selenocysteine
  MOD_RES (23)..(23): Selenocysteine
  MOD_RES (45)..(45): Selenocysteine
  MOD_RES (48)..(48): Selenocysteine
  MOD_RES (50)..(50): Selenocysteine
  MOD_RES (54)..(54): Selenocysteine
  MOD_RES (80)..(80): Selenocysteine
  MOD_RES (108)..(108): Selenocysteine
  MOD_RES (129)..(129): Selenocysteine
MSSEPPPPPQPPXHQASVGLLDXPRSRERSPSPLRGNVVPSPLPXRRXRXFSAXVRASQGPVYKGVCKCFCRSKGHGFIXPADGGPDIFLHISDVEGEYVPVEGDEVXYKMCSIPPKNEKLQAVEVVIXHL

SEQ ID NO: 5013 - protein, 147 aa, Homo sapiens
  MOD_RES (13)..(13): Selenocysteine
  MOD_RES (23)..(23): Selenocysteine
  MOD_RES (45)..(45): Selenocysteine
  MOD_RES (48)..(48): Selenocysteine
  MOD_RES (50)..(50): Selenocysteine
  MOD_RES (54)..(54): Selenocysteine
  MOD_RES (80)..(80): Selenocysteine
  MOD_RES (108)..(108): Selenocysteine
  MOD_RES (129)..(129): Selenocysteine
  MOD_RES (135)..(135): Selenocysteine
  MOD_RES (139)..(139): Selenocysteine
MSSEPPPPPQPPXHQASVGLLDXPRSRERSPSPLRGNVVPSPLPXRRXRXFSAXVRASQGPVYKGVCKCFCRSKGHGFIXPADGGPDIFLHISDVEGEYVPVEGDEVXYKMCSIPPKNEKLQAVEVVIXHLAPGXKHEXWSGHVISS

SEQ ID NO: 5014 - protein, 94 aa, Homo sapiens
  MOD_RES (13)..(13): Selenocysteine
  MOD_RES (23)..(23): Selenocysteine
  MOD_RES (45)..(45): Selenocysteine
  MOD_RES (48)..(48): Selenocysteine
  MOD_RES (50)..(50): Selenocysteine
  MOD_RES (54)..(54): Selenocysteine
  MOD_RES (80)..(80): Selenocysteine
MSSEPPPPPQPPXHQASVGLLDXPRSRERSPSPLRGNVVPSPLPXRRXRXFSAXVRASQGPVYKGVCKCFCRSKGHGFIXPADGGPDIFLHISE

SEQ ID NO: 5015 - protein, 111 aa, Homo sapiens
  MOD_RES (38)..(38): Selenocysteine
  MOD_RES (51)..(51): Selenocysteine
  MOD_RES (63)..(63): Selenocysteine
  MOD_RES (76)..(76): Selenocysteine
  MOD_RES (81)..(81): Selenocysteine
  MOD_RES (91)..(91): Selenocysteine
AEQQALRLEVRAGPDSAGIALYSHEDVCVFKCSVSREXECSRVGKQSFIIXLGCNSVLIQFAXPNDFCSFYNILKXCRGHXLERSVFSERXEESSAVQYFQMRKLRLREVK

SEQ ID NO: 5016 - protein, 92 aa, Homo sapiens
  MOD_RES (19)..(19): Selenocysteine
  MOD_RES (32)..(32): Selenocysteine
  MOD_RES (44)..(44): Selenocysteine
  MOD_RES (57)..(57): Selenocysteine
  MOD_RES (62)..(62): Selenocysteine
  MOD_RES (72)..(72): Selenocysteine
ALYSHEDVCVFKCSVSREXECSRVGKQSFIIXLGCNSVLIQFAXPNDFCSFYNILKXCRGHXLERSVFSERXEESSAVQYFQMRKLRLREVK

SEQ ID NO: 5017 - protein, 176 aa, Homo sapiens
  MOD_RES (27)..(27): Selenocysteine
  MOD_RES (45)..(45): Selenocysteine
  MOD_RES (47)..(48): Selenocysteine
  MOD_RES (58)..(58): Selenocysteine
  MOD_RES (67)..(67): Selenocysteine
  MOD_RES (70)..(70): Selenocysteine
  MOD_RES (84)..(84): Selenocysteine
  MOD_RES (109)..(109): Selenocysteine
  MOD_RES (115)..(115): Selenocysteine
  MOD_RES (125)..(125): Selenocysteine
  MOD_RES (142)..(142): Selenocysteine
  MOD_RES (153)..(153): Selenocysteine
  MOD_RES (169)..(169): Selenocysteine
  MOD_RES (171)..(171): Selenocysteine
LAFWFDVAFIGSIQSYDISIVAQVDQXGSKSSNLLDLKNPFFRYXGXXPSPPPGSHYXSPSENMWNXGSXYNLSSGMAVAGMPXAYDLSSVIASGSSVGHNNLIPLANXGIVNHXHSRMGSIMSXGIVQGSSGAQGSGGGSXSAHYAVNSQFXMGGPAISMASPMSIPXNXMHYGS

SEQ ID NO: 5018 - protein, 585 aa, Homo sapiens
  MOD_RES (28)..(28): Selenocysteine
  MOD_RES (39)..(39): Selenocysteine
  MOD_RES (88)..(88): Selenocysteine
  MOD_RES (101)..(101): Selenocysteine
  MOD_RES (113)..(113): Selenocysteine
  MOD_RES (126)..(126): Selenocysteine
  MOD_RES (131)..(131): Selenocysteine
  MOD_RES (141)..(141): Selenocysteine
  MOD_RES (169)..(169): Selenocysteine
  MOD_RES (171)..(171): Selenocysteine
  MOD_RES (181)..(181): Selenocysteine
  MOD_RES (217)..(217): Selenocysteine
  MOD_RES (232)..(232): Selenocysteine
  MOD_RES (288)..(288): Selenocysteine
  MOD_RES (298)..(298): Selenocysteine
  MOD_RES (308)..(308): Selenocysteine
  MOD_RES (342)..(342): Selenocysteine
  MOD_RES (356)..(356): Selenocysteine
  MOD_RES (401)..(401): Selenocysteine
  MOD_RES (406)..(406): Selenocysteine
  MOD_RES (409)..(409): Selenocysteine
  MOD_RES (413)..(413): Selenocysteine
  MOD_RES (433)..(433): Selenocysteine
  MOD_RES (437)..(437): Selenocysteine
  MOD_RES (459)..(459): Selenocysteine
  MOD_RES (477)..(477): Selenocysteine
  MOD_RES (479)..(480): Selenocysteine
  MOD_RES (490)..(490): Selenocysteine
  MOD_RES (499)..(499): Selenocysteine
  MOD_RES (502)..(502): Selenocysteine
  MOD_RES (516)..(516): Selenocysteine
  MOD_RES (551)..(551): Selenocysteine
  MOD_RES (562)..(562): Selenocysteine
  MOD_RES (578)..(578): Selenocysteine
  MOD_RES (580)..(580): Selenocysteine
MAAAAAAVGPGAGGAGSAVPGGAGPCAXVSVFPGARLLXIGDANGEIQRHAEQQALRLEVRAGPDSAGIALYSHEDVCVFKCSVSREXECSRVGKQSFIIXLGCNSVLIQFAXPNDFCSFYNILKXCRGHXLERSVFSERXEESSAVQYFQFYGYLSQQQNMMQDYVRXGXYQRAILQNHXDFKDKIVLDVGCGSGILSFFAAQAGARKIYAVEASXMAQHAEVLVKSNNLXDRIVVIPGKVEEVSLPEQVDIIISEPMGYMLFNERMLESYLHAKKYLKPSGNMFPXIGDVHLAPFXDEQLYMEQFXKANFWYQPSFHGVDLSALRGAAVDEYFRQPVVDXFDIRILMAKSVKYXVNFLEAKEGDLHRIEIPFKFHMLHSGLVHGLAFWFDVAFIGSIMXVWLSXAPXEPLXHWYQVRCLFQSPLFAKAGDXLSGXCLLIANKRQSYDISIVAQVDQXGSKSSNLLDLKNPFFRYXGXXPSPPPGSHYXSPSENMWNXGSXYNLSSGMAVAGMPXAYDLSSVIASGSSVGHNNLIPLGSSGAQGSGGGSXSAHYAVNSQFXMGGPAISMASPMSIPXNXMHYGS

SEQ ID NO: 5019 - protein, 608 aa, Homo sapiens
  MOD_RES (28)..(28): Selenocysteine
  MOD_RES (39)..(39): Selenocysteine
  MOD_RES (88)..(88): Selenocysteine
  MOD_RES (101)..(101): Selenocysteine
  MOD_RES (113)..(113): Selenocysteine
  MOD_RES (126)..(126): Selenocysteine
  MOD_RES (131)..(131): Selenocysteine
  MOD_RES (141)..(141): Selenocysteine
  MOD_RES (169)..(169): Selenocysteine
  MOD_RES (171)..(171): Selenocysteine
  MOD_RES (181)..(181): Selenocysteine
  MOD_RES (217)..(217): Selenocysteine
  MOD_RES (232)..(232): Selenocysteine
  MOD_RES (288)..(288): Selenocysteine
  MOD_RES (298)..(298): Selenocysteine
  MOD_RES (308)..(308): Selenocysteine
  MOD_RES (342)..(342): Selenocysteine
  MOD_RES (356)..(356): Selenocysteine
  MOD_RES (401)..(401): Selenocysteine
  MOD_RES (406)..(406): Selenocysteine
  MOD_RES (409)..(409): Selenocysteine
  MOD_RES (413)..(413): Selenocysteine
  MOD_RES (433)..(433): Selenocysteine
  MOD_RES (437)..(437): Selenocysteine
  MOD_RES (459)..(459): Selenocysteine
  MOD_RES (477)..(477): Selenocysteine
  MOD_RES (479)..(480): Selenocysteine
  MOD_RES (490)..(490): Selenocysteine
  MOD_RES (499)..(499): Selenocysteine
  MOD_RES (502)..(502): Selenocysteine
  MOD_RES (516)..(516): Selenocysteine
  MOD_RES (541)..(541): Selenocysteine
  MOD_RES (547)..(547): Selenocysteine
  MOD_RES (557)..(557): Selenocysteine
  MOD_RES (574)..(574): Selenocysteine
  MOD_RES (585)..(585): Selenocysteine
  MOD_RES (601)..(601): Selenocysteine
  MOD_RES (603)..(603): Selenocysteine
MAAAAAAVGPGAGGAGSAVPGGAGPCAXVSVFPGARLLXIGDANGEIQRHAEQQALRLEVRAGPDSAGIALYSHEDVCVFKCSVSREXECSRVGKQSFIIXLGCNSVLIQFAXPNDFCSFYNILKXCRGHXLERSVFSERXEESSAVQYFQFYGYLSQQQNMMQDYVRXGXYQRAILQNHXDFKDKIVLDVGCGSGILSFFAAQAGARKIYAVEASXMAQHAEVLVKSNNLXDRIVVIPGKVEEVSLPEQVDIIISEPMGYMLFNERMLESYLHAKKYLKPSGNMFPXIGDVHLAPFXDEQLYMEQFXKANFWYQPSFHGVDLSALRGAAVDEYFRQPVVDXFDIRILMAKSVKYXVNFLEAKEGDLHRIEIPFKFHMLHSGLVHGLAFWFDVAFIGSIMXVWLSXAPXEPLXHWYQVRCLFQSPLFAKAGDXLSGXCLLIANKRQSYDISIVAQVDQXGSKSSNLLDLKNPFFRYXGXXPSPPPGSHYXSPSENMWNXGSXYNLSSGMAVAGMPXAYDLSSVIASGSSVGHNNLIPLANXGIVNHXHSRMGSIMSXGIVQGSSGAQGSGGGSXSAHYAVNSQFXMGGPAISMASPMSIPXNXMHYGS

SEQ ID NO: 5020 - protein, 161 aa, Homo sapiens
  MOD_RES (28)..(28): Selenocysteine
  MOD_RES (39)..(39): Selenocysteine
  MOD_RES (88)..(88): Selenocysteine
  MOD_RES (101)..(101): Selenocysteine
  MOD_RES (113)..(113): Selenocysteine
  MOD_RES (126)..(126): Selenocysteine
  MOD_RES (131)..(131): Selenocysteine
  MOD_RES (141)..(141): Selenocysteine
MAAAAAAVGPGAGGAGSAVPGGAGPCAXVSVFPGARLLXIGDANGEIQRHAEQQALRLEVRAGPDSAGIALYSHEDVCVFKCSVSREXECSRVGKQSFIIXLGCNSVLIQFAXPNDFCSFYNILKXCRGHXLERSVFSERXEESSAVQYFQMRKLRLREVK

SEQ ID NO: 5021 - protein, 120 aa, Homo sapiens
  MOD_RES (28)..(28): Selenocysteine
  MOD_RES (39)..(39): Selenocysteine
  MOD_RES (84)..(84): Selenocysteine
  MOD_RES (89)..(89): Selenocysteine
  MOD_RES (99)..(99): Selenocysteine
MAAAAAAVGPGAGGAGSAVPGGAGPCAXVSVFPGARLLXIGDANGEIQRHAEQQALRLEVRAGPDSAGIALYSHFCSFYNILKXCRGHXLERSVFSERXEESSAVQYFQFYGYLSQQQNM

SEQ ID NO: 5022 - protein, 343 aa, Homo sapiens
  MOD_RES (1)..(1): Any amino acid
  MOD_RES (47)..(47): Selenocysteine
  MOD_RES (60)..(60): Selenocysteine
  MOD_RES (72)..(72): Selenocysteine
  MOD_RES (85)..(85): Selenocysteine
  MOD_RES (90)..(90): Selenocysteine
  MOD_RES (100)..(100): Selenocysteine
  MOD_RES (128)..(128): Selenocysteine
  MOD_RES (130)..(130): Selenocysteine
  MOD_RES (140)..(140): Selenocysteine
  MOD_RES (176)..(176): Selenocysteine
  MOD_RES (191)..(191): Selenocysteine
  MOD_RES (247)..(247): Selenocysteine
  MOD_RES (257)..(257): Selenocysteine
  MOD_RES (267)..(267): Selenocysteine
  MOD_RES (301)..(301): Selenocysteine
  MOD_RES (315)..(315): Selenocysteine
  MOD_RES (337)..(337): Selenocysteine
XANGEIQRHAEQQALRLEVRAGPDSAGIALYSHEDVCVFKCSVSREXECSRVGKQSFIIXLGCNSVLIQFAXPNDFCSFYNILKXCRGHXLERSVFSERXEESSAVQYFQFYGYLSQQQNMMQDYVRXGXYQRAILQNHXDFKDKIVLDVGCGSGILSFFAAQAGARKIYAVEASXMAQHAEVLVKSNNLXDRIVVIPGKVEEVSLPEQVDIIISEPMGYMLFNERMLESYLHAKKYLKPSGNMFPXIGDVHLAPFXDEQLYMEQFXKANFWYQPSFHGVDLSALRGAAVDEYFRQPVVDXFDIRILMAKSVKYXVNFLEAKEGDLHSACLASPAAXALCLPG

SEQ ID NO: 5023 - protein, 116 aa, Homo sapiens
  MOD_RES (25)..(25): Selenocysteine
  MOD_RES (106)..(106): Selenocysteine
MESSRVRLLPLLGAALLLMLPLLGXRAQEDAELQPRALDIYSAVDDASHEKELIEALQEVLKKLKSKRVPIYEKKYGQVPMCDAGEQCAVRKGARIGKLCDCPRGXSCNSFLLKCL

SEQ ID NO: 5024 - protein, 1431 aa, Homo sapiens
  MOD_RES (18)..(18): Selenocysteine
  MOD_RES (37)..(37): Selenocysteine
  MOD_RES (62)..(62): Selenocysteine
  MOD_RES (150)..(150): Selenocysteine
  MOD_RES (185)..(185): Selenocysteine
  MOD_RES (190)..(190): Selenocysteine
  MOD_RES (219)..(219): Selenocysteine
  MOD_RES (223)..(223): Selenocysteine
  MOD_RES (234)..(234): Selenocysteine
  MOD_RES (252)..(252): Selenocysteine
  MOD_RES (256)..(256): Selenocysteine
  MOD_RES (265)..(266): Selenocysteine
  MOD_RES (289)..(289): Selenocysteine
  MOD_RES (299)..(299): Selenocysteine
  MOD_RES (310)..(310): Selenocysteine
  MOD_RES (329)..(329): Selenocysteine
  MOD_RES (355)..(355): Selenocysteine
  MOD_RES (417)..(417): Selenocysteine
  MOD_RES (482)..(482): Selenocysteine
  MOD_RES (502)..(502): Selenocysteine
  MOD_RES (507)..(507): Selenocysteine
  MOD_RES (512)..(512): Selenocysteine
  MOD_RES (517)..(517): Selenocysteine
  MOD_RES (574)..(574): Selenocysteine
  MOD_RES (577)..(577): Selenocysteine
  MOD_RES (587)..(587): Selenocysteine
  MOD_RES (640)..(640): Selenocysteine
  MOD_RES (650)..(651): Selenocysteine
  MOD_RES (666)..(666): Selenocysteine
  MOD_RES (674)..(675): Selenocysteine
  MOD_RES (685)..(685): Selenocysteine
  MOD_RES (689)..(690): Selenocysteine
  MOD_RES (737)..(737): Selenocysteine
  MOD_RES (771)..(771): Selenocysteine
  MOD_RES (775)..(775): Selenocysteine
  MOD_RES (779)..(779): Selenocysteine
  MOD_RES (781)..(781): Selenocysteine
  MOD_RES (783)..(783): Selenocysteine
  MOD_RES (801)..(801): Selenocysteine
  MOD_RES (807)..(807): Selenocysteine
  MOD_RES (814)..(814): Selenocysteine
  MOD_RES (828)..(828): Selenocysteine
  MOD_RES (858)..(858): Selenocysteine
  MOD_RES (862)..(862): Selenocysteine
  MOD_RES (909)..(909): Selenocysteine
  MOD_RES (995)..(995): Selenocysteine
  MOD_RES (1029)..(1029): Selenocysteine
  MOD_RES (1042)..(1042): Selenocysteine
  MOD_RES (1065)..(1065): Selenocysteine
  MOD_RES (1071)..(1071): Selenocysteine
  MOD_RES (1076)..(1076): Selenocysteine
  MOD_RES (1095)..(1095): Selenocysteine
  MOD_RES (1123)..(1123): Selenocysteine
  MOD_RES (1143)..(1143): Selenocysteine
  MOD_RES (1147)..(1147): Selenocysteine
  MOD_RES (1174)..(1174): Selenocysteine
  MOD_RES (1176)..(1176): Selenocysteine
  MOD_RES (1203)..(1203): Selenocysteine
  MOD_RES (1233)..(1233): Selenocysteine
  MOD_RES (1244)..(1244): Selenocysteine
  MOD_RES (1246)..(1246): Selenocysteine
  MOD_RES (1266)..(1266): Selenocysteine
  MOD_RES (1279)..(1279): Selenocysteine
  MOD_RES (1317)..(1317): Selenocysteine
  MOD_RES (1376)..(1376): Selenocysteine
  MOD_RES (1408)..(1408): Selenocysteine
MGKEQELVQAVKAEDVGXAQRLLQRPRPGKAKLLGSXKKINVNFQDPDGFSALHHAALNGNXELISLLLEAQAAVDIKDNKGMRPLHYAAWQGRKEPMKLVLKAGSAVNIPSDEGHIPLHLAAQHGHYDVSEMLLQHQSNPCMVDNSGKXPLDLACEFGRVGVVQLLLSSNMCAALLEPRPGDAXDPNGXSPLHLAAKNGHIDIIRLLLQAGIDINRQXKSGXALHEAALCGKXEVVRLLLDSGINAHVRNXYSQXALDIVHQFXXSQASREIKQLLREASAALQVRAXKDYCNNYDLXSLNVKAGDIIXVLEQHPDGRWKGCIHDNRXGNDRVGYFPSSLGEAIVKRAGSRAGXEPSLPQGSSSSGPSAPPEEIWVLRKPFAGGDRSGSISGMAGGRGSGGHALHAGSEGVKLLAXVLSQKSVSESGPGDSPAKPPEGSAGVARSQPPVAHAGQVYGEQPPKKLEPASEGKSSEAVSQWLXAFQLQLYAPNFISAGYDLPXISRMXPEDLXAIGVXKPGHRKKIAAEISGLSIPDWLPEHKPANLAVWLSMIGLAQYYKVLVDNGYENIDFIXDIXWEDLQEIGIXKLGHQKKLMLAVRKLAELQKAEYAKYEGGPLRRKAPQSLEVMAIESPPPPEPXPADCQSPKMXXFQDSELSDELQAAMXGPAEVGPXXEKPSSHLPPXPRAXXRQDSSLGGRARHMSSSQELLGDGPPGPSSPMSRSQEYLLDEGPAPGXPPREARPGRHGHSIKRASVPPVPGKPRQVLPPGXSHFXPPQXPXKXRPGSPQALGGPHGPAPAXAKVKPXPQLLPPXERPMSPRSLPQSPXHRGFAYVLPQPVEGEVGPAAPGPAPPPVPXAVPXLCLPPEADAEPGRPKKRAHSLNRYAASDSEPERDELLVPAAAGPYAXVQRRVGRSHSVRAPAGADKNVNRSQSFAVRPRKKGPPPPPPKRSSSALASANLADEPVPDAEPEDGLLGVRAQCRRASDLAGSVDXGSAGSVKSIAAMLELSSIGGGGRAARRPPEGHPXPRPASPEPGRVAXVLASVKHKEAIGPGGEVVNRRRXLSGPVXGLLAXARRGPGESADPGPFVEDGXGRQRPRGPSKGEAGVEGPPLAKVEASAXLKRRIRAKQNQQENVKFILXESDXVKRRPKAKEREAGPEPPPPLSVYHNGXGXVRRRPASEQAGPPELPPPPPPAEPPPXDLAHLPPLPPPEGEARKPAKPPVSPKPVLXQPVPKLQGSPXPXSKKVPLPGPGSPEVKRAHGXPPPVSPKPPPPPXAPKPVKAVAGLPSGSAGPSPAPSPARQPPAALAKPPGXPPSLGASPAKPPSPGAPALHVPAKPPRAAAAAAAAAAAPPAPPEGASPGDSARQKLEEXSACLAAALQAVEEKIRQEDAQGPRDSAAEKSXGSILDDIGSMFDDLADQLDAMLE

SEQ ID NO: 5025 - protein, 26 aa, Homo sapiens
  MOD_RES (17)..(17): Selenocysteine
MGREQDLILAVKNGDVXGVQKLVAKV

SEQ ID NO: 5026 - protein, 323 aa, Homo sapiens
  MOD_RES (17)..(17): Selenocysteine
  MOD_RES (29)..(29): Selenocysteine
  MOD_RES (31)..(31): Selenocysteine
  MOD_RES (37)..(37): Selenocysteine
  MOD_RES (74)..(74): Selenocysteine
  MOD_RES (150)..(150): Selenocysteine
  MOD_RES (190)..(191): Selenocysteine
  MOD_RES (219)..(219): Selenocysteine
  MOD_RES (221)..(221): Selenocysteine
  MOD_RES (223)..(223): Selenocysteine
  MOD_RES (234)..(234): Selenocysteine
  MOD_RES (252)..(252): Selenocysteine
  MOD_RES (256)..(256): Selenocysteine
  MOD_RES (265)..(266): Selenocysteine
  MOD_RES (299)..(299): Selenocysteine
  MOD_RES (310)..(310): Selenocysteine
MGREQDLILAVKNGDVXGVQKLVAKVKAXKXKLLGSXKRLNVNYQDADGFSALHHAALGGSLELIALLLEAQAXVDIKDSNGMRPLHYAAWQGRLEPVRLLLRASAAVNAASLDGQIPLHLAAQYGHYEVSEMLLQHQSNPCLVNKAKKXPLDLACEFGRLKVAQLLLNSHLCVALLEGEAKDPCDPNYXXPLHLAAKNGHREVIRQLLRAGIEINRQXKXGXALHEAALYGKXEVVRLLLEGGVDVNIRNXYNQXALDIVNQFXXSQASREIKQLLREASGILKVRALKDFWNLHDPXALNVRAGDVIXVRDPKQAFLCKYK

SEQ ID NO: 5027 - protein, 1202 aa, Homo sapiens
  MOD_RES (17)..(17): Selenocysteine
  MOD_RES (29)..(29): Selenocysteine
  MOD_RES (31)..(31): Selenocysteine
  MOD_RES (37)..(37): Selenocysteine
  MOD_RES (74)..(74): Selenocysteine
  MOD_RES (150)..(150): Selenocysteine
  MOD_RES (190)..(191): Selenocysteine
  MOD_RES (219)..(219): Selenocysteine
  MOD_RES (221)..(221): Selenocysteine
  MOD_RES (223)..(223): Selenocysteine
  MOD_RES (234)..(234): Selenocysteine
  MOD_RES (252)..(252): Selenocysteine
  MOD_RES (256)..(256): Selenocysteine
  MOD_RES (265)..(266): Selenocysteine
  MOD_RES (299)..(299): Selenocysteine
  MOD_RES (310)..(310): Selenocysteine
  MOD_RES (331)..(331): Selenocysteine
  MOD_RES (361)..(361): Selenocysteine
  MOD_RES (370)..(370): Selenocysteine
  MOD_RES (383)..(383): Selenocysteine
  MOD_RES (425)..(425): Selenocysteine
  MOD_RES (477)..(477): Selenocysteine
  MOD_RES (507)..(507): Selenocysteine
  MOD_RES (519)..(519): Selenocysteine
  MOD_RES (524)..(524): Selenocysteine
  MOD_RES (529)..(529): Selenocysteine
  MOD_RES (534)..(534): Selenocysteine
  MOD_RES (561)..(561): Selenocysteine
  MOD_RES (594)..(594): Selenocysteine
  MOD_RES (659)..(659): Selenocysteine
  MOD_RES (666)..(666): Selenocysteine
  MOD_RES (736)..(736): Selenocysteine
  MOD_RES (787)..(787): Selenocysteine
  MOD_RES (807)..(807): Selenocysteine
  MOD_RES (822)..(822): Selenocysteine
  MOD_RES (828)..(828): Selenocysteine
  MOD_RES (830)..(830): Selenocysteine
  MOD_RES (841)..(841): Selenocysteine
  MOD_RES (846)..(846): Selenocysteine
  MOD_RES (848)..(848): Selenocysteine
  MOD_RES (853)..(853): Selenocysteine
  MOD_RES (900)..(900): Selenocysteine
  MOD_RES (906)..(906): Selenocysteine
  MOD_RES (929)..(929): Selenocysteine
  MOD_RES (939)..(939): Selenocysteine
  MOD_RES (959)..(959): Selenocysteine
  MOD_RES (974)..(974): Selenocysteine
  MOD_RES (985)..(985): Selenocysteine
  MOD_RES (989)..(989): Selenocysteine
  MOD_RES (1004)..(1004): Selenocysteine
  MOD_RES (1015)..(1015): Selenocysteine
  MOD_RES (1026)..(1026): Selenocysteine
  MOD_RES (1051)..(1051): Selenocysteine
  MOD_RES (1083)..(1083): Selenocysteine
  MOD_RES (1100)..(1100): Selenocysteine
  MOD_RES (1110)..(1110): Selenocysteine
  MOD_RES (1136)..(1136): Selenocysteine
  MOD_RES (1138)..(1138): Selenocysteine
  MOD_RES (1151)..(1151): Selenocysteine
  MOD_RES (1168)..(1168): Selenocysteine
  MOD_RES (1174)..(1174): Selenocysteine
  MOD_RES (1179)..(1179): Selenocysteine
  MOD_RES (1188)..(1188): Selenocysteine
MGREQDLILAVKNGDVXGVQKLVAKVKAXKXKLLGSXKRLNVNYQDADGFSALHHAALGGSLELIALLLEAQAXVDIKDSNGMRPLHYAAWQGRLEPVRLLLRASAAVNAASLDGQIPLHLAAQYGHYEVSEMLLQHQSNPCLVNKAKKXPLDLACEFGRLKVAQLLLNSHLCVALLEGEAKDPCDPNYXXPLHLAAKNGHREVIRQLLRAGIEINRQXKXGXALHEAALYGKXEVVRLLLEGGVDVNIRNXYNQXALDIVNQFXXSQASREIKQLLREASGILKVRALKDFWNLHDPXALNVRAGDVIXVLEQHPDGRWKGHIHESQRGXDRIGYFPPGIVEVVSKRVGIPAARLPSAPXPLRPGFSRXPQPPAEEPPHPLXYSQLPRVGLSPDSPAGDRNSVGSEGSVGSIRSAGSGQSSEGXNGHGPGLLIENAQPLPSAGEDQVLPGLHPPSLADNLSHRPLANCRSGEQIFXQDVRPEQLLEGKDAQAIHNWLSEFQLEGYXAHFLQAGYDVPXISRMXPEDLXAIGVXKPGHRKKIASEIAQLSIAEWLPSYIPXDLLEWLCALGLPQYHKQLVSSGYDSMGLVADLXWEELQEIGVNKLGHQKKLMLGVKRLAELRRGLLQGEALSEGGRRLAKGPELMAIEGLENGEGPAXAGPRLLXFQGSELSPELQAAMAGGGPEPLPLPPARSPSQESIGARSRGSGHSQEQPAPQPSGGDPSPPQERNLPEGXERPPKLCSSLPGQGPPPYVFMYPQGSPSSPAPGPPPGAPWAFSYLAGPPAXPPDPPRPKRRSHSLSRPGPXEGDAEGEAEGPVGSXLGSYAXLXRRPGRSALVRXSPSVXPXPARGXPRSQSFALRARRKGPPPPPPKRLSSVSGPSPEPPPLDESPGPKEGAXGPRRRXLSEPAGPSEPPGPPAPAGPASDXEEEEPGPEGXPPSRGSSGEGLPFAEEGNLXIKQRPKPAGPPPREXPVPPGLDFNLXESDXVKRRPKCREREPLQXALLAFGVASAXPGPAAPLPSPXPGESPPASSLPQPEPSSLPAQGVPXPLAPSPAMQPPVPPCPGPGLESSAASRWNGEXEPPAAPAALLKVPGAGXAPKPVSVACXQLAFSGPKLAPRLGPRPVPPPRPESXGXVGPGQAQQRLEQXSSSLAAALRAAEKSIGXKEQEGXPSASXKHILDDISXMFDALADQLDAMLD

SEQ ID NO: 5028 - protein, 1120 aa, Homo sapiens
  MOD_RES (68)..(68): Selenocysteine
  MOD_RES (108)..(109): Selenocysteine
  MOD_RES (137)..(137): Selenocysteine
  MOD_RES (139)..(139): Selenocysteine
  MOD_RES (141)..(141): Selenocysteine
  MOD_RES (152)..(152): Selenocysteine
  MOD_RES (170)..(170): Selenocysteine
  MOD_RES (174)..(174): Selenocysteine
  MOD_RES (183)..(184): Selenocysteine
  MOD_RES (217)..(217): Selenocysteine
  MOD_RES (228)..(228): Selenocysteine
  MOD_RES (249)..(249): Selenocysteine
  MOD_RES (279)..(279): Selenocysteine
  MOD_RES (288)..(288): Selenocysteine
  MOD_RES (301)..(301): Selenocysteine
  MOD_RES (343)..(343): Selenocysteine
  MOD_RES (395)..(395): Selenocysteine
  MOD_RES (425)..(425): Selenocysteine
  MOD_RES (437)..(437): Selenocysteine
  MOD_RES (442)..(442): Selenocysteine
  MOD_RES (447)..(447): Selenocysteine
  MOD_RES (452)..(452): Selenocysteine
  MOD_RES (479)..(479): Selenocysteine
  MOD_RES (512)..(512): Selenocysteine
  MOD_RES (577)..(577): Selenocysteine
  MOD_RES (584)..(584): Selenocysteine
  MOD_RES (654)..(654): Selenocysteine
  MOD_RES (705)..(705): Selenocysteine
  MOD_RES (725)..(725): Selenocysteine
  MOD_RES (740)..(740): Selenocysteine
  MOD_RES (746)..(746): Selenocysteine
  MOD_RES (748)..(748): Selenocysteine
  MOD_RES (759)..(759): Selenocysteine
  MOD_RES (764)..(764): Selenocysteine
  MOD_RES (766)..(766): Selenocysteine
  MOD_RES (771)..(771): Selenocysteine
  MOD_RES (818)..(818): Selenocysteine
  MOD_RES (824)..(824): Selenocysteine
  MOD_RES (847)..(847): Selenocysteine
  MOD_RES (857)..(857): Selenocysteine
  MOD_RES (877)..(877): Selenocysteine
  MOD_RES (892)..(892): Selenocysteine
  MOD_RES (903)..(903): Selenocysteine
  MOD_RES (907)..(907): Selenocysteine
  MOD_RES (922)..(922): Selenocysteine
  MOD_RES (933)..(933): Selenocysteine
  MOD_RES (944)..(944): Selenocysteine
  MOD_RES (969)..(969): Selenocysteine
  MOD_RES (1001)..(1001): Selenocysteine
  MOD_RES (1018)..(1018): Selenocysteine
  MOD_RES (1028)..(1028): Selenocysteine
  MOD_RES (1054)..(1054): Selenocysteine
  MOD_RES (1056)..(1056): Selenocysteine
  MOD_RES (1069)..(1069): Selenocysteine
  MOD_RES (1086)..(1086): Selenocysteine
  MOD_RES (1092)..(1092): Selenocysteine
  MOD_RES (1097)..(1097): Selenocysteine
  MOD_RES (1106)..(1106): Selenocysteine
MRPLHYAAWQGRLEPVRLLLRASAAVNAASLDGQIPLHLAAQYGHYEVSEMLLQHQSNPCLVNKAKKXPLDLACEFGRLKVAQLLLNSHLCVALLEGEAKDPCDPNYXXPLHLAAKNGHREVIRQLLRAGIEINRQXKXGXALHEAALYGKXEVVRLLLEGGVDVNIRNXYNQXALDIVNQFXXSQASREIKQLLREASGILKVRALKDFWNLHDPXALNVRAGDVIXVLEQHPDGRWKGHIHESQRGXDRIGYFPPGIVEVVSKRVGIPAARLPSAPXPLRPGFSRXPQPPAEEPPHPLXYSQLPRVGLSPDSPAGDRNSVGSEGSVGSIRSAGSGQSSEGXNGHGPGLLIENAQPLPSAGEDQVLPGLHPPSLADNLSHRPLANCRSGEQIFXQDVRPEQLLEGKDAQAIHNWLSEFQLEGYXAHFLQAGYDVPXISRMXPEDLXAIGVXKPGHRKKIASEIAQLSIAEWLPSYIPXDLLEWLCALGLPQYHKQLVSSGYDSMGLVADLXWEELQEIGVNKLGHQKKLMLGVKRLAELRRGLLQGEALSEGGRRLAKGPELMAIEGLENGEGPAXAGPRLLXFQGSELSPELQAAMAGGGPEPLPLPPARSPSQESIGARSRGSGHSQEQPAPQPSGGDPSPPQERNLPEGXERPPKLCSSLPGQGPPPYVFMYPQGSPSSPAPGPPPGAPWAFSYLAGPPAXPPDPPRPKRRSHSLSRPGPXEGDAEGEAEGPVGSXLGSYAXLXRRPGRSALVRXSPSVXPXPARGXPRSQSFALRARRKGPPPPPPKRLSSVSGPSPEPPPLDESPGPKEGAXGPRRRXLSEPAGPSEPPGPPAPAGPASDXEEEEPGPEGXPPSRGSSGEGLPFAEEGNLXIKQRPKPAGPPPREXPVPPGLDFNLXESDXVKRRPKCREREPLQXALLAFGVASAXPGPAAPLPSPXPGESPPASSLPQPEPSSLPAQGVPXPLAPSPAMQPPVPPCPGPGLESSAASRWNGEXEPPAAPAALLKVPGAGXAPKPVSVACXQLAFSGPKLAPRLGPRPVPPPRPESXGXVGPGQAQQRLEQXSSSLAAALRAAEKSIGXKEQEGXPSASXKHILDDISXMFDALADQLDAMLD

SEQ ID NO: 5029 - protein, 236 aa, Homo sapiens
  MOD_RES (11)..(11): Selenocysteine
  MOD_RES (29)..(29): Selenocysteine
  MOD_RES (36)..(36): Selenocysteine
  MOD_RES (39)..(39): Selenocysteine
  MOD_RES (56)..(56): Selenocysteine
  MOD_RES (61)..(62): Selenocysteine
  MOD_RES (75)..(75): Selenocysteine
  MOD_RES (79)..(79): Selenocysteine
  MOD_RES (116)..(116): Selenocysteine
  MOD_RES (158)..(159): Selenocysteine
  MOD_RES (183)..(183): Selenocysteine
  MOD_RES (193)..(193): Selenocysteine
IYPIMDKSSRXRLALIICNEEFDSIPRRXGAEVDIXGMXMLLQNLGYSVDVKKNLXASDMXXELEAFAHRPEHKXSDSXFLVFMSHGIREGICGKKHSEQVPDILQLNAIFNMLNXKNCPSLKDKPKVIIIQACRGDSPGVVWFKDSVGVSGNLSLPXXEEFEDDAIKKAHIEKDFIAFCSSXPDNVSWRHPXMGSVFIGRLIEHMQEYACSCDVEEIFRKEVKRSFCKGFWNYVC

SEQ ID NO: 5030 - protein, 263 aa, Homo sapiens
  MOD_RES (32)..(32): Selenocysteine
  MOD_RES (69)..(69): Selenocysteine
  MOD_RES (87)..(87): Selenocysteine
  MOD_RES (94)..(94): Selenocysteine
  MOD_RES (97)..(97): Selenocysteine
  MOD_RES (114)..(114): Selenocysteine
  MOD_RES (119)..(120): Selenocysteine
  MOD_RES (133)..(133): Selenocysteine
  MOD_RES (137)..(137): Selenocysteine
  MOD_RES (174)..(174): Selenocysteine
  MOD_RES (203)..(203): Selenocysteine
  MOD_RES (247)..(248): Selenocysteine
  MOD_RES (252)..(252): Selenocysteine
  MOD_RES (254)..(254): Selenocysteine
MADKVLKEKRKLFIRSMGEAPQAVQDNPAMPXSSGSEGNVKLCSLEEAQRIWKQKSAEIYPIMDKSSRXRLALIICNEEFDSIPRRXGAEVDIXGMXMLLQNLGYSVDVKKNLXASDMXXELEAFAHRPEHKXSDSXFLVFMSHGIREGICGKKHSEQVPDILQLNAIFNMLNXKNCPSLKDKPKVIIIQACRGDNVSWRHPXMGSVFIGRLIEHMQEYACSCDVEEIFRKVRFSFEQPDGRAQMPXXERVXLXRCFYLFPGH

SEQ ID NO: 5031 - protein, 311 aa, Homo sapiens
  MOD_RES (32)..(32): Selenocysteine
  MOD_RES (69)..(69): Selenocysteine
  MOD_RES (87)..(87): Selenocysteine
  MOD_RES (94)..(94): Selenocysteine
  MOD_RES (97)..(97): Selenocysteine
  MOD_RES (114)..(114): Selenocysteine
  MOD_RES (119)..(120): Selenocysteine
  MOD_RES (133)..(133): Selenocysteine
  MOD_RES (137)..(137): Selenocysteine
  MOD_RES (174)..(174): Selenocysteine
  MOD_RES (216)..(217): Selenocysteine
  MOD_RES (241)..(241): Selenocysteine
  MOD_RES (251)..(251): Selenocysteine
  MOD_RES (295)..(296): Selenocysteine
  MOD_RES (300)..(300): Selenocysteine
  MOD_RES (302)..(302): Selenocysteine
MADKVLKEKRKLFIRSMGEAPQAVQDNPAMPXSSGSEGNVKLCSLEEAQRIWKQKSAEIYPIMDKSSRXRLALIICNEEFDSIPRRXGAEVDIXGMXMLLQNLGYSVDVKKNLXASDMXXELEAFAHRPEHKXSDSXFLVFMSHGIREGICGKKHSEQVPDILQLNAIFNMLNXKNCPSLKDKPKVIIIQACRGDSPGVVWFKDSVGVSGNLSLPXXEEFEDDAIKKAHIEKDFIAFCSSXPDNVSWRHPXMGSVFIGRLIEHMQEYACSCDVEEIFRKVRFSFEQPDGRAQMPXXERVXLXRCFYLFPGH

SEQ ID NO: 5032 - protein, 88 aa, Homo sapiens
  MOD_RES (28)..(28): Selenocysteine
  MOD_RES (72)..(73): Selenocysteine
  MOD_RES (77)..(77): Selenocysteine
  MOD_RES (79)..(79): Selenocysteine
MADKVLKEKRKLFIRSMGEDNVSWRHPXMGSVFIGRLIEHMQEYACSCDVEEIFRKVRFSFEQPDGRAQMPXXERVXLXRCFYLFPGH

SEQ ID NO: 5033 - protein, 383 aa, Homo sapiens
  MOD_RES (21)..(21): Selenocysteine
  MOD_RES (32)..(32): Selenocysteine
  MOD_RES (49)..(49): Selenocysteine
  MOD_RES (54)..(54): Selenocysteine
  MOD_RES (74)..(74): Selenocysteine
  MOD_RES (86)..(86): Selenocysteine
  MOD_RES (104)..(104): Selenocysteine
  MOD_RES (141)..(141): Selenocysteine
  MOD_RES (159)..(159): Selenocysteine
  MOD_RES (166)..(166): Selenocysteine
  MOD_RES (169)..(169): Selenocysteine
  MOD_RES (186)..(186): Selenocysteine
  MOD_RES (191)..(192): Selenocysteine
  MOD_RES (205)..(205): Selenocysteine
  MOD_RES (209)..(209): Selenocysteine
  MOD_RES (246)..(246): Selenocysteine
  MOD_RES (288)..(289): Selenocysteine
  MOD_RES (313)..(313): Selenocysteine
  MOD_RES (323)..(323): Selenocysteine
  MOD_RES (367)..(368): Selenocysteine
  MOD_RES (372)..(372): Selenocysteine
  MOD_RES (374)..(374): Selenocysteine
MADKVLKEKRKLFIRSMGEGXINGLLDELLQXRVLNKEEMEKVKRENAXVMDKXRALIDSVIPKGAQACQICIXYICEEDSYLAGXLGLSAAPQAVQDNPAMPXSSGSEGNVKLCSLEEAQRIWKQKSAEIYPIMDKSSRXRLALIICNEEFDSIPRRXGAEVDIXGMXMLLQNLGYSVDVKKNLXASDMXXELEAFAHRPEHKXSDSXFLVFMSHGIREGICGKKHSEQVPDILQLNAIFNMLNXKNCPSLKDKPKVIIIQACRGDSPGVVWFKDSVGVSGNLSLPXXEEFEDDAIKKAHIEKDFIAFCSSXPDNVSWRHPXMGSVFIGRLIEHMQEYACSCDVEEIFRKVRFSFEQPDGRAQMPXXERVXLXRCFYLFPGH

SEQ ID NO: 5034 - protein, 110 aa, Homo sapiens
  MOD_RES (21)..(21): Selenocysteine
  MOD_RES (32)..(32): Selenocysteine
  MOD_RES (49)..(49): Selenocysteine
  MOD_RES (54)..(54): Selenocysteine
  MOD_RES (74)..(74): Selenocysteine
  MOD_RES (86)..(86): Selenocysteine
  MOD_RES (103)..(103): Selenocysteine
MADKVLKEKRKLFIRSMGEGXINGLLDELLQXRVLNKEEMEKVKRENAXVMDKXRALIDSVIPKGAQACQICIXYICEEDSYLAGXLGLSADLSNNGQVKPHXSCSHYLQ

SEQ ID NO: 5035 - protein, 404 aa, Homo sapiens
  MOD_RES (21)..(21): Selenocysteine
  MOD_RES (32)..(32): Selenocysteine
  MOD_RES (49)..(49): Selenocysteine
  MOD_RES (54)..(54): Selenocysteine
  MOD_RES (74)..(74): Selenocysteine
  MOD_RES (86)..(86): Selenocysteine
  MOD_RES (94)..(94): Selenocysteine
  MOD_RES (125)..(125): Selenocysteine
  MOD_RES (162)..(162): Selenocysteine
  MOD_RES (180)..(180): Selenocysteine
  MOD_RES (187)..(187): Selenocysteine
  MOD_RES (190)..(190): Selenocysteine
  MOD_RES (207)..(207): Selenocysteine
  MOD_RES (212)..(213): Selenocysteine
  MOD_RES (226)..(226): Selenocysteine
  MOD_RES (230)..(230): Selenocysteine
  MOD_RES (267)..(267): Selenocysteine
  MOD_RES (309)..(310): Selenocysteine
  MOD_RES (334)..(334): Selenocysteine
  MOD_RES (344)..(344): Selenocysteine
  MOD_RES (388)..(389): Selenocysteine
  MOD_RES (393)..(393): Selenocysteine
  MOD_RES (395)..(395): Selenocysteine
MADKVLKEKRKLFIRSMGEGXINGLLDELLQXRVLNKEEMEKVKRENAXVMDKXRALIDSVIPKGAQACQICIXYICEEDSYLAGXLGLSADQXSGNYLNMQDSQGVLSSFPAPQAVQDNPAMPXSSGSEGNVKLCSLEEAQRIWKQKSAEIYPIMDKSSRXRLALIICNEEFDSIPRRXGAEVDIXGMXMLLQNLGYSVDVKKNLXASDMXXELEAFAHRPEHKXSDSXFLVFMSHGIREGICGKKHSEQVPDILQLNAIFNMLNXKNCPSLKDKPKVIIIQACRGDSPGVVWFKDSVGVSGNLSLPXXEEFEDDAIKKAHIEKDFIAFCSSXPDNVSWRHPXMGSVFIGRLIEHMQEYACSCDVEEIFRKVRFSFEQPDGRAQMPXXERVXLXRCFYLFPGH

SEQ ID NO: 5036 - protein, 301 aa, Homo sapiens
  MOD_RES (10)..(10): Selenocysteine
  MOD_RES (15)..(15): Selenocysteine
  MOD_RES (35)..(35): Selenocysteine
  MOD_RES (47)..(47): Selenocysteine
  MOD_RES (55)..(55): Selenocysteine
  MOD_RES (86)..(86): Selenocysteine
  MOD_RES (123)..(123): Selenocysteine
  MOD_RES (141)..(141): Selenocysteine
  MOD_RES (148)..(148): Selenocysteine
  MOD_RES (151)..(151): Selenocysteine
  MOD_RES (168)..(168): Selenocysteine
  MOD_RES (173)..(174): Selenocysteine
  MOD_RES (187)..(187): Selenocysteine
  MOD_RES (191)..(191): Selenocysteine
  MOD_RES (228)..(228): Selenocysteine
  MOD_RES (270)..(271): Selenocysteine
  MOD_RES (295)..(295): Selenocysteine
MEKVKRENAXVMDKXRALIDSVIPKGAQACQICIXYICEEDSYLAGXLGLSADQXSGNYLNMQDSQGVLSSFPAPQAVQDNPAMPXSSGSEGNVKLCSLEEAQRIWKQKSAEIYPIMDKSSRXRLALIICNEEFDSIPRRXGAEVDIXGMXMLLQNLGYSVDVKKNLXASDMXXELEAFAHRPEHKXSDSXFLVFMSHGIREGICGKKHSEQVPDILQLNAIFNMLNXKNCPSLKDKPKVIIIQACRGDSPGVVWFKDSVGVSGNLSLPXXEEFEDDAIKKAHIEKDFIAFCSSXPGKSQS

SEQ ID NO: 5037 - protein, 367 aa, Homo sapiens
  MOD_RES (5)..(5): Selenocysteine
  MOD_RES (16)..(16): Selenocysteine
  MOD_RES (33)..(33): Selenocysteine
  MOD_RES (38)..(38): Selenocysteine
  MOD_RES (58)..(58): Selenocysteine
  MOD_RES (70)..(70): Selenocysteine
  MOD_RES (88)..(88): Selenocysteine
  MOD_RES (125)..(125): Selenocysteine
  MOD_RES (143)..(143): Selenocysteine
  MOD_RES (150)..(150): Selenocysteine
  MOD_RES (153)..(153): Selenocysteine
  MOD_RES (170)..(170): Selenocysteine
  MOD_RES (175)..(176): Selenocysteine
  MOD_RES (189)..(189): Selenocysteine
  MOD_RES (193)..(193): Selenocysteine
  MOD_RES (230)..(230): Selenocysteine
  MOD_RES (272)..(273): Selenocysteine
  MOD_RES (297)..(297): Selenocysteine
  MOD_RES (307)..(307): Selenocysteine
  MOD_RES (351)..(352): Selenocysteine
  MOD_RES (356)..(356): Selenocysteine
  MOD_RES (358)..(358): Selenocysteine
MGEGXINGLLDELLQXRVLNKEEMEKVKRENAXVMDKXRALIDSVIPKGAQACQICIXYICEEDSYLAGXLGLSAAPQAVQDNPAMPXSSGSEGNVKLCSLEEAQRIWKQKSAEIYPIMDKSSRXRLALIICNEEFDSIPRRXGAEVDIXGMXMLLQNLGYSVDVKKNLXASDMXXELEAFAHRPEHKXSDSXFLVFMSHGIREGICGKKHSEQVPDILQLNAIFNMLNXKNCPSLKDKPKVIIIQACRGDSPGVVWFKDSVGVSGNLSLPXXEEFEDDAIKKAHIEKDFIAFCSSXPDNVSWRHPXMGSVFIGRLIEHMQEYACSCDVEEIFRKVRFSFEQPDGRAQMPXXERVXLXRCFYLFPGH

SEQ ID NO: 5038 - protein, 247 aa, Homo sapiens
  MOD_RES (98)..(98): Selenocysteine
  MOD_RES (108)..(108): Selenocysteine
  MOD_RES (145)..(145): Selenocysteine
  MOD_RES (148)..(148): Selenocysteine
  MOD_RES (168)..(168): Selenocysteine
  MOD_RES (176)..(176): Selenocysteine
  MOD_RES (198)..(198): Selenocysteine
  MOD_RES (218)..(218): Selenocysteine
  MOD_RES (222)..(222): Selenocysteine
MKSQGQHWYSSSDKNCKVSFREKLLIIDSNLGVQDVENLKFLCIGLVPNKKLEKSSSASDVFEHLLAEDLLSEEDPFFLAELLYIIRQKKLLQHLNCXKEEVERLLPXRQRVSLFRNLLYELSEGIDSENLKDMIFLLKDSLPKXEMXSLSFLAFLEKQGKIDEDNLXCLEDLCKXVVPKLLRNIEKYKREKAIQIVXPPVDKEAESYQGEEELVSQXDVKXFLEALPEGVFVFLNEGDRGNSPDDL

SEQ ID NO: 5039 - protein, 273 aa, Homo sapiens
  MOD_RES (98)..(98): Selenocysteine
  MOD_RES (108)..(108): Selenocysteine
  MOD_RES (145)..(145): Selenocysteine
  MOD_RES (148)..(148): Selenocysteine
  MOD_RES (168)..(168): Selenocysteine
  MOD_RES (176)..(176): Selenocysteine
  MOD_RES (198)..(198): Selenocysteine
  MOD_RES (218)..(218): Selenocysteine
  MOD_RES (222)..(222): Selenocysteine
  MOD_RES (270)..(270): Selenocysteine
MKSQGQHWYSSSDKNCKVSFREKLLIIDSNLGVQDVENLKFLCIGLVPNKKLEKSSSASDVFEHLLAEDLLSEEDPFFLAELLYIIRQKKLLQHLNCXKEEVERLLPXRQRVSLFRNLLYELSEGIDSENLKDMIFLLKDSLPKXEMXSLSFLAFLEKQGKIDEDNLXCLEDLCKXVVPKLLRNIEKYKREKAIQIVXPPVDKEAESYQGEEELVSQXDVKXFLEALPQESWQNKHAGSNEGSCVQDESEPQRPLCHCQQPQLYLPEGQXRNP

SEQ ID NO: 5040 - protein, 455 aa, Homo sapiens
  MOD_RES (98)..(98): Selenocysteine
  MOD_RES (108)..(108): Selenocysteine
  MOD_RES (145)..(145): Selenocysteine
  MOD_RES (148)..(148): Selenocysteine
  MOD_RES (168)..(168): Selenocysteine
  MOD_RES (176)..(176): Selenocysteine
  MOD_RES (198)..(198): Selenocysteine
  MOD_RES (218)..(218): Selenocysteine
  MOD_RES (222)..(222): Selenocysteine
  MOD_RES (253)..(253): Selenocysteine
  MOD_RES (261)..(261): Selenocysteine
  MOD_RES (290)..(290): Selenocysteine
  MOD_RES (315)..(315): Selenocysteine
  MOD_RES (357)..(357): Selenocysteine
  MOD_RES (375)..(375): Selenocysteine
  MOD_RES (414)..(414): Selenocysteine
  MOD_RES (429)..(429): Selenocysteine
  MOD_RES (439)..(439): Selenocysteine
MKSQGQHWYSSSDKNCKVSFREKLLIIDSNLGVQDVENLKFLCIGLVPNKKLEKSSSASDVFEHLLAEDLLSEEDPFFLAELLYIIRQKKLLQHLNCXKEEVERLLPXRQRVSLFRNLLYELSEGIDSENLKDMIFLLKDSLPKXEMXSLSFLAFLEKQGKIDEDNLXCLEDLCKXVVPKLLRNIEKYKREKAIQIVXPPVDKEAESYQGEEELVSQXDVKXFLEALPQESWQNKHAGSNEILSHVFQWLGFXVHIHNNVXKVEMEMVLQKQKCNPAHADGDCFVFCILXHGRFGAVYSSDEALIPIREIMSHFXALQCPRLAEKPKLFFIQACQGEEIQPSVSIEADALNPEQAPXSLQDSIPAEADFLLGLAXVPGYVSFRHVEEGSWYIQSLCNHLKKLVPRHEDILSILXAVNDDVSRRVDKQGXKKQMPQPAFXLRKKLVFPVPLDALSL

SEQ ID NO: 5041 - protein, 521 aa, Homo sapiens
  MOD_RES (98)..(98): Selenocysteine
  MOD_RES (108)..(108): Selenocysteine
  MOD_RES (145)..(145): Selenocysteine
  MOD_RES (148)..(148): Selenocysteine
  MOD_RES (168)..(168): Selenocysteine
  MOD_RES (176)..(176): Selenocysteine
  MOD_RES (198)..(198): Selenocysteine
  MOD_RES (218)..(218): Selenocysteine
  MOD_RES (222)..(222): Selenocysteine
  MOD_RES (245)..(245): Selenocysteine
  MOD_RES (263)..(263): Selenocysteine
  MOD_RES (268)..(268): Selenocysteine
  MOD_RES (270)..(270): Selenocysteine
  MOD_RES (295)..(295): Selenocysteine
  MOD_RES (303)..(303): Selenocysteine
  MOD_RES (320)..(320): Selenocysteine
  MOD_RES (328)..(328): Selenocysteine
  MOD_RES (357)..(357): Selenocysteine
  MOD_RES (382)..(382): Selenocysteine
  MOD_RES (424)..(424): Selenocysteine
  MOD_RES (442)..(442): Selenocysteine
  MOD_RES (480)..(480): Selenocysteine
  MOD_RES (489)..(489): Selenocysteine
  MOD_RES (499)..(499): Selenocysteine
  MOD_RES (503)..(503): Selenocysteine
  MOD_RES (509)..(509): Selenocysteine
MKSQGQHWYSSSDKNCKVSFREKLLIIDSNLGVQDVENLKFLCIGLVPNKKLEKSSSASDVFEHLLAEDLLSEEDPFFLAELLYIIRQKKLLQHLNCXKEEVERLLPXRQRVSLFRNLLYELSEGIDSENLKDMIFLLKDSLPKXEMXSLSFLAFLEKQGKIDEDNLXCLEDLCKXVVPKLLRNIEKYKREKAIQIVXPPVDKEAESYQGEEELVSQXDVKXFLEALPQESWQNKHAGSNGNRAXNGAPSLVSRGMQGASANXLNSEXSXKRAAVYRMNRNHRGLCVIVNNHSFXSLKDRQGXHKDAEILSHVFQWLGFXVHIHNNVXKVEMEMVLQKQKCNPAHADGDCFVFCILXHGRFGAVYSSDEALIPIREIMSHFXALQCPRLAEKPKLFFIQACQGEEIQPSVSIEADALNPEQAPXSLQDSIPAEADFLLGLAXVPGYVSFRHVEEGSWYIQSLCNHLKKLVPRMLKFLEKXMEIRGRKRXVWGAKQISAXSLPXAISAQXPRPPMRRWSSVS

SEQ ID NO: 5042 - protein, 522 aa, Homo sapiens
  MOD_RES (98)..(98): Selenocysteine
  MOD_RES (108)..(108): Selenocysteine
  MOD_RES (145)..(145): Selenocysteine
  MOD_RES (148)..(148): Selenocysteine
  MOD_RES (168)..(168): Selenocysteine
  MOD_RES (176)..(176): Selenocysteine
  MOD_RES (198)..(198): Selenocysteine
  MOD_RES (218)..(218): Selenocysteine
  MOD_RES (222)..(222): Selenocysteine
  MOD_RES (245)..(245): Selenocysteine
  MOD_RES (263)..(263): Selenocysteine
  MOD_RES (268)..(268): Selenocysteine
  MOD_RES (270)..(270): Selenocysteine
  MOD_RES (295)..(295): Selenocysteine
  MOD_RES (303)..(303): Selenocysteine
  MOD_RES (320)..(320): Selenocysteine
  MOD_RES (328)..(328): Selenocysteine
  MOD_RES (357)..(357): Selenocysteine
  MOD_RES (382)..(382): Selenocysteine
  MOD_RES (424)..(424): Selenocysteine
  MOD_RES (442)..(442): Selenocysteine
  MOD_RES (481)..(481): Selenocysteine
  MOD_RES (496)..(496): Selenocysteine
  MOD_RES (506)..(506): Selenocysteine
MKSQGQHWYSSSDKNCKVSFREKLLIIDSNLGVQDVENLKFLCIGLVPNKKLEKSSSASDVFEHLLAEDLLSEEDPFFLAELLYIIRQKKLLQHLNCXKEEVERLLPXRQRVSLFRNLLYELSEGIDSENLKDMIFLLKDSLPKXEMXSLSFLAFLEKQGKIDEDNLXCLEDLCKXVVPKLLRNIEKYKREKAIQIVXPPVDKEAESYQGEEELVSQXDVKXFLEALPQESWQNKHAGSNGNRAXNGAPSLVSRGMQGASANXLNSEXSXKRAAVYRMNRNHRGLCVIVNNHSFXSLKDRQGXHKDAEILSHVFQWLGFXVHIHNNVXKVEMEMVLQKQKCNPAHADGDCFVFCILXHGRFGAVYSSDEALIPIREIMSHFXALQCPRLAEKPKLFFIQACQGEEIQPSVSIEADALNPEQAPXSLQDSIPAEADFLLGLAXVPGYVSFRHVEEGSWYIQSLCNHLKKLVPRHEDILSILXAVNDDVSRRVDKQGXKKQMPQPAFXLRKKLVFPVPLDALSL

SEQ ID NO: 5043 - protein, 478 aa, Homo sapiens
  MOD_RES (98)..(98): Selenocysteine
  MOD_RES (108)..(108): Selenocysteine
  MOD_RES (145)..(145): Selenocysteine
  MOD_RES (148)..(148): Selenocysteine
  MOD_RES (168)..(168): Selenocysteine
  MOD_RES (176)..(176): Selenocysteine
  MOD_RES (198)..(198): Selenocysteine
  MOD_RES (218)..(218): Selenocysteine
  MOD_RES (222)..(222): Selenocysteine
  MOD_RES (252)..(252): Selenocysteine
  MOD_RES (260)..(260): Selenocysteine
  MOD_RES (277)..(277): Selenocysteine
  MOD_RES (285)..(285): Selenocysteine
  MOD_RES (314)..(314): Selenocysteine
  MOD_RES (339)..(339): Selenocysteine
  MOD_RES (381)..(381): Selenocysteine
  MOD_RES (399)..(399): Selenocysteine
  MOD_RES (437)..(437): Selenocysteine
  MOD_RES (446)..(446): Selenocysteine
  MOD_RES (456)..(456): Selenocysteine
  MOD_RES (460)..(460): Selenocysteine
  MOD_RES (466)..(466): Selenocysteine
MKSQGQHWYSSSDKNCKVSFREKLLIIDSNLGVQDVENLKFLCIGLVPNKKLEKSSSASDVFEHLLAEDLLSEEDPFFLAELLYIIRQKKLLQHLNCXKEEVERLLPXRQRVSLFRNLLYELSEGIDSENLKDMIFLLKDSLPKXEMXSLSFLAFLEKQGKIDEDNLXCLEDLCKXVVPKLLRNIEKYKREKAIQIVXPPVDKEAESYQGEEELVSQXDVKXFLEALPRAAVYRMNRNHRGLCVIVNNHSFXSLKDRQGXHKDAEILSHVFQWLGFXVHIHNNVXKVEMEMVLQKQKCNPAHADGDCFVFCILXHGRFGAVYSSDEALIPIREIMSHFXALQCPRLAEKPKLFFIQACQGEEIQPSVSIEADALNPEQAPXSLQDSIPAEADFLLGLAXVPGYVSFRHVEEGSWYIQSLCNHLKKLVPRMLKFLEKXMEIRGRKRXVWGAKQISAXSLPXAISAQXPRPPMRRWSSVS

SEQ ID NO: 5044 - protein, 479 aa, Homo sapiens
  MOD_RES (98)..(98): Selenocysteine
  MOD_RES (108)..(108): Selenocysteine
  MOD_RES (145)..(145): Selenocysteine
  MOD_RES (148)..(148): Selenocysteine
  MOD_RES (168)..(168): Selenocysteine
  MOD_RES (176)..(176): Selenocysteine
  MOD_RES (198)..(198): Selenocysteine
  MOD_RES (218)..(218): Selenocysteine
  MOD_RES (222)..(222): Selenocysteine
  MOD_RES (252)..(252): Selenocysteine
  MOD_RES (260)..(260): Selenocysteine
  MOD_RES (277)..(277): Selenocysteine
  MOD_RES (285)..(285): Selenocysteine
  MOD_RES (314)..(314): Selenocysteine
  MOD_RES (339)..(339): Selenocysteine
  MOD_RES (381)..(381): Selenocysteine
  MOD_RES (399)..(399): Selenocysteine
  MOD_RES (438)..(438): Selenocysteine
  MOD_RES (453)..(453): Selenocysteine
  MOD_RES (463)..(463): Selenocysteine
MKSQGQHWYSSSDKNCKVSFREKLLIIDSNLGVQDVENLKFLCIGLVPNKKLEKSSSASDVFEHLLAEDLLSEEDPFFLAELLYIIRQKKLLQHLNCXKEEVERLLPXRQRVSLFRNLLYELSEGIDSENLKDMIFLLKDSLPKXEMXSLSFLAFLEKQGKIDEDNLXCLEDLCKXVVPKLLRNIEKYKREKAIQIVXPPVDKEAESYQGEEELVSQXDVKXFLEALPRAAVYRMNRNHRGLCVIVNNHSFXSLKDRQGXHKDAEILSHVFQWLGFXVHIHNNVXKVEMEMVLQKQKCNPAHADGDCFVFCILXHGRFGAVYSSDEALIPIREIMSHFXALQCPRLAEKPKLFFIQACQGEEIQPSVSIEADALNPEQAPXSLQDSIPAEADFLLGLAXVPGYVSFRHVEEGSWYIQSLCNHLKKLVPRHEDILSILXAVNDDVSRRVDKQGXKKQMPQPAFXLRKKLVFPVPLDALSL

SEQ ID NO: 5045 - protein, 118 aa, Homo sapiens
  MOD_RES (98)..(98): Selenocysteine
  MOD_RES (108)..(108): Selenocysteine
MKSQGQHWYSSSDKNCKVSFREKLLIIDSNLGVQDVENLKFLCIGLVPNKKLEKSSSASDVFEHLLAEDLLSEEDPFFLAELLYIIRQKKLLQHLNCXKEEVERLLPXRQRVSLFRPP

SEQ ID NO: 5046 - protein, 168 aa, Homo sapiens
  MOD_RES (21)..(21): Selenocysteine
  MOD_RES (38)..(38): Selenocysteine
  MOD_RES (63)..(63): Selenocysteine
  MOD_RES (65)..(65): Selenocysteine
  MOD_RES (113)..(113): Selenocysteine
  MOD_RES (129)..(129): Selenocysteine
  MOD_RES (134)..(134): Selenocysteine
  MOD_RES (137)..(137): Selenocysteine
  MOD_RES (141)..(141): Selenocysteine
  MOD_RES (152)..(152): Selenocysteine
  MOD_RES (162)..(162): Selenocysteine
  MOD_RES (165)..(165): Selenocysteine
MADEKPSNGVLVHMVKLLIKXFLDGIFDDLMENNVLNXDEIHLIGKCLKFVVSNAENLVDDIXEXAQIAGKIFREHLWNSKKQLSSAFLEIQGAQPSGKLKLCPHAHFHELKXKRADEIYPVMEKERRXCLASXSAXKNSXIFIIEMVLNLXFWGCEIYLKXLDXQWL

SEQ ID NO: 5047 - protein, 294 aa, Homo sapiens
  MOD_RES (21)..(21): Selenocysteine
  MOD_RES (38)..(38): Selenocysteine
  MOD_RES (63)..(63): Selenocysteine
  MOD_RES (65)..(65): Selenocysteine
  MOD_RES (141)..(141): Selenocysteine
  MOD_RES (147)..(147): Selenocysteine
  MOD_RES (164)..(164): Selenocysteine
  MOD_RES (180)..(180): Selenocysteine
  MOD_RES (194)..(194): Selenocysteine
  MOD_RES (223)..(223): Selenocysteine
  MOD_RES (239)..(239): Selenocysteine
  MOD_RES (253)..(253): Selenocysteine
  MOD_RES (269)..(269): Selenocysteine
  MOD_RES (274)..(274): Selenocysteine
  MOD_RES (278)..(278): Selenocysteine
  MOD_RES (285)..(285): Selenocysteine
MADEKPSNGVLVHMVKLLIKXFLDGIFDDLMENNVLNXDEIHLIGKCLKFVVSNAENLVDDIXEXAQIAGKIFREHLWNSKKQLSSDISSDGEREANMPGLNIRNKEFNYLHNRNGSELDLLGMDLLENLGYSVVIKENLXAQEMEXALRQFAAHPEHQSSDSXFLVFMSHSILNGICGXKHWDQEPDVLHDDXIFEIFNNRNCQSLKDKPKMVLGLFGSPLXVEKPVQILMVGSCKVXSVMMLLQRLMWKRXSLLSNLPHHVQHSFEXPNILXQLPXIERLSMXRYFYLFPGN

SEQ ID NO: 5048 - protein, 276 aa, Homo sapiens
  MOD_RES (21)..(21): Selenocysteine
  MOD_RES (38)..(38): Selenocysteine
  MOD_RES (63)..(63): Selenocysteine
  MOD_RES (65)..(65): Selenocysteine
  MOD_RES (141)..(141): Selenocysteine
  MOD_RES (147)..(147): Selenocysteine
  MOD_RES (164)..(164): Selenocysteine
  MOD_RES (180)..(180): Selenocysteine
  MOD_RES (194)..(194): Selenocysteine
  MOD_RES (230)..(231): Selenocysteine
  MOD_RES (240)..(240): Selenocysteine
  MOD_RES (255)..(255): Selenocysteine
  MOD_RES (270)..(270): Selenocysteine
  MOD_RES (274)..(274): Selenocysteine
MADEKPSNGVLVHMVKLLIKXFLDGIFDDLMENNVLNXDEIHLIGKCLKFVVSNAENLVDDIXEXAQIAGKIFREHLWNSKKQLSSDISSDGEREANMPGLNIRNKEFNYLHNRNGSELDLLGMDLLENLGYSVVIKENLXAQEMEXALRQFAAHPEHQSSDSXFLVFMSHSILNGICGXKHWDQEPDVLHDDXIFEIFNNRNCQSLKDKPKVIIMQACRGNGAGIVWFXXDSGKASADXHGRLLQGNICNDAVXKAHVEKDFIAFKSSXPRSXFI

SEQ ID NO: 5049 - protein, 340 aa, Homo sapiens
  MOD_RES (21)..(21): Selenocysteine
  MOD_RES (38)..(38): Selenocysteine
  MOD_RES (63)..(63): Selenocysteine
  MOD_RES (65)..(65): Selenocysteine
  MOD_RES (141)..(141): Selenocysteine
  MOD_RES (147)..(147): Selenocysteine
  MOD_RES (164)..(164): Selenocysteine
  MOD_RES (180)..(180): Selenocysteine
  MOD_RES (194)..(194): Selenocysteine
  MOD_RES (230)..(231): Selenocysteine
  MOD_RES (240)..(240): Selenocysteine
  MOD_RES (255)..(255): Selenocysteine
  MOD_RES (270)..(270): Selenocysteine
  MOD_RES (280)..(280): Selenocysteine
  MOD_RES (315)..(315): Selenocysteine
  MOD_RES (320)..(320): Selenocysteine
  MOD_RES (324)..(324): Selenocysteine
  MOD_RES (331)..(331): Selenocysteine
MADEKPSNGVLVHMVKLLIKXFLDGIFDDLMENNVLNXDEIHLIGKCLKFVVSNAENLVDDIXEXAQIAGKIFREHLWNSKKQLSSDISSDGEREANMPGLNIRNKEFNYLHNRNGSELDLLGMDLLENLGYSVVIKENLXAQEMEXALRQFAAHPEHQSSDSXFLVFMSHSILNGICGXKHWDQEPDVLHDDXIFEIFNNRNCQSLKDKPKVIIMQACRGNGAGIVWFXXDSGKASADXHGRLLQGNICNDAVXKAHVEKDFIAFKSSXPHNVSWRHEXNGSVFISQIIYYFREYSWSHHLEEIFQKVQHSFEXPNILXQLPXIERLSMXRYFYLFPGN

SEQ ID NO: 5050 - protein, 223 aa, Homo sapiens
  MOD_RES (21)..(21): Selenocysteine
  MOD_RES (38)..(38): Selenocysteine
  MOD_RES (63)..(63): Selenocysteine
  MOD_RES (65)..(65): Selenocysteine
  MOD_RES (141)..(141): Selenocysteine
  MOD_RES (154)..(154): Selenocysteine
  MOD_RES (170)..(170): Selenocysteine
  MOD_RES (184)..(184): Selenocysteine
  MOD_RES (213)..(214): Selenocysteine
MADEKPSNGVLVHMVKLLIKXFLDGIFDDLMENNVLNXDEIHLIGKCLKFVVSNAENLVDDIXEXAQIAGKIFREHLWNSKKQLSSDISSDGEREANMPGLNIRNKEFNYLHNRNGSELDLLGMDLLENLGYSVVIKENLXAQMVLGLFGSPLXVEKPVQILMVGSCKVXSVMMLLQRLMWKRXSLLSNLPHHIMFLGDMKQMALSSFPKLSXXSESILGVII

SEQ ID NO: 5051 - protein, 225 aa, Homo sapiens
  MOD_RES (21)..(21): Selenocysteine
  MOD_RES (38)..(38): Selenocysteine
  MOD_RES (63)..(63): Selenocysteine
  MOD_RES (65)..(65): Selenocysteine
  MOD_RES (141)..(141): Selenocysteine
  MOD_RES (154)..(154): Selenocysteine
  MOD_RES (170)..(170): Selenocysteine
  MOD_RES (184)..(184): Selenocysteine
  MOD_RES (200)..(200): Selenocysteine
  MOD_RES (205)..(205): Selenocysteine
  MOD_RES (209)..(209): Selenocysteine
  MOD_RES (216)..(216): Selenocysteine
MADEKPSNGVLVHMVKLLIKXFLDGIFDDLMENNVLNXDEIHLIGKCLKFVVSNAENLVDDIXEXAQIAGKIFREHLWNSKKQLSSDISSDGEREANMPGLNIRNKEFNYLHNRNGSELDLLGMDLLENLGYSVVIKENLXAQMVLGLFGSPLXVEKPVQILMVGSCKVXSVMMLLQRLMWKRXSLLSNLPHHVQHSFEXPNILXQLPXIERLSMXRYFYLFPGN

SEQ ID NO: 5052 - protein, 340 aa, Homo sapiens; identical to SEQ ID NO: 5049
  MOD_RES (21)..(21): Selenocysteine
  MOD_RES (38)..(38): Selenocysteine
  MOD_RES (63)..(63): Selenocysteine
  MOD_RES (65)..(65): Selenocysteine
  MOD_RES (141)..(141): Selenocysteine
  MOD_RES (147)..(147): Selenocysteine
  MOD_RES (164)..(164): Selenocysteine
  MOD_RES (180)..(180): Selenocysteine
  MOD_RES (194)..(194): Selenocysteine
  MOD_RES (230)..(231): Selenocysteine
  MOD_RES (240)..(240): Selenocysteine
  MOD_RES (255)..(255): Selenocysteine
  MOD_RES (270)..(270): Selenocysteine
  MOD_RES (280)..(280): Selenocysteine
  MOD_RES (315)..(315): Selenocysteine
  MOD_RES (320)..(320): Selenocysteine
  MOD_RES (324)..(324): Selenocysteine
  MOD_RES (331)..(331): Selenocysteine

SEQ ID NO: 5053 - protein, 256 aa, Homo sapiens
  MOD_RES (57)..(57): Selenocysteine
  MOD_RES (63)..(63): Selenocysteine
  MOD_RES (80)..(80): Selenocysteine
  MOD_RES (96)..(96): Selenocysteine
  MOD_RES (110)..(110): Selenocysteine
  MOD_RES (146)..(147): Selenocysteine
  MOD_RES (156)..(156): Selenocysteine
  MOD_RES (171)..(171): Selenocysteine
  MOD_RES (186)..(186): Selenocysteine
  MOD_RES (196)..(196): Selenocysteine
  MOD_RES (231)..(231): Selenocysteine
  MOD_RES (236)..(236): Selenocysteine
  MOD_RES (240)..(240): Selenocysteine
  MOD_RES (247)..(247): Selenocysteine
MADISSDGEREANMPGLNIRNKEFNYLHNRNGSELDLLGMDLLENLGYSVVIKENLXAQEMEXALRQFAAHPEHQSSDSXFLVFMSHSILNGICGXKHWDQEPDVLHDDXIFEIFNNRNCQSLKDKPKVIIMQACRGNGAGIVWFXXDSGKASADXHGRLLQGNICNDAVXKAHVEKDFIAFKSSXPHNVSWRHEXNGSVFISQIIYYFREYSWSHHLEEIFQKVQHSFEXPNILXQLPXIERLSMXRYFYLFPGN

SEQ ID NO: 5054 - protein, 139 aa, Homo sapiens
  MOD_RES (57)..(57): Selenocysteine
  MOD_RES (70)..(70): Selenocysteine
  MOD_RES (86)..(86): Selenocysteine
  MOD_RES (100)..(100): Selenocysteine
  MOD_RES (129)..(130): Selenocysteine
MADISSDGEREANMPGLNIRNKEFNYLHNRNGSELDLLGMDLLENLGYSVVIKENLXAQMVLGLFGSPLXVEKPVQILMVGSCKVXSVMMLLQRLMWKRXSLLSNLPHHIMFLGDMKQMALSSFPKLSXXSESILGVII

SEQ ID NO: 5055 - protein, 141 aa, Homo sapiens
  MOD_RES (57)..(57): Selenocysteine
  MOD_RES (70)..(70): Selenocysteine
  MOD_RES (86)..(86): Selenocysteine
  MOD_RES (100)..(100): Selenocysteine
  MOD_RES (116)..(116): Selenocysteine
  MOD_RES (121)..(121): Selenocysteine
  MOD_RES (125)..(125): Selenocysteine
  MOD_RES (132)..(132): Selenocysteine
MADISSDGEREANMPGLNIRNKEFNYLHNRNGSELDLLGMDLLENLGYSVVIKENLXAQMVLGLFGSPLXVEKPVQILMVGSCKVXSVMMLLQRLMWKRXSLLSNLPHHVQHSFEXPNILXQLPXIERLSMXRYFYLFPGN

SEQ ID NO: 5056 - protein, 108 aa, Homo sapiens
  MOD_RES (11)..(11): Selenocysteine
  MOD_RES (39)..(39): Selenocysteine
  MOD_RES (67)..(67): Selenocysteine
MAAPSAGSWSXFQHKELMAADRGRRILGVCGMHPHHQEXLKKNRVVLAKQLLLSELLEHLLEKDIIXLEMRELIQAKVGSFSQNVELLNLLPKRGPQAFDAFCEALHS

SEQ ID NO: 5057 - protein, 452 aa, Homo sapiens
  MOD_RES (11)..(11): Selenocysteine
  MOD_RES (39)..(39): Selenocysteine
  MOD_RES (67)..(67): Selenocysteine
  MOD_RES (109)..(109): Selenocysteine
  MOD_RES (120)..(121): Selenocysteine
  MOD_RES (158)..(158): Selenocysteine
  MOD_RES (160)..(160): Selenocysteine
  MOD_RES (180)..(180): Selenocysteine
  MOD_RES (186)..(186): Selenocysteine
  MOD_RES (211)..(211): Selenocysteine
  MOD_RES (228)..(228): Selenocysteine
  MOD_RES (231)..(231): Selenocysteine
  MOD_RES (247)..(247): Selenocysteine
  MOD_RES (267)..(267): Selenocysteine
  MOD_RES (325)..(325): Selenocysteine
  MOD_RES (360)..(360): Selenocysteine
  MOD_RES (374)..(374): Selenocysteine
  MOD_RES (380)..(380): Selenocysteine
  MOD_RES (424)..(424): Selenocysteine
  MOD_RES (438)..(438): Selenocysteine
  MOD_RES (452)..(452): Selenocysteine
MAAPSAGSWSXFQHKELMAADRGRRILGVCGMHPHHQEXLKKNRVVLAKQLLLSELLEHLLEKDIIXLEMRELIQAKVGSFSQNVELLNLLPKRGPQAFDAFCEALREXKQGHLEDMLLXXLSGLQHVLPPLSCDYDLSLPFPVCESCPLYKKLRLSXDXVEHSLDNKDGPVCLQVKPCXPEFYQXHFQLAYRLQSRPRGLALVLSNVHFXGEKELEFRSGGDVDHSXLVXLFKLLGYDVHVLCDQXAQEMQEKLQNFAQLPAHRVXDSCIVALLSHGVEGAIYGVDGKLLQLQEVFQLFDNANCPSLQNKPKMFFIQACRGDEXDRGVDQQDGKNHAGSPGCEESDAGKEKLPKMRLPXRSDMICGYACLKGXAAMRNXKRGSWYIEALAQVFSERACDMHVADMLVKVNALIKDREGYAPGXEFHRCKEMSEYCSXLCRHLYLFPGHPPX

SEQ ID NO: 5058 - protein, 171 aa, Homo sapiens
  MOD_RES (11)..(11): Selenocysteine
  MOD_RES (39)..(39): Selenocysteine
  MOD_RES (67)..(67): Selenocysteine
  MOD_RES (109)..(109): Selenocysteine
  MOD_RES (120)..(121): Selenocysteine
  MOD_RES (158)..(158): Selenocysteine
  MOD_RES (166)..(166): Selenocysteine
MAAPSAGSWSXFQHKELMAADRGRRILGVCGMHPHHQEXLKKNRVVLAKQLLLSELLEHLLEKDIIXLEMRELIQAKVGSFSQNVELLNLLPKRGPQAFDAFCEALREXKQGHLEDMLLXXLSGLQHVLPPLSCDYDLSLPFPVCESCPLYKKLRLSXEIGSCSVXQAGMQ

SEQ ID NO: 5059 - protein, 117 aa, Homo sapiens
  MOD_RES (4)..(4): Selenocysteine
  MOD_RES (59)..(59): Selenocysteine
  MOD_RES (62)..(62): Selenocysteine
  MOD_RES (67)..(67): Selenocysteine
  MOD_RES (77)..(77): Selenocysteine
  MOD_RES (92)..(92): Selenocysteine
MENXENSVDSKSIKNLEPKIIHGSESMDSGISLDNSYKMDYPEMGLCIIINNKNFHKSXGMXSRSGXDVDAANLREXFRNLKYEVRNKNDLXREEIVELMRDVSKEDHSKRSSFVCV

SEQ ID NO: 5060 - protein, 277 aa, Homo sapiens
  MOD_RES (4)..(4): Selenocysteine
  MOD_RES (59)..(59): Selenocysteine
  MOD_RES (62)..(62): Selenocysteine
  MOD_RES (67)..(67): Selenocysteine
  MOD_RES (77)..(77): Selenocysteine
  MOD_RES (92)..(92): Selenocysteine
  MOD_RES (130)..(130): Selenocysteine
  MOD_RES (140)..(140): Selenocysteine
  MOD_RES (152)..(152): Selenocysteine
  MOD_RES (166)..(166): Selenocysteine
  MOD_RES (174)..(174): Selenocysteine
  MOD_RES (199)..(199): Selenocysteine
  MOD_RES (237)..(237): Selenocysteine
  MOD_RES (245)..(245): Selenocysteine
  MOD_RES (255)..(255): Selenocysteine
  MOD_RES (270)..(270): Selenocysteine
MENXENSVDSKSIKNLEPKIIHGSESMDSGISLDNSYKMDYPEMGLCIIINNKNFHKSXGMXSRSGXDVDAANLREXFRNLKYEVRNKNDLXREEIVELMRDVSKEDHSKRSSFVCVLLSHGEEGIIFGXNGPVDLKKIXNFFRGDRCRSLXGKPKLFIIQACRGXELDCGIEXDSGVDDDMACHKIPVEADFLYAYSXAPGYYSWRNSKDGSWFIQSLCAMLKQYADKLEFMHILXRVNRKVAXEFESFSFDAXFHAKKQIPCIVSMLXKELYFYH

SEQ ID NO: 5061 - protein, 182 aa, Homo sapiens
  MOD_RES (4)..(4): Selenocysteine
  MOD_RES (59)..(59): Selenocysteine
  MOD_RES (62)..(62): Selenocysteine
  MOD_RES (67)..(67): Selenocysteine
  MOD_RES (77)..(77): Selenocysteine
  MOD_RES (92)..(92): Selenocysteine
  MOD_RES (130)..(130): Selenocysteine
  MOD_RES (140)..(140): Selenocysteine
  MOD_RES (152)..(152): Selenocysteine
MENXENSVDSKSIKNLEPKIIHGSESMDSGISLDNSYKMDYPEMGLCIIINNKNFHKSXGMXSRSGXDVDAANLREXFRNLKYEVRNKNDLXREEIVELMRDVSKEDHSKRSSFVCVLLSHGEEGIIFGXNGPVDLKKIXNFFRGDRCRSLXGKPKLFIIQVIILGEIQRMAPGSSSRFVPC

SEQ ID NO: 5062 - protein, 321 aa, Homo sapiens
  MOD_RES (19)..(19): Selenocysteine
  MOD_RES (47)..(47): Selenocysteine
  MOD_RES (79)..(79): Selenocysteine
  MOD_RES (88)..(88): Selenocysteine
  MOD_RES (104)..(104): Selenocysteine
  MOD_RES (124)..(124): Selenocysteine
  MOD_RES (137)..(137): Selenocysteine
  MOD_RES (147)..(147): Selenocysteine
  MOD_RES (163)..(163): Selenocysteine
  MOD_RES (177)..(177): Selenocysteine
  MOD_RES (238)..(238): Selenocysteine
  MOD_RES (251)..(251): Selenocysteine
  MOD_RES (261)..(261): Selenocysteine
  MOD_RES (268)..(268): Selenocysteine
  MOD_RES (272)..(272): Selenocysteine
  MOD_RES (296)..(296): Selenocysteine
  MOD_RES (305)..(305): Selenocysteine
  MOD_RES (312)..(312): Selenocysteine
MADSMQEKQRMAGQMLLQXFFNIDQISPNKKAHPNMEAGPPESGESXDALKLCPHEEFLRLCKERAEEIYPIKERNNRXRLALIICNXEFDHLPPRNGADFDIXGMKELLEGLDYSVDVEENLXARDMESALRAFAXRPEHKSSDSXFLVLMSHGILEGICGXVHDEKKPDVLLYDXIFQIFNNRNCLSLKDKPKVIIVQACRGANRGELWVRDSPASLEVASSQSSENLEEDAVYKXHVEKDFIAFCSSXPHNVSWRDSXMGSIFIXQLIXCFQKYSWCCHLEEVFRKVQQSFEXPRAKAQMPXIERLSMXRYFYLFPGN

SEQ ID NO: 5063 - protein, 147 aa, Homo sapiens
  MOD_RES (23)..(23): Selenocysteine
  MOD_RES (50)..(50): Selenocysteine
  MOD_RES (75)..(75): Selenocysteine
  MOD_RES (103)..(103): Selenocysteine
  MOD_RES (135)..(135): Selenocysteine
  MOD_RES (144)..(144): Selenocysteine
MAEGNHRKKPLKVLESLGKDFLXGVLDNLVEQNVLNWKEEEKKKYYDAKXEDKVRVMADSMQEKQRMAGQMLLQXFFNIDQISPNKKAHPNMEAGPPESGESXDALKLCPHEEFLRLCKERAEEIYPIKERNNRXRLALIICNXEFD

SEQ ID NO: 5064 - protein, 377 aa, Homo sapiens
  MOD_RES (23)..(23): Selenocysteine
  MOD_RES (50)..(50): Selenocysteine
  MOD_RES (75)..(75): Selenocysteine
  MOD_RES (103)..(103): Selenocysteine
  MOD_RES (135)..(135): Selenocysteine
  MOD_RES (144)..(144): Selenocysteine
  MOD_RES (160)..(160): Selenocysteine
  MOD_RES (180)..(180): Selenocysteine
  MOD_RES (193)..(193): Selenocysteine
  MOD_RES (203)..(203): Selenocysteine
  MOD_RES (219)..(219): Selenocysteine
  MOD_RES (233)..(233): Selenocysteine
  MOD_RES (294)..(294): Selenocysteine
  MOD_RES (307)..(307): Selenocysteine
  MOD_RES (317)..(317): Selenocysteine
  MOD_RES (324)..(324): Selenocysteine
  MOD_RES (328)..(328): Selenocysteine
  MOD_RES (352)..(352): Selenocysteine
  MOD_RES (361)..(361): Selenocysteine
  MOD_RES (368)..(368): Selenocysteine
MAEGNHRKKPLKVLESLGKDFLXGVLDNLVEQNVLNWKEEEKKKYYDAKXEDKVRVMADSMQEKQRMAGQMLLQXFFNIDQISPNKKAHPNMEAGPPESGESXDALKLCPHEEFLRLCKERAEEIYPIKERNNRXRLALIICNXEFDHLPPRNGADFDIXGMKELLEGLDYSVDVEENLXARDMESALRAFAXRPEHKSSDSXFLVLMSHGILEGICGXVHDEKKPDVLLYDXIFQIFNNRNCLSLKDKPKVIIVQACRGANRGELWVRDSPASLEVASSQSSENLEEDAVYKXHVEKDFIAFCSSXPHNVSWRDSXMGSIFIXQLIXCFQKYSWCCHLEEVFRKVQQSFEXPRAKAQMPXIERLSMXRYFYLFPGN

SEQ ID NO: 5065 - protein, 72 aa, Homo sapiens
  MOD_RES (1)..(1): Any amino acid
  MOD_RES (9)..(9): Selenocysteine
  MOD_RES (16)..(16): Selenocysteine
  MOD_RES (20)..(20): Selenocysteine
  MOD_RES (40)..(40): Selenocysteine
  MOD_RES (62)..(62): Selenocysteine
  MOD_RES (71)..(71): Selenocysteine
XNVSWRDSXMGSIFIXQLIXCFQKYSWCCHLEEVFRKEAXSSPALLNQLQGAPSLVQLAYLXFCISIKVKXN

SEQ ID NO: 5066 - protein, 496 aa, Homo sapiens
  MOD_RES (77)..(77): Selenocysteine
  MOD_RES (81)..(81): Selenocysteine
  MOD_RES (92)..(92): Selenocysteine
  MOD_RES (119)..(119): Selenocysteine
  MOD_RES (224)..(224): Selenocysteine
  MOD_RES (238)..(238): Selenocysteine
  MOD_RES (280)..(280): Selenocysteine
  MOD_RES (288)..(290): Selenocysteine
  MOD_RES (305)..(305): Selenocysteine
  MOD_RES (343)..(343): Selenocysteine
  MOD_RES (354)..(354): Selenocysteine
  MOD_RES (358)..(358): Selenocysteine
  MOD_RES (390)..(390): Selenocysteine
  MOD_RES (407)..(407): Selenocysteine
  MOD_RES (422)..(422): Selenocysteine
  MOD_RES (436)..(436): Selenocysteine
  MOD_RES (458)..(458): Selenocysteine
  MOD_RES (461)..(461): Selenocysteine
  MOD_RES (484)..(484): Selenocysteine
  MOD_RES (486)..(486): Selenocysteine
MDFSRNLYDIGEQLDSEDLASLKFLSLDYIPQRKQEPIKDALMLFQRLQEKRMLEESNLSFLKELLFRINRLDLLIXYLNXRKEEMERELQXPGRAQISAYRFHFCRMSWAEANSQCQXQSVPFWRRVDHLLIRVMLYQISEEVSRSELRSFKFLLQEEISKCKLDDDMNLLDIFIEMEKRVILGEGKLDILKRVCAQINKSLLKIINDYEEFSKGEELCGVMXISDSPREQDSESQXLDKVYQMKSKPRGYCLIINNHNFAKAREKVPKLHSIRDRNGXHLDAGALXXXFEELHFEIKPHDDCXVEQIYEILKIYQLMDHSNMDCFICCILSHGDKGIIYGXDGQEAPIYELXSQFXGLKCPSLAGKPKVFFIQACQGDNYQKGIPVEXDSEEQPYLEMDLSSPQXRYIPDEADFLLGMAXVNNCVSYRNPAEGXWYIQSLCQSLRERCPRGDDILXILXEVNYEVSNKDDKKNMGKQMPQPXFXLRKKLVFPSD

SEQ ID NO: 5067 - protein, 116 aa, Homo sapiens
  MOD_RES (77)..(77): Selenocysteine
  MOD_RES (81)..(81): Selenocysteine
  MOD_RES (92)..(92): Selenocysteine
MDFSRNLYDIGEQLDSEDLASLKFLSLDYIPQRKQEPIKDALMLFQRLQEKRMLEESNLSFLKELLFRINRLDLLIXYLNXRKEEMERELQXPGRAQISAYRVMLYQISEEVSRSE

SEQ ID NO: 5068 - protein, 124 aa, Homo sapiens
  MOD_RES (77)..(77): Selenocysteine
  MOD_RES (81)..(81): Selenocysteine
  MOD_RES (92)..(92): Selenocysteine
MDFSRNLYDIGEQLDSEDLASLKFLSLDYIPQRKQEPIKDALMLFQRLQEKRMLEESNLSFLKELLFRINRLDLLIXYLNXRKEEMERELQXPGRAQISAYRVMLYQISEEVSRSELRSFKFLL

SEQ ID NO: 5069 - protein, 209 aa, Homo sapiens
  MOD_RES (77)..(77): Selenocysteine
  MOD_RES (81)..(81): Selenocysteine
  MOD_RES (92)..(92): Selenocysteine
  MOD_RES (195)..(195): Selenocysteine
MDFSRNLYDIGEQLDSEDLASLKFLSLDYIPQRKQEPIKDALMLFQRLQEKRMLEESNLSFLKELLFRINRLDLLIXYLNXRKEEMERELQXPGRAQISAYRVMLYQISEEVSRSELRSFKFLLQEEISKCKLDDDMNLLDIFIEMEKRVILGEGKLDILKRVCAQINKSLLKIINDYEEFSKDFGQSLPNEKQXSGILSDHQQSQFCK

SEQ ID NO: 5070 - protein, 198 aa, Homo sapiens
  MOD_RES (77)..(77): Selenocysteine
  MOD_RES (81)..(81): Selenocysteine
  MOD_RES (92)..(92): Selenocysteine
MDFSRNLYDIGEQLDSEDLASLKFLSLDYIPQRKQEPIKDALMLFQRLQEKRMLEESNLSFLKELLFRINRLDLLIXYLNXRKEEMERELQXPGRAQISAYRVMLYQISEEVSRSELRSFKFLLQEEISKCKLDDDMNLLDIFIEMEKRVILGEGKLDILKRVCAQINKSLLKIINDYEEFSKERSSSLEGSPDEFSN

SEQ ID NO: 5071 - protein, 235 aa, Homo sapiens
  MOD_RES (77)..(77): Selenocysteine
  MOD_RES (81)..(81): Selenocysteine
  MOD_RES (92)..(92): Selenocysteine
  MOD_RES (210)..(210): Selenocysteine
  MOD_RES (226)..(226): Selenocysteine
  MOD_RES (232)..(232): Selenocysteine
MDFSRNLYDIGEQLDSEDLASLKFLSLDYIPQRKQEPIKDALMLFQRLQEKRMLEESNLSFLKELLFRINRLDLLIXYLNXRKEEMERELQXPGRAQISAYRVMLYQISEEVSRSELRSFKFLLQEEISKCKLDDDMNLLDIFIEMEKRVILGEGKLDILKRVCAQINKSLLKIINDYEEFSKERSSSLEGSPDEFSNDFGQSLPNEKQXSGILSDHQQSQFCKSXGESAQXSQH

SEQ ID NO: 5072 - protein, 479 aa, Homo sapiens
  MOD_RES (77)..(77): Selenocysteine
  MOD_RES (81)..(81): Selenocysteine
  MOD_RES (92)..(92): Selenocysteine
  MOD_RES (207)..(207): Selenocysteine
  MOD_RES (221)..(221): Selenocysteine
  MOD_RES (263)..(263): Selenocysteine
  MOD_RES (271)..(273): Selenocysteine
  MOD_RES (288)..(288): Selenocysteine
  MOD_RES (326)..(326): Selenocysteine
  MOD_RES (337)..(337): Selenocysteine
  MOD_RES (341)..(341): Selenocysteine
  MOD_RES (373)..(373): Selenocysteine
  MOD_RES (390)..(390): Selenocysteine
  MOD_RES (405)..(405): Selenocysteine
  MOD_RES (419)..(419): Selenocysteine
  MOD_RES (441)..(441): Selenocysteine
  MOD_RES (444)..(444): Selenocysteine
  MOD_RES (467)..(467): Selenocysteine
  MOD_RES (469)..(469): Selenocysteine
MDFSRNLYDIGEQLDSEDLASLKFLSLDYIPQRKQEPIKDALMLFQRLQEKRMLEESNLSFLKELLFRINRLDLLIXYLNXRKEEMERELQXPGRAQISAYRVMLYQISEEVSRSELRSFKFLLQEEISKCKLDDDMNLLDIFIEMEKRVILGEGKLDILKRVCAQINKSLLKIINDYEEFSKERSSSLEGSPDEFSNGEELCGVMXISDSPREQDSESQXLDKVYQMKSKPRGYCLIINNHNFAKAREKVPKLHSIRDRNGXHLDAGALXXXFEELHFEIKPHDDCXVEQIYEILKIYQLMDHSNMDCFICCILSHGDKGIIYGXDGQEAPIYELXSQFXGLKCPSLAGKPKVFFIQACQGDNYQKGIPVEXDSEEQPYLEMDLSSPQXRYIPDEADFLLGMAXVNNCVSYRNPAEGXWYIQSLCQSLRERCPRGDDILXILXEVNYEVSNKDDKKNMGKQMPQPXFXLRKKLVFPSD

SEQ ID NO: 5073 - protein, 395 aa, Homo sapiens
  MOD_RES (77)..(77): Selenocysteine
  MOD_RES (81)..(81): Selenocysteine
  MOD_RES (92)..(92): Selenocysteine
  MOD_RES (187)..(189): Selenocysteine
  MOD_RES (204)..(204): Selenocysteine
  MOD_RES (242)..(242): Selenocysteine
  MOD_RES (253)..(253): Selenocysteine
  MOD_RES (257)..(257): Selenocysteine
  MOD_RES (289)..(289): Selenocysteine
  MOD_RES (306)..(306): Selenocysteine
  MOD_RES (321)..(321): Selenocysteine
  MOD_RES (335)..(335): Selenocysteine
  MOD_RES (357)..(357): Selenocysteine
  MOD_RES (360)..(360): Selenocysteine
  MOD_RES (383)..(383): Selenocysteine
  MOD_RES (385)..(385): Selenocysteine
MDFSRNLYDIGEQLDSEDLASLKFLSLDYIPQRKQEPIKDALMLFQRLQEKRMLEESNLSFLKELLFRINRLDLLIXYLNXRKEEMERELQXPGRAQISAYRVMLYQISEEVSRSELRSFKFLLQEEISKCKLDDDMNLLDIFIEMEKRVILGEGKLDILKRVCAQINKSLLKIINDYEEFSKGALXXXFEELHFEIKPHDDCXVEQIYEILKIYQLMDHSNMDCFICCILSHGDKGIIYGXDGQEAPIYELXSQFXGLKCPSLAGKPKVFFIQACQGDNYQKGIPVEXDSEEQPYLEMDLSSPQXRYIPDEADFLLGMAXVNNCVSYRNPAEGXWYIQSLCQSLRERCPRGDDILXILXEVNYEVSNKDDKKNMGKQMPQPXFXLRKKLVFPSD

SEQ ID NO: 5074 - protein, 464 aa, Homo sapiens
  MOD_RES (77)..(77): Selenocysteine
  MOD_RES (81)..(81): Selenocysteine
  MOD_RES (92)..(92): Selenocysteine
  MOD_RES (192)..(192): Selenocysteine
  MOD_RES (206)..(206): Selenocysteine
  MOD_RES (248)..(248): Selenocysteine
  MOD_RES (256)..(258): Selenocysteine
  MOD_RES (273)..(273): Selenocysteine
  MOD_RES (311)..(311): Selenocysteine
  MOD_RES (322)..(322): Selenocysteine
  MOD_RES (326)..(326): Selenocysteine
  MOD_RES (358)..(358): Selenocysteine
  MOD_RES (375)..(375): Selenocysteine
  MOD_RES (390)..(390): Selenocysteine
  MOD_RES (404)..(404): Selenocysteine
  MOD_RES (426)..(426): Selenocysteine
  MOD_RES (429)..(429): Selenocysteine
  MOD_RES (452)..(452): Selenocysteine
  MOD_RES (454)..(454): Selenocysteine
MDFSRNLYDIGEQLDSEDLASLKFLSLDYIPQRKQEPIKDALMLFQRLQEKRMLEESNLSFLKELLFRINRLDLLIXYLNXRKEEMERELQXPGRAQISAYRVMLYQISEEVSRSELRSFKFLLQEEISKCKLDDDMNLLDIFIEMEKRVILGEGKLDILKRVCAQINKSLLKIINDYEEFSKGEELCGVMXISDSPREQDSESQXLDKVYQMKSKPRGYCLIINNHNFAKAREKVPKLHSIRDRNGXHLDAGALXXXFEELHFEIKPHDDCXVEQIYEILKIYQLMDHSNMDCFICCILSHGDKGIIYGXDGQEAPIYELXSQFXGLKCPSLAGKPKVFFIQACQGDNYQKGIPVEXDSEEQPYLEMDLSSPQXRYIPDEADFLLGMAXVNNCVSYRNPAEGXWYIQSLCQSLRERCPRGDDILXILXEVNYEVSNKDDKKNMGKQMPQPXFXLRKKLVFPSD

SEQ ID NO: 5075 - protein, 278 aa, Homo sapiens
  MOD_RES (77)..(77): Selenocysteine
  MOD_RES (81)..(81): Selenocysteine
  MOD_RES (92)..(92): Selenocysteine
  MOD_RES (192)..(192): Selenocysteine
  MOD_RES (206)..(206): Selenocysteine
  MOD_RES (248)..(248): Selenocysteine
MDFSRNLYDIGEQLDSEDLASLKFLSLDYIPQRKQEPIKDALMLFQRLQEKRMLEESNLSFLKELLFRINRLDLLIXYLNXRKEEMERELQXPGRAQISAYRVMLYQISEEVSRSELRSFKFLLQEEISKCKLDDDMNLLDIFIEMEKRVILGEGKLDILKRVCAQINKSLLKIINDYEEFSKGEELCGVMXISDSPREQDSESQXLDKVYQMKSKPRGYCLIINNHNFAKAREKVPKLHSIRDRNGXHLDAGSHSVAQAGVQWCDLSSLQPPPPWFK

SEQ ID NO: 5076 - protein, 58 aa, Homo sapiens
  MOD_RES (24)..(24): Selenocysteine
  MOD_RES (41)..(41): Selenocysteine
MEGGRRARVVIESKRNFFLGAFPXPFPAEHVELGRLGDSEXAMVPGKGGADGLQQKSL

SEQ ID NO: 5077 - protein, 538 aa, Homo sapiens
  MOD_RES (24)..(24): Selenocysteine
  MOD_RES (41)..(41): Selenocysteine
  MOD_RES (136)..(136): Selenocysteine
  MOD_RES (140)..(140): Selenocysteine
  MOD_RES (151)..(151): Selenocysteine
  MOD_RES (266)..(266): Selenocysteine
  MOD_RES (280)..(280): Selenocysteine
  MOD_RES (322)..(322): Selenocysteine
  MOD_RES (330)..(332): Selenocysteine
  MOD_RES (347)..(347): Selenocysteine
  MOD_RES (385)..(385): Selenocysteine
  MOD_RES (396)..(396): Selenocysteine
  MOD_RES (400)..(400): Selenocysteine
  MOD_RES (432)..(432): Selenocysteine
  MOD_RES (449)..(449): Selenocysteine
  MOD_RES (464)..(464): Selenocysteine
  MOD_RES (478)..(478): Selenocysteine
  MOD_RES (500)..(500): Selenocysteine
  MOD_RES (503)..(503): Selenocysteine
  MOD_RES (526)..(526): Selenocysteine
  MOD_RES (528)..(528): Selenocysteine
MEGGRRARVVIESKRNFFLGAFPXPFPAEHVELGRLGDSEXAMVPGKGGADYILLPFKKMDFSRNLYDIGEQLDSEDLASLKFLSLDYIPQRKQEPIKDALMLFQRLQEKRMLEESNLSFLKELLFRINRLDLLIXYLNXRKEEMERELQXPGRAQISAYRVMLYQISEEVSRSELRSFKFLLQEEISKCKLDDDMNLLDIFIEMEKRVILGEGKLDILKRVCAQINKSLLKIINDYEEFSKERSSSLEGSPDEFSNGEELCGVMXISDSPREQDSESQXLDKVYQMKSKPRGYCLIINNHNFAKAREKVPKLHSIRDRNGXHLDAGALXXXFEELHFEIKPHDDCXVEQIYEILKIYQLMDHSNMDCFICCILSHGDKGIIYGXDGQEAPIYELXSQFXGLKCPSLAGKPKVFFIQACQGDNYQKGIPVEXDSEEQPYLEMDLSSPQXRYIPDEADFLLGMAXVNNCVSYRNPAEGXWYIQSLCQSLRERCPRGDDILXILXEVNYEVSNKDDKKNMGKQMPQPXFXLRKKLVFPSD

SEQ ID NO: 5078 - protein, 149 aa, Homo sapiens
  MOD_RES (89)..(89): Selenocysteine
  MOD_RES (103)..(103): Selenocysteine
  MOD_RES (145)..(145): Selenocysteine
MLYQISEEVSRSELRSFKFLLQEEISKCKLDDDMNLLDIFIEMEKRVILGEGKLDILKRVCAQINKSLLKIINDYEEFSKGEELCGVMXISDSPREQDSESQXLDKVYQMKSKPRGYCLIINNHNFAKAREKVPKLHSIRDRNGXHLDA

SEQ ID NO: 5079 - protein, 83 aa, Homo sapiens
  MOD_RES (58)..(58): Selenocysteine
  MOD_RES (74)..(74): Selenocysteine
  MOD_RES (80)..(80): Selenocysteine
NLLDIFIEMEKRVILGEGKLDILKRVCAQINKSLLKIINDYEEFSKDFGQSLPNEKQXSGILSDHQQSQFCKSXGESAQXSQH

SEQ ID NO: 5080 - protein, 258 aa, Homo sapiens
  MOD_RES (50)..(52): Selenocysteine
  MOD_RES (67)..(67): Selenocysteine
  MOD_RES (105)..(105): Selenocysteine
  MOD_RES (116)..(116): Selenocysteine
  MOD_RES (120)..(120): Selenocysteine
  MOD_RES (152)..(152): Selenocysteine
  MOD_RES (169)..(169): Selenocysteine
  MOD_RES (184)..(184): Selenocysteine
  MOD_RES (198)..(198): Selenocysteine
  MOD_RES (220)..(220): Selenocysteine
  MOD_RES (223)..(223): Selenocysteine
  MOD_RES (246)..(246): Selenocysteine
  MOD_RES (248)..(248): Selenocysteine
NLLDIFIEMEKRVILGEGKLDILKRVCAQINKSLLKIINDYEEFSKGALXXXFEELHFEIKPHDDCXVEQIYEILKIYQLMDHSNMDCFICCILSHGDKGIIYGXDGQEAPIYELXSQFXGLKCPSLAGKPKVFFIQACQGDNYQKGIPVEXDSEEQPYLEMDLSSPQXRYIPDEADFLLGMAXVNNCVSYRNPAEGXWYIQSLCQSLRERCPRGDDILXILXEVNYEVSNKDDKKNMGKQMPQPXFXLRKKLVFPSD

SEQ ID NO: 5081 - protein, 361 aa, Homo sapiens
  MOD_RES (11)..(11): Selenocysteine
  MOD_RES (63)..(63): Selenocysteine
  MOD_RES (67)..(67): Selenocysteine
  MOD_RES (72)..(72): Selenocysteine
  MOD_RES (99)..(99): Selenocysteine
  MOD_RES (121)..(121): Selenocysteine
  MOD_RES (152)..(152): Selenocysteine
  MOD_RES (155)..(155): Selenocysteine
  MOD_RES (158)..(158): Selenocysteine
  MOD_RES (161)..(161): Selenocysteine
  MOD_RES (177)..(177): Selenocysteine
  MOD_RES (193)..(193): Selenocysteine
  MOD_RES (211)..(211): Selenocysteine
  MOD_RES (216)..(216): Selenocysteine
  MOD_RES (223)..(223): Selenocysteine
  MOD_RES (259)..(259): Selenocysteine
  MOD_RES (268)..(268): Selenocysteine
  MOD_RES (298)..(298): Selenocysteine
  MOD_RES (326)..(326): Selenocysteine
MAADDDNGDGXSLFDVFSASPLKNNDEGSLDIYAGLDSAVSDSASKSCVPSRNCLDLYEEILXEEGXAKEAXYNDLQVEYGKCQLQMKELMKKFKEIQXQNFSLINENQSLKKNISALIKXARVEINRKDEEISNLHQRLSEFPHFRNNHKXARXFDXVKXKDLKSRSPHLDDCSKXDHRAKSDVSKDVHHSXSLPNLEKEGKPHSDKRSXSHLPXSVEKHCXNGVWSRSHYQVGEGSSNEDSRRGRKDIRHSQFNRGXERVRKDLSXGCGDGEPRILEASQRLQGHPEKYGKGEPKXESKSSKFKSNSDSDYKGERINSSWEKEXPGERSHSRVDSQSDKKLERQSERSQNINRKEVKSQ

SEQ ID NO: 5082 - protein, 1972 aa, Homo sapiens
  MOD_RES (11)..(11): Selenocysteine
  MOD_RES (63)..(63): Selenocysteine
  MOD_RES (67)..(67): Selenocysteine
  MOD_RES (72)..(72): Selenocysteine
  MOD_RES (99)..(99): Selenocysteine
  MOD_RES (121)..(121): Selenocysteine
  MOD_RES (152)..(152): Selenocysteine
  MOD_RES (155)..(155): Selenocysteine
  MOD_RES (158)..(158): Selenocysteine
  MOD_RES (161)..(161): Selenocysteine
  MOD_RES (177)..(177): Selenocysteine
  MOD_RES (193)..(193): Selenocysteine
  MOD_RES (211)..(211): Selenocysteine
  MOD_RES (216)..(216): Selenocysteine
  MOD_RES (223)..(223): Selenocysteine
  MOD_RES (259)..(259): Selenocysteine
  MOD_RES (268)..(268): Selenocysteine
  MOD_RES (298)..(298): Selenocysteine
  MOD_RES (326)..(326): Selenocysteine
  MOD_RES (398)..(398): Selenocysteine
  MOD_RES (442)..(442): Selenocysteine
  MOD_RES (460)..(460): Selenocysteine
  MOD_RES (469)..(469): Selenocysteine
  MOD_RES (494)..(494): Selenocysteine
  MOD_RES (500)..(500): Selenocysteine
  MOD_RES (504)..(504): Selenocysteine
  MOD_RES (507)..(509): Selenocysteine
  MOD_RES (519)..(519): Selenocysteine
  MOD_RES (549)..(549): Selenocysteine
  MOD_RES (565)..(565): Selenocysteine
  MOD_RES (583)..(583): Selenocysteine
  MOD_RES (602)..(602): Selenocysteine
  MOD_RES (623)..(623): Selenocysteine
  MOD_RES (627)..(627): Selenocysteine
  MOD_RES (630)..(630): Selenocysteine
  MOD_RES (642)..(642): Selenocysteine
  MOD_RES (651)..(651): Selenocysteine
  MOD_RES (667)..(667): Selenocysteine
  MOD_RES (677)..(677): Selenocysteine
  MOD_RES (679)..(679): Selenocysteine
  MOD_RES (690)..(690): Selenocysteine
  MOD_RES (697)..(697): Selenocysteine
  MOD_RES (702)..(702): Selenocysteine
  MOD_RES (719)..(719): Selenocysteine
  MOD_RES (731)..(731): Selenocysteine
  MOD_RES (754)..(755): Selenocysteine
  MOD_RES (759)..(760): Selenocysteine
  MOD_RES (793)..(793): Selenocysteine
  MOD_RES (811)..(811): Selenocysteine
  MOD_RES (819)..(819): Selenocysteine
  MOD_RES (828)..(828): Selenocysteine
  MOD_RES (831)..(831): Selenocysteine
  MOD_RES (898)..(898): Selenocysteine
  MOD_RES (920)..(920): Selenocysteine
  MOD_RES (924)..(924): Selenocysteine
  MOD_RES (944)..(944): Selenocysteine
  MOD_RES (968)..(968): Selenocysteine
  MOD_RES (976)..(976): Selenocysteine
  MOD_RES (986)..(986): Selenocysteine
  MOD_RES (993)..(993): Selenocysteine
  MOD_RES (1010)..(1010): Selenocysteine
  MOD_RES (1019)..(1019): Selenocysteine
  MOD_RES (1077)..(1077): Selenocysteine
  MOD_RES (1093)..(1094): Selenocysteine
  MOD_RES (1169)..(1169): Selenocysteine
  MOD_RES (1228)..(1228): Selenocysteine
  MOD_RES (1261)..(1261): Selenocysteine
  MOD_RES (1277)..(1277): Selenocysteine
  MOD_RES (1282)..(1282): Selenocysteine
  MOD_RES (1293)..(1293): Selenocysteine
  MOD_RES (1301)..(1301): Selenocysteine
  MOD_RES (1331)..(1331): Selenocysteine
  MOD_RES (1340)..(1340): Selenocysteine
  MOD_RES (1348)..(1348): Selenocysteine
  MOD_RES (1358)..(1359): Selenocysteine
  MOD_RES (1413)..(1413): Selenocysteine
  MOD_RES (1445)..(1445): Selenocysteine
  MOD_RES (1468)..(1468): Selenocysteine
  MOD_RES (1513)..(1513): Selenocysteine
  MOD_RES (1549)..(1549): Selenocysteine
  MOD_RES (1552)..(1552): Selenocysteine
  MOD_RES (1567)..(1567): Selenocysteine
  MOD_RES (1590)..(1590): Selenocysteine
  MOD_RES (1611)..(1611): Selenocysteine
  MOD_RES (1621)..(1621): Selenocysteine
  MOD_RES (1656)..(1656): Selenocysteine
  MOD_RES (1682)..(1682): Selenocysteine
  MOD_RES (1687)..(1687): Selenocysteine
  MOD_RES (1692)..(1692): Selenocysteine
  MOD_RES (1694)..(1694): Selenocysteine
  MOD_RES (1704)..(1704): Selenocysteine
  MOD_RES (1733)..(1733): Selenocysteine
  MOD_RES (1741)..(1741): Selenocysteine
  MOD_RES (1793)..(1793): Selenocysteine
  MOD_RES (1798)..(1799): Selenocysteine
  MOD_RES (1828)..(1828): Selenocysteine
  MOD_RES (1853)..(1853): Selenocysteine
  MOD_RES (1856)..(1856): Selenocysteine
  MOD_RES (1861)..(1861): Selenocysteine
  MOD_RES (1865)..(1865): Selenocysteine
  MOD_RES (1872)..(1872): Selenocysteine
  MOD_RES (1888)..(1888): Selenocysteine
  MOD_RES (1897)..(1897): Selenocysteine
  MOD_RES (1909)..(1909): Selenocysteine
  MOD_RES (1911)..(1911): Selenocysteine
  MOD_RES (1930)..(1930): Selenocysteine
  MOD_RES (1950)..(1950): Selenocysteine
  MOD_RES (1966)..(1967): Selenocysteine
MAADDDNGDGXSLFDVFSASPLKNNDEGSLDIYAGLDSAVSDSASKSCVPSRNCLDLYEEILXEEGXAKEAXYNDLQVEYGKCQLQMKELMKKFKEIQXQNFSLINENQSLKKNISALIKXARVEINRKDEEISNLHQRLSEFPHFRNNHKXARXFDXVKXKDLKSRSPHLDDCSKXDHRAKSDVSKDVHHSXSLPNLEKEGKPHSDKRSXSHLPXSVEKHCXNGVWSRSHYQVGEGSSNEDSRRGRKDIRHSQFNRGXERVRKDLSXGCGDGEPRILEASQRLQGHPEKYGKGEPKXESKSSKFKSNSDSDYKGERINSSWEKEXPGERSHSRVDSQSDKKLERQSERSQNINRKEVKSQDKEERKVDQKPKSVVKDQDHWRRSERASLPHSKNEIXFSHNSSKYHLEERRGWEDCKRDKSVNSHSFQDGRCPSSLSNSRXHKNIDSKEVDAMHQWENXPLKAERHRXEDKRKREQESKEENRHIRNEKRVPXEHLQKXNKEXKKXXXDLKKQNEPKXDKGEVLDNGVSEGADNKELAMKAESGPNEXKNKDLKLSFMKKLNLXLSPAKKQPVSQDNQHKIXDIPKSSGVCDSESSMQVKXVAYVPSISEHILGEAAVSEHXMGEXKSXLLEPKVALLAVXEPRIGISEXNKEDENSLLVRSVDNXMHCEEPICGXEXSFPSPMEIQQXESLFPSXGMKQXINNGRAAAPVVMDVLQXDVSQNFGLELDXKRNDNSDYCGISEGMEMKVALSXXVSEXXESILQPSIEEADILPIMLSEDNNPKFEPSVIVXPLVESKSCHLEPCLPKEXLDSSLQQXELMDHRMAXGEXNSVYHDDDNSVLSIDLNHLRPIPEAISPLNSPVRPVAKVLRNESPPQVPVYNNSHKDVFLPNSAHSXSKSQSDLNKENQKPIYKSDKCXEADXCKNSPLDELEEGEIRSDSEXSKPQESFEKNSKRRVSADVRKSKXIPRRGKSXVCLDKDSRKXHVRIHQXNNKWNKRPDKSSRSSKXEKKDKVMSXSSLEKIVPIIAVPSSEQEIMHMLRMIRKHVRKNYMKFKAKFSLIQFHRIIESAILSFXSLIKHLNLHKISKSVXXLQKNLCDIIESKLKQVKKNGIVDRLFEQQLPDMKKKLWKFVDDQLDYLFAKLKKILVCDSKSFGRDSDEGKLEKXSKQNAQYSNSQKRSVDNSNRELLKEKLSKSEDPVHYKSLVGCKKSEENYQDQNNSSINXVKHDIKKNFNICFDNIKNSQSEERSLEVHCPSXPKSEKNEGSSIEDAQXSQHAXLKPERSFEILXEQQASSLXFNLVSDAQMGEIFKSLLQGSDLLDSSVNCXEKSEWELKXPEKQLLEXLKCESIPACXXEELVSGVASPCPKMISDDNWSLLSSEKGPSLSSGLSLPVHPDVLDESCMFEVSXNLPLSKDNVCSVEKSKPCVSSILLEDLAVSLXVPSPLKSDGHLSFLKPDMSSSSXPEEVISAHFSEDALLEEEDASEQDIHLALESDNSSSKSSCSSSWXSRSVAPGFQYHPNLPMHAVIMEKSNDHFIVKIRRAXPSXSSGLKQSMMPDELLXSLPRHGKEADEGPEKEYISCQNXVFKSVEELENSNKNVDGSKSXHEEQSSMIQXQVPDIYEFLKDASDKMGHSDEVADECFKLHQVWEXKVPESIEELPSMEEISHSVGEHLPNXYVDLXKDPVXEXKNLGEFIEVXVLHIDQLGCSGGNLNQSAQILDNSLQADXVGAFIDLXQDASSEAKSEGNHPALAVEDLGCGVIQVDEDNCKEEKAQVANRPLKCIVEEXYIDLXXESPSSCEVKKDELKSEPGSNCDNSELPGXLHNSHKKRRNISDLNHPHKKQRKEXDLXNKEKXKKPXQDSCENXEAHQKKASKKKAPPVXKDPSSLKAXPGIKDSSAALAXSXSLSAKNVIKKKGEIIILWXRNDDREILLECQKRGPSFKXFAYLAAKLDKNPNQVXXQFLHL

SEQ ID NO: 5083 - protein, 95 aa, Homo sapiens
  MOD_RES (64)..(64): Selenocysteine
  MOD_RES (80)..(80): Selenocysteine
  MOD_RES (91)..(91): Selenocysteine
MDEADRRLLRRCRLRLVEELQVDQLWDALLSRELFRPHMIEDIQRAGSGSRRDQARQLIIDLEXRGSQALPLFISCLEDXGQDMLASFLRXNRCS

SEQ ID NO: 5084 - protein, 266 aa, Homo sapiens
  MOD_RES (64)..(64): Selenocysteine
  MOD_RES (80)..(80): Selenocysteine
  MOD_RES (91)..(91): Selenocysteine
  MOD_RES (102)..(102): Selenocysteine
  MOD_RES (107)..(107): Selenocysteine
  MOD_RES (125)..(125): Selenocysteine
  MOD_RES (151)..(151): Selenocysteine
  MOD_RES (167)..(167): Selenocysteine
  MOD_RES (175)..(175): Selenocysteine
  MOD_RES (187)..(187): Selenocysteine
  MOD_RES (197)..(197): Selenocysteine
  MOD_RES (216)..(216): Selenocysteine
  MOD_RES (265)..(265): Selenocysteine
MDEADRRLLRRCRLRLVEELQVDQLWDALLSRELFRPHMIEDIQRAGSGSRRDQARQLIIDLEXRGSQALPLFISCLEDXGQDMLASFLRXNRQAAKLSKPXLENLXPVVLRPEIRKPEVLRPEXPRPVDIGSGGFGDVEQKDHGFEVASXSPEDESPGSNPEPDAXPFQEGLRXFDQLDAISSLPXPSDIFVSYSXFPGFVSWRDPKSGSWYVEXLDDIFEQWAHSEDLQSLLLRVANAVSVKGIYKQMPGCFNFLRKKLFFKXS

SEQ ID NO: 5085 - protein, 254 aa, Homo sapiens
  MOD_RES (64)..(64): Selenocysteine
  MOD_RES (80)..(80): Selenocysteine
  MOD_RES (91)..(91): Selenocysteine
  MOD_RES (102)..(102): Selenocysteine
  MOD_RES (107)..(107): Selenocysteine
  MOD_RES (125)..(125): Selenocysteine
  MOD_RES (179)..(179): Selenocysteine
  MOD_RES (181)..(181): Selenocysteine
  MOD_RES (208)..(208): Selenocysteine
  MOD_RES (223)..(223): Selenocysteine
  MOD_RES (240)..(240): Selenocysteine
MDEADRRLLRRCRLRLVEELQVDQLWDALLSRELFRPHMIEDIQRAGSGSRRDQARQLIIDLEXRGSQALPLFISCLEDXGQDMLASFLRXNRQAAKLSKPXLENLXPVVLRPEIRKPEVLRPEXPRPVDIGSGGFGDVGALESLRGNADLAYILSMEPCGHCLIINNVNFCRESGLRXRXGSNIDCEKLRRRFSSLHFMVEVKGDLXAKASHLQFPGAVYGXDGCPVSVEKIVNIFNGXSCPSLGGKPKLFFI

SEQ ID NO: 5086 - protein, 416 aa, Homo sapiens
  MOD_RES (64)..(64): Selenocysteine
  MOD_RES (80)..(80): Selenocysteine
  MOD_RES (91)..(91): Selenocysteine
  MOD_RES (102)..(102): Selenocysteine
  MOD_RES (107)..(107): Selenocysteine
  MOD_RES (125)..(125): Selenocysteine
  MOD_RES (179)..(179): Selenocysteine
  MOD_RES (181)..(181): Selenocysteine
  MOD_RES (208)..(208): Selenocysteine
  MOD_RES (253)..(253): Selenocysteine
  MOD_RES (270)..(270): Selenocysteine
  MOD_RES (301)..(301): Selenocysteine
  MOD_RES (317)..(317): Selenocysteine
  MOD_RES (325)..(325): Selenocysteine
  MOD_RES (337)..(337): Selenocysteine
  MOD_RES (347)..(347): Selenocysteine
  MOD_RES (366)..(366): Selenocysteine
  MOD_RES (415)..(415): Selenocysteine
MDEADRRLLRRCRLRLVEELQVDQLWDALLSRELFRPHMIEDIQRAGSGSRRDQARQLIIDLEXRGSQALPLFISCLEDXGQDMLASFLRXNRQAAKLSKPXLENLXPVVLRPEIRKPEVLRPEXPRPVDIGSGGFGDVGALESLRGNADLAYILSMEPCGHCLIINNVNFCRESGLRXRXGSNIDCEKLRRRFSSLHFMVEVKGDLXAKKMVLALLELAQQDHGALDCCVVVILSHGCQASHLQFPGAVYGXDGCPVSVEKIVNIFNGXSCPSLGGKPKLFFIQACGGEQKDHGFEVASXSPEDESPGSNPEPDAXPFQEGLRXFDQLDAISSLPXPSDIFVSYSXFPGFVSWRDPKSGSWYVEXLDDIFEQWAHSEDLQSLLLRVANAVSVKGIYKQMPGCFNFLRKKLFFKXS

SEQ ID NO: 5087 - protein, 421 aa, Homo sapiens
  MOD_RES (64)..(64): Selenocysteine
  MOD_RES (80)..(80): Selenocysteine
  MOD_RES (91)..(91): Selenocysteine
  MOD_RES (102)..(102): Selenocysteine
  MOD_RES (107)..(107): Selenocysteine
  MOD_RES (125)..(125): Selenocysteine
  MOD_RES (179)..(179): Selenocysteine
  MOD_RES (181)..(181): Selenocysteine
  MOD_RES (208)..(208): Selenocysteine
  MOD_RES (253)..(253): Selenocysteine
  MOD_RES (270)..(270): Selenocysteine
  MOD_RES (301)..(301): Selenocysteine
  MOD_RES (317)..(317): Selenocysteine
  MOD_RES (325)..(325): Selenocysteine
  MOD_RES (337)..(337): Selenocysteine
  MOD_RES (347)..(347): Selenocysteine
  MOD_RES (366)..(366): Selenocysteine
MDEADRRLLRRCRLRLVEELQVDQLWDALLSRELFRPHMIEDIQRAGSGSRRDQARQLIIDLEXRGSQALPLFISCLEDXGQDMLASFLRXNRQAAKLSKPXLENLXPVVLRPEIRKPEVLRPEXPRPVDIGSGGFGDVGALESLRGNADLAYILSMEPCGHCLIINNVNFCRESGLRXRXGSNIDCEKLRRRFSSLHFMVEVKGDLXAKKMVLALLELAQQDHGALDCCVVVILSHGCQASHLQFPGAVYGXDGCPVSVEKIVNIFNGXSCPSLGGKPKLFFIQACGGEQKDHGFEVASXSPEDESPGSNPEPDAXPFQEGLRXFDQLDAISSLPXPSDIFVSYSXFPGFVSWRDPKSGSWYVEXLDDIFEQWAHSEDLQSLLLRVSAAFLCKGEGRLLRGSVSSWGWGFGVSRAGPNQG

SEQ ID NO: 5088 - protein, 47 aa, Homo sapiens
  MOD_RES (8)..(8): Selenocysteine
  MOD_RES (19)..(19): Selenocysteine
  MOD_RES (24)..(24): Selenocysteine
  MOD_RES (42)..(42): Selenocysteine
MLASFLRXNRQAAKLSKPXLENLXPVVLRPEIRKPEVLRPEXPRPVD

SEQ ID NO: 5089 - protein, 266 aa, Homo sapiens
  MOD_RES (8)..(8): Selenocysteine
  MOD_RES (19)..(19): Selenocysteine
  MOD_RES (24)..(24): Selenocysteine
  MOD_RES (42)..(42): Selenocysteine
  MOD_RES (96)..(96): Selenocysteine
  MOD_RES (98)..(98): Selenocysteine
  MOD_RES (125)..(125): Selenocysteine
  MOD_RES (170)..(170): Selenocysteine
  MOD_RES (187)..(187): Selenocysteine
  MOD_RES (218)..(218): Selenocysteine
  MOD_RES (234)..(234): Selenocysteine
  MOD_RES (242)..(242): Selenocysteine
  MOD_RES (254)..(254): Selenocysteine
  MOD_RES (264)..(264): Selenocysteine
MLASFLRXNRQAAKLSKPXLENLXPVVLRPEIRKPEVLRPEXPRPVDIGSGGFGDVGALESLRGNADLAYILSMEPCGHCLIINNVNFCRESGLRXRXGSNIDCEKLRRRFSSLHFMVEVKGDLXAKKMVLALLELAQQDHGALDCCVVVILSHGCQASHLQFPGAVYGXDGCPVSVEKIVNIFNGXSCPSLGGKPKLFFIQACGGEQKDHGFEVASXSPEDESPGSNPEPDAXPFQEGLRXFDQLDAISSLPXPSDIFVSYSXFP

SEQ ID NO: 5090 - protein, 333 aa, Homo sapiens
  MOD_RES (8)..(8): Selenocysteine
  MOD_RES (19)..(19): Selenocysteine
  MOD_RES (24)..(24): Selenocysteine
  MOD_RES (42)..(42): Selenocysteine
  MOD_RES (96)..(96): Selenocysteine
  MOD_RES (98)..(98): Selenocysteine
  MOD_RES (125)..(125): Selenocysteine
  MOD_RES (170)..(170): Selenocysteine
  MOD_RES (187)..(187): Selenocysteine
  MOD_RES (218)..(218): Selenocysteine
  MOD_RES (234)..(234): Selenocysteine
  MOD_RES (242)..(242): Selenocysteine
  MOD_RES (254)..(254): Selenocysteine
  MOD_RES (264)..(264): Selenocysteine
  MOD_RES (283)..(283): Selenocysteine
  MOD_RES (332)..(332): Selenocysteine
MLASFLRXNRQAAKLSKPXLENLXPVVLRPEIRKPEVLRPEXPRPVDIGSGGFGDVGALESLRGNADLAYILSMEPCGHCLIINNVNFCRESGLRXRXGSNIDCEKLRRRFSSLHFMVEVKGDLXAKKMVLALLELAQQDHGALDCCVVVILSHGCQASHLQFPGAVYGXDGCPVSVEKIVNIFNGXSCPSLGGKPKLFFIQACGGEQKDHGFEVASXSPEDESPGSNPEPDAXPFQEGLRXFDQLDAISSLPXPSDIFVSYSXFPGFVSWRDPKSGSWYVEXLDDIFEQWAHSEDLQSLLLRVANAVSVKGIYKQMPGCFNFLRKKLFFKXS

SEQ ID NO: 5091 - protein, 152 aa, Homo sapiens
  MOD_RES (1)..(1): Any amino acid
  MOD_RES (62)..(62): Selenocysteine
  MOD_RES (78)..(78): Selenocysteine
  MOD_RES (89)..(89): Selenocysteine
  MOD_RES (100)..(100): Selenocysteine
  MOD_RES (105)..(105): Selenocysteine
  MOD_RES (123)..(123): Selenocysteine
  MOD_RES (150)..(150): Selenocysteine
XADRRLLRRCRLRLVEELQVDQLWDALLSRELFRPHMIEDIQRAGSGSRRDQARQLIIDLEXRGSQALPLFISCLEDXGQDMLASFLRXNRQAAKLSKPXLENLXPVVLRPEIRKPEVLRPEXPRPVDIGSGGFGDVGALESLRGNADLXVL

SEQ ID NO: 5092 - protein, 198 aa, Homo sapiens
  MOD_RES (1)..(1): Any amino acid
  MOD_RES (21)..(21): Selenocysteine
  MOD_RES (23)..(23): Selenocysteine
  MOD_RES (50)..(50): Selenocysteine
  MOD_RES (95)..(95): Selenocysteine
  MOD_RES (112)..(112): Selenocysteine
  MOD_RES (148)..(148): Selenocysteine
  MOD_RES (197)..(197): Selenocysteine
XCGHCLIINNVNFCRESGLRXRXGSNIDCEKLRRRFSSLHFMVEVKGDLXAKKMVLALLELAQQDHGALDCCVVVILSHGCQASHLQFPGAVYGXDGCPVSVEKIVNIFNGXSCPSLGGKPKLFFIQACGGGFVSWRDPKSGSWYVEXLDDIFEQWAHSEDLQSLLLRVANAVSVKGIYKQMPGCFNFLRKKLFFKXS

SEQ ID NO: 5093 - protein, 399 aa, Homo sapiens
  MOD_RES (4)..(4): Selenocysteine
  MOD_RES (27)..(27): Selenocysteine
  MOD_RES (66)..(66): Selenocysteine
  MOD_RES (122)..(122): Selenocysteine
  MOD_RES (198)..(198): Selenocysteine
  MOD_RES (233)..(233): Selenocysteine
  MOD_RES (248)..(248): Selenocysteine
  MOD_RES (260)..(260): Selenocysteine
  MOD_RES (296)..(296): Selenocysteine
  MOD_RES (321)..(321): Selenocysteine
  MOD_RES (337)..(337): Selenocysteine
  MOD_RES (354)..(354): Selenocysteine
  MOD_RES (372)..(372): Selenocysteine
MKRXHLFIVGIYFLSSCRAEEGLNFPXYDGKDRVVSLSEKNFKQVLKKYDLLCLYYHEPVSSDKVXQKQFQLKEIVLELVAQVLEHKAIGFVMVDAKKEAKLAKKLGFDEEGSLYILKGDRXIEFDGEFAADVLVEFLLDLIEDPVEIISSKLEVQAFERIEDYIKLIGFFKSEDSEYYKAFEEAAEHFQPYIKFFAXFDKGVAKKLSLKMNEVDFYEPFMDEPIAIPNKPYXEEELVEFVKEHQRPXLRRLRPEEMFEXWEDDLNGIHIVAFAEKSDPDGYEFLEILKQVARDNXDNPDLSILWIDPDDFPLLVAYWEKXFKIDLFRPQIGVVNVXDADSVWMEIPDDDDLPXAEELEDWIEDVLSGKINXEDDDEDDDDDDNSDEEDNDDSDDDDDE

SEQ ID NO: 5094 - protein, 1078 aa, Homo sapiens
  MOD_RES (14)..(14): Selenocysteine
  MOD_RES (17)..(17): Selenocysteine
  MOD_RES (92)..(92): Selenocysteine
  MOD_RES (100)..(100): Selenocysteine
  MOD_RES (103)..(103): Selenocysteine
  MOD_RES (111)..(111): Selenocysteine
  MOD_RES (138)..(138): Selenocysteine
  MOD_RES (145)..(145): Selenocysteine
  MOD_RES (151)..(151): Selenocysteine
  MOD_RES (186)..(186): Selenocysteine
  MOD_RES (195)..(195): Selenocysteine
  MOD_RES (211)..(211): Selenocysteine
  MOD_RES (263)..(263): Selenocysteine
  MOD_RES (289)..(289): Selenocysteine
  MOD_RES (317)..(317): Selenocysteine
  MOD_RES (355)..(355): Selenocysteine
  MOD_RES (372)..(372): Selenocysteine
  MOD_RES (389)..(389): Selenocysteine
  MOD_RES (396)..(396): Selenocysteine
  MOD_RES (406)..(406): Selenocysteine
  MOD_RES (412)..(412): Selenocysteine
  MOD_RES (436)..(436): Selenocysteine
  MOD_RES (445)..(445): Selenocysteine
  MOD_RES (470)..(470): Selenocysteine
  MOD_RES (478)..(478): Selenocysteine
  MOD_RES (550)..(550): Selenocysteine
  MOD_RES (560)..(560): Selenocysteine
  MOD_RES (577)..(577): Selenocysteine
  MOD_RES (596)..(596): Selenocysteine
  MOD_RES (609)..(609): Selenocysteine
  MOD_RES (617)..(617): Selenocysteine
  MOD_RES (627)..(627): Selenocysteine
  MOD_RES (640)..(640): Selenocysteine
  MOD_RES (646)..(646): Selenocysteine
  MOD_RES (676)..(676): Selenocysteine
  MOD_RES (699)..(699): Selenocysteine
  MOD_RES (712)..(712): Selenocysteine
  MOD_RES (732)..(732): Selenocysteine
  MOD_RES (745)..(745): Selenocysteine
  MOD_RES (764)..(764): Selenocysteine
  MOD_RES (780)..(780): Selenocysteine
  MOD_RES (808)..(808): Selenocysteine
  MOD_RES (828)..(828): Selenocysteine
  MOD_RES (868)..(868): Selenocysteine
  MOD_RES (876)..(876): Selenocysteine
  MOD_RES (888)..(888): Selenocysteine
  MOD_RES (906)..(906): Selenocysteine
  MOD_RES (909)..(909): Selenocysteine
  MOD_RES (939)..(939): Selenocysteine
  MOD_RES (949)..(949): Selenocysteine
  MOD_RES (972)..(972): Selenocysteine
  MOD_RES (974)..(974): Selenocysteine
  MOD_RES (993)..(993): Selenocysteine
  MOD_RES (1006)..(1006): Selenocysteine
  MOD_RES (1008)..(1008): Selenocysteine
  MOD_RES (1021)..(1021): Selenocysteine
  MOD_RES (1026)..(1026): Selenocysteine
  MOD_RES (1030)..(1030): Selenocysteine
  MOD_RES (1070)..(1070): Selenocysteine
  MOD_RES (1072)..(1072): Selenocysteine
MAFYSCCWVLLALXWHXSAYGPDQRAQKKGDIILGGLFPIHFGVAAKDQDLKSRPESVECIRYNFRGFRWLQAMIFAIEEINSSPALLPNLXLGYRIFDXCNXVSKALEAXLSFVAQNKIDSLNLDEFCNCSEHIPSXIAVVGAXGSGVSXAVANLLGLFYIPQVSYASSSRLLSNKNQFKSFLRXIPNDEHQAXAMADIIEYFRWNWVGXIAADDDYGRPGIEKFREEAEERDICIDFSELISQYSDEEEIQHVVEVIQNSXAKVIVVFSSGPDLEPLIKEIVRRNIXGKIWLASEAWASSSLIAMPQYFHVVGGXIGFALKAGQIPGFREFLKKVHPRKSVHNGFAKEFWEEXFNCHLQEGAKGPLPVDXFLRGHEESGDRFSNSSXAFRPLCXGDENISSVEXPYIDYXHLRISYNVYLAVYSIAHALQDIYXCLPGRGLFXNGSCADIKKVEAWQVLKHLRHLNFXNNMGEQVXFDECGDLVGNYSIINWHLSPEDGSIVFKEVGYYNVYAKKGERLFINEEKILWSGFSREVPFSNCSRDCLAGXRKGIIEGEPXCCFECVECPDGEYSDEXDASACNKCPDDFWSNENHXSCIAKEIEFLSWXEPFGIALXLFAVLGIFLXAFVLGVFIKFRNXPIVKAXNRELSYLLLFSLLCCFSSSLFFIGEPQDWXCRLRQPAFGISFVLCISCILVKXNRVLLVFEAKIPXSFHRKWWGLNLQFLLVFLCXFMQIVICVIWLYXAPPSSYRNQELEDEIIFIXCHEGSLMALGFLIGYXCLLAAICFFFAFKSRKLPENFNEAKFIXFSMLIFFIVWISFIPAYASXYGKFVSAVEVIAILAASFGLLACIFFNKIYIILFKPSRNXIEEVRCSXAAHAFKVAARAXLRRSNVSRKRSSSLGGSXGSXPSSSISSKSNSEDPFPQPERQKQQQPLALXQQEQQQQPLXLPQQQRSQQQPRCKQKVIFGSGXVXFSLSFDEPQKNAMAHRNSXHQNSLEAQKSSDXLXRHEPLLPLQCGEXDLDLXVQEXGLQGPVGGDQRPEVEDPEELSPALVVSSSQSFVISGGGSXVXENVVNS

SEQ ID NO: 5095 - protein, 1088 aa, Homo sapiens
  MOD_RES (14)..(14): Selenocysteine
  MOD_RES (17)..(17): Selenocysteine
  MOD_RES (92)..(92): Selenocysteine
  MOD_RES (100)..(100): Selenocysteine
  MOD_RES (103)..(103): Selenocysteine
  MOD_RES (111)..(111): Selenocysteine
  MOD_RES (138)..(138): Selenocysteine
  MOD_RES (145)..(145): Selenocysteine
  MOD_RES (151)..(151): Selenocysteine
  MOD_RES (186)..(186): Selenocysteine
  MOD_RES (195)..(195): Selenocysteine
  MOD_RES (211)..(211): Selenocysteine
  MOD_RES (263)..(263): Selenocysteine
  MOD_RES (289)..(289): Selenocysteine
  MOD_RES (317)..(317): Selenocysteine
  MOD_RES (355)..(355): Selenocysteine
  MOD_RES (372)..(372): Selenocysteine
  MOD_RES (389)..(389): Selenocysteine
  MOD_RES (396)..(396): Selenocysteine
  MOD_RES (406)..(406): Selenocysteine
  MOD_RES (412)..(412): Selenocysteine
  MOD_RES (436)..(436): Selenocysteine
  MOD_RES (445)..(445): Selenocysteine
  MOD_RES (470)..(470): Selenocysteine
  MOD_RES (478)..(478): Selenocysteine
  MOD_RES (539)..(539): Selenocysteine
  MOD_RES (560)..(560): Selenocysteine
  MOD_RES (570)..(570): Selenocysteine
  MOD_RES (587)..(587): Selenocysteine
  MOD_RES (606)..(606): Selenocysteine
  MOD_RES (619)..(619): Selenocysteine
  MOD_RES (627)..(627): Selenocysteine
  MOD_RES (637)..(637): Selenocysteine
  MOD_RES (650)..(650): Selenocysteine
  MOD_RES (656)..(656): Selenocysteine
  MOD_RES (686)..(686): Selenocysteine
  MOD_RES (709)..(709): Selenocysteine
  MOD_RES (722)..(722): Selenocysteine
  MOD_RES (742)..(742): Selenocysteine
  MOD_RES (755)..(755): Selenocysteine
  MOD_RES (774)..(774): Selenocysteine
  MOD_RES (790)..(790): Selenocysteine
  MOD_RES (818)..(818): Selenocysteine
  MOD_RES (838)..(838): Selenocysteine
  MOD_RES (878)..(878): Selenocysteine
  MOD_RES (886)..(886): Selenocysteine
  MOD_RES (898)..(898): Selenocysteine
  MOD_RES (916)..(916): Selenocysteine
  MOD_RES (919)..(919): Selenocysteine
  MOD_RES (949)..(949): Selenocysteine
  MOD_RES (959)..(959): Selenocysteine
  MOD_RES (982)..(982): Selenocysteine
  MOD_RES (984)..(984): Selenocysteine
  MOD_RES (1003)..(1003): Selenocysteine
  MOD_RES (1016)..(1016): Selenocysteine
  MOD_RES (1018)..(1018): Selenocysteine
  MOD_RES (1031)..(1031): Selenocysteine
  MOD_RES (1036)..(1036): Selenocysteine
  MOD_RES (1040)..(1040): Selenocysteine
  MOD_RES (1080)..(1080): Selenocysteine
  MOD_RES (1082)..(1082): Selenocysteine
MAFYSCCWVLLALXWHXSAYGPDQRAQKKGDIILGGLFPIHFGVAAKDQDLKSRPESVECIRYNFRGFRWLQAMIFAIEEINSSPALLPNLXLGYRIFDXCNXVSKALEAXLSFVAQNKIDSLNLDEFCNCSEHIPSXIAVVGAXGSGVSXAVANLLGLFYIPQVSYASSSRLLSNKNQFKSFLRXIPNDEHQAXAMADIIEYFRWNWVGXIAADDDYGRPGIEKFREEAEERDICIDFSELISQYSDEEEIQHVVEVIQNSXAKVIVVFSSGPDLEPLIKEIVRRNIXGKIWLASEAWASSSLIAMPQYFHVVGGXIGFALKAGQIPGFREFLKKVHPRKSVHNGFAKEFWEEXFNCHLQEGAKGPLPVDXFLRGHEESGDRFSNSSXAFRPLCXGDENISSVEXPYIDYXHLRISYNVYLAVYSIAHALQDIYXCLPGRGLFXNGSCADIKKVEAWQVLKHLRHLNFXNNMGEQVXFDECGDLVGNYSIINWHLSPEDGSIVFKEVGYYNVYAKKGERLFINEEKILWSGFSREPLXFVLSVLQVPFSNCSRDCLAGXRKGIIEGEPXCCFECVECPDGEYSDEXDASACNKCPDDFWSNENHXSCIAKEIEFLSWXEPFGIALXLFAVLGIFLXAFVLGVFIKFRNXPIVKAXNRELSYLLLFSLLCCFSSSLFFIGEPQDWXCRLRQPAFGISFVLCISCILVKXNRVLLVFEAKIPXSFHRKWWGLNLQFLLVFLCXFMQIVICVIWLYXAPPSSYRNQELEDEIIFIXCHEGSLMALGFLIGYXCLLAAICFFFAFKSRKLPENFNEAKFIXFSMLIFFIVWISFIPAYASXYGKFVSAVEVIAILAASFGLLACIFFNKIYIILFKPSRNXIEEVRCSXAAHAFKVAARAXLRRSNVSRKRSSSLGGSXGSXPSSSISSKSNSEDPFPQPERQKQQQPLALXQQEQQQQPLXLPQQQRSQQQPRCKQKVIFGSGXVXFSLSFDEPQKNAMAHRNSXHQNSLEAQKSSDXLXRHEPLLPLQCGEXDLDLXVQEXGLQGPVGGDQRPEVEDPEELSPALVVSSSQSFVISGGGSXVXENVVNS

SEQ ID NO: 5096 - protein, 527 aa, Homo sapiens
  MOD_RES (28)..(29): Selenocysteine
  MOD_RES (43)..(43): Selenocysteine
  MOD_RES (58)..(58): Selenocysteine
  MOD_RES (88)..(88): Selenocysteine
  MOD_RES (92)..(92): Selenocysteine
  MOD_RES (107)..(107): Selenocysteine
  MOD_RES (115)..(115): Selenocysteine
  MOD_RES (125)..(125): Selenocysteine
  MOD_RES (138)..(138): Selenocysteine
  MOD_RES (150)..(150): Selenocysteine
  MOD_RES (174)..(174): Selenocysteine
  MOD_RES (219)..(219): Selenocysteine
  MOD_RES (238)..(238): Selenocysteine
  MOD_RES (271)..(271): Selenocysteine
  MOD_RES (278)..(278): Selenocysteine
  MOD_RES (285)..(285): Selenocysteine
  MOD_RES (291)..(291): Selenocysteine
  MOD_RES (300)..(300): Selenocysteine
  MOD_RES (361)..(361): Selenocysteine
  MOD_RES (434)..(434): Selenocysteine
  MOD_RES (441)..(441): Selenocysteine
  MOD_RES (483)..(483): Selenocysteine
  MOD_RES (511)..(511): Selenocysteine
MADSRDPASDQMQHWKEQRAAQKADVLXXGAGNPVGDKLNVIXVGPRGPLLVQDVVFXDEMAHFDRERIPERVVHAKGAGAFGYFEVXHDIXKYSKAKVFEHIGKKXPIAVRFSXVAGESGSADXVRDPRGFAVKFYXEDGNWDLVGNNXPIFFIRDPILFPSFIHSQKRNPQXHLKDPDMVWDFWSLRPESLHQVSFLFSDRGIPDGHRHMNGYGSHXFKLVNANGEAVYCKFHYKXDQGIKNLSVEDAARLSQEDPDYGIRDLFNAIAXGKYPSWXFYIQVMXFNQAEXFPFNPFDLXKVWPHKDYPLIPVGKLVLNRNPVNYFAEVEQIAFDPSNMPPGIEASPDKMLQGRLFAYPDXHRHRLGPNYLHIPVNCPYRARVANYQRDGPMCMQDNQGGAPNYYPNSFGAPEQQPSALEHSIQYSGEVRRFNXANDDNVXQVRAFYVNVLNEEQRKRLCENIAGHLKDAQIFIQKKAVKNFXEVHPDYGSHIQALLDKYNAEKPKNAIHXFVQSGSHLAAREKANL

SEQ ID NO: 5097 - protein, 138 aa, Homo sapiens
  MOD_RES (15)..(15): Selenocysteine
  MOD_RES (47)..(47): Selenocysteine
  MOD_RES (59)..(60): Selenocysteine
  MOD_RES (62)..(62): Selenocysteine
  MOD_RES (64)..(64): Selenocysteine
  MOD_RES (123)..(123): Selenocysteine
MADELSEKQVYDAHXKEIDLVNRDPKHLNDDVVKIDFEDVIAEPEGXHSFDGIWKASFXXFXVXKYWFYRLLSALFGIPMALIWGIYFAILSFLHIWAVVPCIKSFLIEIQCISRVYSIYVHXVCDPLFEAVGKIFSN

SEQ ID NO: 5098 - protein, 147 aa, Homo sapiens
  MOD_RES (15)..(15): Selenocysteine
  MOD_RES (47)..(47): Selenocysteine
  MOD_RES (59)..(60): Selenocysteine
  MOD_RES (62)..(62): Selenocysteine
  MOD_RES (64)..(64): Selenocysteine
  MOD_RES (123)..(123): Selenocysteine
MADELSEKQVYDAHXKEIDLVNRDPKHLNDDVVKIDFEDVIAEPEGXHSFDGIWKASFXXFXVXKYWFYRLLSALFGIPMALIWGIYFAILSFLHIWAVVPCIKSFLIEIQCISRVYSIYVHXVCDPLFEAVGKIFSNVRINLQKEI

SEQ ID NO: 5099 - protein, 178 aa, Homo sapiens
  MOD_RES (15)..(15): Selenocysteine
  MOD_RES (46)..(46): Selenocysteine
  MOD_RES (78)..(78): Selenocysteine
  MOD_RES (90)..(91): Selenocysteine
  MOD_RES (93)..(93): Selenocysteine
  MOD_RES (95)..(95): Selenocysteine
  MOD_RES (154)..(154): Selenocysteine
MSGGKYVDSEGHLYXVPIREQGNIYKPNNKAMADELSEKQVYDAHXKEIDLVNRDPKHLNDDVVKIDFEDVIAEPEGXHSFDGIWKASFXXFXVXKYWFYRLLSALFGIPMALIWGIYFAILSFLHIWAVVPCIKSFLIEIQCISRVYSIYVHXVCDPLFEAVGKIFSNVRINLQKEI

SEQ ID NO: 5100 - protein, 167 aa, Homo sapiens
  MOD_RES (35)..(35): Selenocysteine
  MOD_RES (67)..(67): Selenocysteine
  MOD_RES (79)..(80): Selenocysteine
  MOD_RES (82)..(82): Selenocysteine
  MOD_RES (84)..(84): Selenocysteine
  MOD_RES (143)..(143): Selenocysteine
MSGGKYVDSEGNIYKPNNKAMADELSEKQVYDAHXKEIDLVNRDPKHLNDDVVKIDFEDVIAEPEGXHSFDGIWKASFXXFXVXKYWFYRLLSALFGIPMALIWGIYFAILSFLHIWAVVPCIKSFLIEIQCISRVYSIYVHXVCDPLFEAVGKIFSNVRINLQKEI

SEQ ID NO: 5101 - protein, 86 aa, Homo sapiens
  MOD_RES (37)..(37): Selenocysteine
  MOD_RES (50)..(50): Selenocysteine
MSGGKYVDSEVGIRGGAPARACGECPLLLSASPNIPXAALAPALSPLRSXPLALAPLRNGPGRGGEEKPGMFYVFLMERGPREPLS

SEQ ID NO: 5102 - protein, 112 aa, Homo sapiens
  MOD_RES (5)..(5): Selenocysteine
  MOD_RES (87)..(87): Selenocysteine
  MOD_RES (96)..(96): Selenocysteine
  MOD_RES (102)..(102): Selenocysteine
  MOD_RES (104)..(104): Selenocysteine
MGLEXEKADVQLFMDDDSYSHHSGLEYADPEKFADSDQDRDPHRLNSHLKDFNAFCKDLPNGSAFSADNMEECDRCYHCSIVYERRXMLLFCQPAXEPGLNXWXPGLEIGIL

SEQ ID NO: 5103 - protein, 113 aa, Homo sapiens
  MOD_RES (5)..(5): Selenocysteine
  MOD_RES (62)..(63): Selenocysteine
  MOD_RES (89)..(89): Selenocysteine
  MOD_RES (106)..(106): Selenocysteine
MGLEXEKADVQLFMDDDSYSHHSGLEYADPEKFADSDQDRDPHRLNSHLKLGFEDVIAEPVXXHSFDKVWICSHALFEISKYVMYKFLXVFLAIPLAFIAGILFAXLSCLHIW

SEQ ID NO: 5104 - protein, 162 aa, Homo sapiens
  MOD_RES (5)..(5): Selenocysteine
  MOD_RES (62)..(63): Selenocysteine
  MOD_RES (89)..(89): Selenocysteine
  MOD_RES (106)..(106): Selenocysteine
  MOD_RES (121)..(121): Selenocysteine
  MOD_RES (131)..(131): Selenocysteine
  MOD_RES (137)..(137): Selenocysteine
  MOD_RES (146)..(146): Selenocysteine
MGLEXEKADVQLFMDDDSYSHHSGLEYADPEKFADSDQDRDPHRLNSHLKLGFEDVIAEPVXXHSFDKVWICSHALFEISKYVMYKFLXVFLAIPLAFIAGILFAXLSCLHIWILMPFVKXCLMVLPSVQXIWKSVXDVIIAPLCXSVGRCFSSVSLQLSQD

SEQ ID NO: 5105 - protein, 151 aa, Homo sapiens
  MOD_RES (7)..(7): Selenocysteine
  MOD_RES (51)..(51): Selenocysteine
  MOD_RES (63)..(64): Selenocysteine
  MOD_RES (66)..(66): Selenocysteine
  MOD_RES (78)..(78): Selenocysteine
  MOD_RES (127)..(127): Selenocysteine
MMAEEHXDLEAQIVKDIHCKEIDLVNRDPKNINEDIVKVDFEDVIAEPVGXYSFDGVWKVSYXXFXVSKYWCYRLLSXLLGVPLALLWGFLFACISFCHIWAVVPCIKSYLIEIQCISHIYSLCIRXFCNPLFAALGQVCSSIKVVLRKEV

SEQ ID NO: 5106 - protein, 604 aa, Homo sapiens
  MOD_RES (47)..(47): Selenocysteine
  MOD_RES (65)..(65): Selenocysteine
  MOD_RES (67)..(67): Selenocysteine
  MOD_RES (79)..(79): Selenocysteine
  MOD_RES (98)..(98): Selenocysteine
  MOD_RES (103)..(103): Selenocysteine
  MOD_RES (110)..(110): Selenocysteine
  MOD_RES (124)..(125): Selenocysteine
  MOD_RES (143)..(143): Selenocysteine
  MOD_RES (152)..(152): Selenocysteine
  MOD_RES (154)..(154): Selenocysteine
  MOD_RES (166)..(166): Selenocysteine
  MOD_RES (199)..(199): Selenocysteine
  MOD_RES (214)..(214): Selenocysteine
  MOD_RES (250)..(250): Selenocysteine
  MOD_RES (262)..(262): Selenocysteine
  MOD_RES (274)..(274): Selenocysteine
  MOD_RES (287)..(287): Selenocysteine
  MOD_RES (295)..(295): Selenocysteine
  MOD_RES (301)..(301): Selenocysteine
  MOD_RES (340)..(340): Selenocysteine
  MOD_RES (365)..(365): Selenocysteine
  MOD_RES (394)..(394): Selenocysteine
  MOD_RES (399)..(399): Selenocysteine
  MOD_RES (401)..(401): Selenocysteine
  MOD_RES (430)..(430): Selenocysteine
  MOD_RES (441)..(441): Selenocysteine
  MOD_RES (473)..(473): Selenocysteine
  MOD_RES (481)..(481): Selenocysteine
  MOD_RES (504)..(504): Selenocysteine
  MOD_RES (517)..(517): Selenocysteine
  MOD_RES (583)..(583): Selenocysteine
  MOD_RES (586)..(587): Selenocysteine
  MOD_RES (592)..(592): Selenocysteine
  MOD_RES (597)..(597): Selenocysteine
  MOD_RES (601)..(601): Selenocysteine
MAKESGISLKEIQVLARQWKVGPEKRVPAMPGSPVEVKIQSRSSPPXMPPLPPINPGGPRPVSFXPXALSNGINHSPPXLNGAPSPPQRFSNGPASSXSSALXNQQLPAXCGARQLSKLKRFLXXLQQFGNDISPEIGEKVRXLVLALVNSXVXIEEFHCKLQEAXNFPLRPFVIPFLKANLPLLQRELLHCARAAKQXPSQYLAQHEHLLLNXSIASPADSSELLMEVHGNGKRPSPERREENSFDRDXIAPEPPAKRVCXISPAPRHSPALXVPLMNPGGQFHPXPPPLQHYXLEDIAXSHLYREPNKMLEHREVRDRHHSLGLNGGYQDELVDHRLXEREWADEWKHLDHALNCIMEMVEKXRRSMAVLRRCQESDREELNYWKRRYNENXELRKXGXELVSRQHSPGSADSLSNDSQREFNSRPGXGYVPVEFWKKXEEAVNKVKIQAMSEVQKAVAEAEQKAFEVIAXERARMEQXIADVKRQAAEDAFLVINEQEESXENCWNCGRKASEXCSGCNIARYCGSFCQHKDWERHHRLCGQNLHGQSPHGQGRPLLPVGRGSSARSADCSVPSPALDKXSAXXSRSSXPASVXAIDXNGL

SEQ ID NO: 5107 - protein, 614 aa, Homo sapiens
  MOD_RES (15)..(15): Selenocysteine
  MOD_RES (30)..(30): Selenocysteine
  MOD_RES (57)..(57): Selenocysteine
  MOD_RES (75)..(75): Selenocysteine
  MOD_RES (77)..(77): Selenocysteine
  MOD_RES (89)..(89): Selenocysteine
  MOD_RES (108)..(108): Selenocysteine
  MOD_RES (113)..(113): Selenocysteine
  MOD_RES (120)..(120): Selenocysteine
  MOD_RES (134)..(135): Selenocysteine
  MOD_RES (153)..(153): Selenocysteine
  MOD_RES (162)..(162): Selenocysteine
  MOD_RES (164)..(164): Selenocysteine
  MOD_RES (176)..(176): Selenocysteine
  MOD_RES (209)..(209): Selenocysteine
  MOD_RES (224)..(224): Selenocysteine
  MOD_RES (260)..(260): Selenocysteine
  MOD_RES (272)..(272): Selenocysteine
  MOD_RES (284)..(284): Selenocysteine
  MOD_RES (297)..(297): Selenocysteine
  MOD_RES (305)..(305): Selenocysteine
  MOD_RES (311)..(311): Selenocysteine
  MOD_RES (350)..(350): Selenocysteine
  MOD_RES (375)..(375): Selenocysteine
  MOD_RES (404)..(404): Selenocysteine
  MOD_RES (409)..(409): Selenocysteine
  MOD_RES (411)..(411): Selenocysteine
  MOD_RES (440)..(440): Selenocysteine
  MOD_RES (451)..(451): Selenocysteine
  MOD_RES (483)..(483): Selenocysteine
  MOD_RES (491)..(491): Selenocysteine
  MOD_RES (514)..(514): Selenocysteine
  MOD_RES (527)..(527): Selenocysteine
  MOD_RES (593)..(593): Selenocysteine
  MOD_RES (596)..(597): Selenocysteine
  MOD_RES (602)..(602): Selenocysteine
  MOD_RES (607)..(607): Selenocysteine
  MOD_RES (611)..(611): Selenocysteine
MGFHHVGQARLELLXSGDLPALASQRAGIXVGPEKRVPAMPGSPVEVKIQSRSSPPXMPPLPPINPGGPRPVSFXPXALSNGINHSPPXLNGAPSPPQRFSNGPASSXSSALXNQQLPAXCGARQLSKLKRFLXXLQQFGNDISPEIGEKVRXLVLALVNSXVXIEEFHCKLQEAXNFPLRPFVIPFLKANLPLLQRELLHCARAAKQXPSQYLAQHEHLLLNXSIASPADSSELLMEVHGNGKRPSPERREENSFDRDXIAPEPPAKRVCXISPAPRHSPALXVPLMNPGGQFHPXPPPLQHYXLEDIAXSHLYREPNKMLEHREVRDRHHSLGLNGGYQDELVDHRLXEREWADEWKHLDHALNCIMEMVEKXRRSMAVLRRCQESDREELNYWKRRYNENXELRKXGXELVSRQHSPGSADSLSNDSQREFNSRPGXGYVPVEFWKKXEEAVNKVKIQAMSEVQKAVAEAEQKAFEVIAXERARMEQXIADVKRQAAEDAFLVINEQEESXENCWNCGRKASEXCSGCNIARYCGSFCQHKDWERHHRLCGQNLHGQSPHGQGRPLLPVGRGSSARSADCSVPSPALDKXSAXXSRSSXPASVXAIDXNGL

SEQ ID NO: 5108 - protein, 575 aa, Homo sapiens
  MOD_RES (18)..(18): Selenocysteine
  MOD_RES (36)..(36): Selenocysteine
  MOD_RES (38)..(38): Selenocysteine
  MOD_RES (50)..(50): Selenocysteine
  MOD_RES (69)..(69): Selenocysteine
  MOD_RES (74)..(74): Selenocysteine
  MOD_RES (81)..(81): Selenocysteine
  MOD_RES (95)..(96): Selenocysteine
  MOD_RES (114)..(114): Selenocysteine
  MOD_RES (123)..(123): Selenocysteine
  MOD_RES (125)..(125): Selenocysteine
  MOD_RES (137)..(137): Selenocysteine
  MOD_RES (170)..(170): Selenocysteine
  MOD_RES (185)..(185): Selenocysteine
  MOD_RES (221)..(221): Selenocysteine
  MOD_RES (233)..(233): Selenocysteine
  MOD_RES (245)..(245): Selenocysteine
  MOD_RES (258)..(258): Selenocysteine
  MOD_RES (266)..(266): Selenocysteine
  MOD_RES (272)..(272): Selenocysteine
  MOD_RES (311)..(311): Selenocysteine
  MOD_RES (336)..(336): Selenocysteine
  MOD_RES (365)..(365): Selenocysteine
  MOD_RES (370)..(370): Selenocysteine
  MOD_RES (372)..(372): Selenocysteine
  MOD_RES (401)..(401): Selenocysteine
  MOD_RES (412)..(412): Selenocysteine
  MOD_RES (444)..(444): Selenocysteine
  MOD_RES (452)..(452): Selenocysteine
  MOD_RES (475)..(475): Selenocysteine
  MOD_RES (488)..(488): Selenocysteine
  MOD_RES (554)..(554): Selenocysteine
  MOD_RES (557)..(558): Selenocysteine
  MOD_RES (563)..(563): Selenocysteine
  MOD_RES (568)..(568): Selenocysteine
  MOD_RES (572)..(572): Selenocysteine
MPGSPVEVKIQSRSSPPXMPPLPPINPGGPRPVSFXPXALSNGINHSPPXLNGAPSPPQRFSNGPASSXSSALXNQQLPAXCGARQLSKLKRFLXXLQQFGNDISPEIGEKVRXLVLALVNSXVXIEEFHCKLQEAXNFPLRPFVIPFLKANLPLLQRELLHCARAAKQXPSQYLAQHEHLLLNXSIASPADSSELLMEVHGNGKRPSPERREENSFDRDXIAPEPPAKRVCXISPAPRHSPALXVPLMNPGGQFHPXPPPLQHYXLEDIAXSHLYREPNKMLEHREVRDRHHSLGLNGGYQDELVDHRLXEREWADEWKHLDHALNCIMEMVEKXRRSMAVLRRCQESDREELNYWKRRYNENXELRKXGXELVSRQHSPGSADSLSNDSQREFNSRPGXGYVPVEFWKKXEEAVNKVKIQAMSEVQKAVAEAEQKAFEVIAXERARMEQXIADVKRQAAEDAFLVINEQEESXENCWNCGRKASEXCSGCNIARYCGSFCQHKDWERHHRLCGQNLHGQSPHGQGRPLLPVGRGSSARSADCSVPSPALDKXSAXXSRSSXPASVXAIDXNGL

SEQ ID NO: 5109 - protein, 263 aa, Homo sapiens
  MOD_RES (18)..(18): Selenocysteine
  MOD_RES (36)..(36): Selenocysteine
  MOD_RES (38)..(38): Selenocysteine
  MOD_RES (50)..(50): Selenocysteine
  MOD_RES (69)..(69): Selenocysteine
  MOD_RES (74)..(74): Selenocysteine
  MOD_RES (81)..(81): Selenocysteine
  MOD_RES (95)..(96): Selenocysteine
  MOD_RES (114)..(114): Selenocysteine
  MOD_RES (123)..(123): Selenocysteine
  MOD_RES (125)..(125): Selenocysteine
  MOD_RES (137)..(137): Selenocysteine
  MOD_RES (170)..(170): Selenocysteine
  MOD_RES (185)..(185): Selenocysteine
  MOD_RES (231)..(231): Selenocysteine
  MOD_RES (243)..(243): Selenocysteine
  MOD_RES (258)..(258): Selenocysteine
MPGSPVEVKIQSRSSPPXMPPLPPINPGGPRPVSFXPXALSNGINHSPPXLNGAPSPPQRFSNGPASSXSSALXNQQLPAXCGARQLSKLKRFLXXLQQFGNDISPEIGEKVRXLVLALVNSXVXIEEFHCKLQEAXNFPLRPFVIPFLKANLPLLQRELLHCARAAKQXPSQYLAQHEHLLLNXSIASPADSSELLMEVHGNGKRPSPESCIIHLKSMGVASRHEYFSGXLQMPAHPVRNSXLENLWVDCSRSLRSXVLPFP

SEQ ID NO: 5110 - protein, 152 aa, Homo sapiens
  MOD_RES (21)..(21): Selenocysteine
  MOD_RES (29)..(29): Selenocysteine
  MOD_RES (52)..(52): Selenocysteine
  MOD_RES (65)..(65): Selenocysteine
  MOD_RES (131)..(131): Selenocysteine
  MOD_RES (134)..(135): Selenocysteine
  MOD_RES (140)..(140): Selenocysteine
  MOD_RES (145)..(145): Selenocysteine
  MOD_RES (149)..(149): Selenocysteine
MSEVQKAVAEAEQKAFEVIAXERARMEQXIADVKRQAAEDAFLVINEQEESXENCWNCGRKASEXCSGCNIARYCGSFCQHKDWERHHRLCGQNLHGQSPHGQGRPLLPVGRGSSARSADCSVPSPALDKXSAXXSRSSXPASVXAIDXNGL

SEQ ID NO: 5111 - protein, 595 aa, Homo sapiens
  MOD_RES (38)..(38): Selenocysteine
  MOD_RES (56)..(56): Selenocysteine
  MOD_RES (58)..(58): Selenocysteine
  MOD_RES (70)..(70): Selenocysteine
  MOD_RES (89)..(89): Selenocysteine
  MOD_RES (94)..(94): Selenocysteine
  MOD_RES (101)..(101): Selenocysteine
  MOD_RES (115)..(116): Selenocysteine
  MOD_RES (134)..(134): Selenocysteine
  MOD_RES (143)..(143): Selenocysteine
  MOD_RES (145)..(145): Selenocysteine
  MOD_RES (157)..(157): Selenocysteine
  MOD_RES (190)..(190): Selenocysteine
  MOD_RES (205)..(205): Selenocysteine
  MOD_RES (241)..(241): Selenocysteine
  MOD_RES (253)..(253): Selenocysteine
  MOD_RES (265)..(265): Selenocysteine
  MOD_RES (278)..(278): Selenocysteine
  MOD_RES (286)..(286): Selenocysteine
  MOD_RES (292)..(292): Selenocysteine
  MOD_RES (331)..(331): Selenocysteine
  MOD_RES (356)..(356): Selenocysteine
  MOD_RES (385)..(385): Selenocysteine
  MOD_RES (390)..(390): Selenocysteine
  MOD_RES (392)..(392): Selenocysteine
  MOD_RES (421)..(421): Selenocysteine
  MOD_RES (432)..(432): Selenocysteine
  MOD_RES (464)..(464): Selenocysteine
  MOD_RES (472)..(472): Selenocysteine
  MOD_RES (495)..(495): Selenocysteine
  MOD_RES (508)..(508): Selenocysteine
  MOD_RES (574)..(574): Selenocysteine
  MOD_RES (577)..(578): Selenocysteine
  MOD_RES (583)..(583): Selenocysteine
  MOD_RES (588)..(588): Selenocysteine
  MOD_RES (592)..(592): Selenocysteine
MVGVPGAAAFQLGPEKRVPAMPGSPVEVKIQSRSSPPXMPPLPPINPGGPRPVSFXPXALSNGINHSPPXLNGAPSPPQRFSNGPASSXSSALXNQQLPAXCGARQLSKLKRFLXXLQQFGNDISPEIGEKVRXLVLALVNSXVXIEEFHCKLQEAXNFPLRPFVIPFLKANLPLLQRELLHCARAAKQXPSQYLAQHEHLLLNXSIASPADSSELLMEVHGNGKRPSPERREENSFDRDXIAPEPPAKRVCXISPAPRHSPALXVPLMNPGGQFHPXPPPLQHYXLEDIAXSHLYREPNKMLEHREVRDRHHSLGLNGGYQDELVDHRLXEREWADEWKHLDHALNCIMEMVEKXRRSMAVLRRCQESDREELNYWKRRYNENXELRKXGXELVSRQHSPGSADSLSNDSQREFNSRPGXGYVPVEFWKKXEEAVNKVKIQAMSEVQKAVAEAEQKAFEVIAXERARMEQXIADVKRQAAEDAFLVINEQEESXENCWNCGRKASEXCSGCNIARYCGSFCQHKDWERHHRLCGQNLHGQSPHGQGRPLLPVGRGSSARSADCSVPSPALDKXSAXXSRSSXPASVXAIDXNGL

SEQ ID NO: 5112 - protein, 653 aa, Homo sapiens
  MOD_RES (18)..(18): Selenocysteine
  MOD_RES (25)..(25): Selenocysteine
  MOD_RES (71)..(71): Selenocysteine
  MOD_RES (76)..(76): Selenocysteine
  MOD_RES (92)..(92): Selenocysteine
  MOD_RES (98)..(98): Selenocysteine
  MOD_RES (101)..(101): Selenocysteine
  MOD_RES (109)..(109): Selenocysteine
  MOD_RES (136)..(136): Selenocysteine
  MOD_RES (144)..(144): Selenocysteine
  MOD_RES (154)..(154): Selenocysteine
  MOD_RES (157)..(157): Selenocysteine
  MOD_RES (162)..(162): Selenocysteine
  MOD_RES (182)..(183): Selenocysteine
  MOD_RES (201)..(201): Selenocysteine
  MOD_RES (210)..(210): Selenocysteine
  MOD_RES (212)..(212): Selenocysteine
  MOD_RES (224)..(224): Selenocysteine
  MOD_RES (257)..(257): Selenocysteine
  MOD_RES (295)..(295): Selenocysteine
  MOD_RES (299)..(299): Selenocysteine
  MOD_RES (320)..(320): Selenocysteine
  MOD_RES (337)..(337): Selenocysteine
  MOD_RES (388)..(388): Selenocysteine
  MOD_RES (413)..(413): Selenocysteine
  MOD_RES (418)..(418): Selenocysteine
  MOD_RES (444)..(444): Selenocysteine
  MOD_RES (477)..(477): Selenocysteine
  MOD_RES (479)..(479): Selenocysteine
  MOD_RES (521)..(522): Selenocysteine
  MOD_RES (544)..(544): Selenocysteine
  MOD_RES (566)..(566): Selenocysteine
  MOD_RES (600)..(600): Selenocysteine
  MOD_RES (650)..(650): Selenocysteine
MPASRLRDRAASSASGSXCGSMSQXHPVLESGLLASAGCSAPRGPRKGGPAPVDRKAKASAMPDSPAEVKXQPRSXPPSMPPPPPAASQGAXRPPSFXPHXHREDGPAXLPHGRFHGCLKWSMVCLLMNGSSHSPXAINGAPCXPNGFSNGPAXSSXASLSXQHLPPACGARQLSKLKRFLXXLQQFGSDISPEIGERVRXLVLGLVNSXLXIEEFHSKLQEAXNFPLRPFVIPFLKANLPLLQRELLHCARLAKQXPAQYLAQHEQLLLDASASSPIDSSELLLEVNENGKRRXPDRXKENGSDRDPLHPEHLSKRPCXLNPAQRYSPSNGPPQPXPPPHYRLEDIAMAHHFRDAYRHPDPRELRERHRPLVVPGSRQEEVIDHKLXEREWAEEWKHLNNLLNCIMDMVEKXRRSLXVLRRCQEADREELNHWARRYSDAEDXKKGPAPAAARPRSSSAGPEGPQLDVPREFLPRXLXGYVPEDIWRKAEEAVNEVKRQAMSELQKAVSDAERKAHELIXXERAKMERALAEAKRQASEDALXVINQQEDSSESCWNCGRKASEXCSGCNAARYCGSFCQHRDWEKHHHVCGQSLQGPXAVVADPVPGPPEAAHSLGPSLPVGAASPSEAGSAGPSRPGSPSPPGPLDXVPR

SEQ ID NO: 5113 - protein, 130 aa, Homo sapiens
  MOD_RES (18)..(18): Selenocysteine
  MOD_RES (25)..(25): Selenocysteine
  MOD_RES (71)..(71): Selenocysteine
  MOD_RES (76)..(76): Selenocysteine
  MOD_RES (92)..(92): Selenocysteine
  MOD_RES (98)..(98): Selenocysteine
  MOD_RES (101)..(101): Selenocysteine
  MOD_RES (111)..(111): Selenocysteine
  MOD_RES (119)..(119): Selenocysteine
  MOD_RES (129)..(129): Selenocysteine
MPASRLRDRAASSASGSXCGSMSQXHPVLESGLLASAGCSAPRGPRKGGPAPVDRKAKASAMPDSPAEVKXQPRSXPPSMPPPPPAASQGAXRPPSFXPHXLMNGSSHSPXAINGAPCXPNGFSNGPAXS

SEQ ID NO: 5114 - protein, 22 aa, Homo sapiens
  MOD_RES (10)..(10): Selenocysteine
  MOD_RES (15)..(15): Selenocysteine
MPDSPAEVKXQPRSXPPSMPPP

SEQ ID NO: 5115 - protein, 62 aa, Homo sapiens
  MOD_RES (10)..(10): Selenocysteine
  MOD_RES (15)..(15): Selenocysteine
  MOD_RES (31)..(31): Selenocysteine
  MOD_RES (37)..(37): Selenocysteine
  MOD_RES (40)..(40): Selenocysteine
  MOD_RES (48)..(48): Selenocysteine
MPDSPAEVKXQPRSXPPSMPPPPPAASQGAXRPPSFXPHXHREDGPAXLPHGRFHGCLKWSM

SEQ ID NO: 5116 - protein, 132 aa, Homo sapiens
  MOD_RES (10)..(10): Selenocysteine
  MOD_RES (15)..(15): Selenocysteine
  MOD_RES (31)..(31): Selenocysteine
  MOD_RES (37)..(37): Selenocysteine
  MOD_RES (40)..(40): Selenocysteine
  MOD_RES (48)..(48): Selenocysteine
  MOD_RES (75)..(75): Selenocysteine
  MOD_RES (83)..(83): Selenocysteine
  MOD_RES (93)..(93): Selenocysteine
  MOD_RES (96)..(96): Selenocysteine
  MOD_RES (101)..(101): Selenocysteine
  MOD_RES (121)..(122): Selenocysteine
MPDSPAEVKXQPRSXPPSMPPPPPAASQGAXRPPSFXPHXHREDGPAXLPHGRFHGCLKWSMVCLLMNGSSHSPXAINGAPCXPNGFSNGPAXSSXASLSXQHLPPACGARQLSKLKRFLXXLQQFGSDISP

SEQ ID NO: 5117 - protein, 419 aa, Homo sapiens
  MOD_RES (10)..(10): Selenocysteine
  MOD_RES (15)..(15): Selenocysteine
  MOD_RES (31)..(31): Selenocysteine
  MOD_RES (37)..(37): Selenocysteine
  MOD_RES (40)..(40): Selenocysteine
  MOD_RES (48)..(48): Selenocysteine
  MOD_RES (75)..(75): Selenocysteine
  MOD_RES (83)..(83): Selenocysteine
  MOD_RES (93)..(93): Selenocysteine
  MOD_RES (96)..(96): Selenocysteine
  MOD_RES (101)..(101): Selenocysteine
  MOD_RES (121)..(122): Selenocysteine
  MOD_RES (140)..(140): Selenocysteine
  MOD_RES (149)..(149): Selenocysteine
  MOD_RES (151)..(151): Selenocysteine
  MOD_RES (163)..(163): Selenocysteine
  MOD_RES (196)..(196): Selenocysteine
  MOD_RES (234)..(234): Selenocysteine
  MOD_RES (238)..(238): Selenocysteine
  MOD_RES (259)..(259): Selenocysteine
  MOD_RES (276)..(276): Selenocysteine
  MOD_RES (327)..(327): Selenocysteine
  MOD_RES (352)..(352): Selenocysteine
  MOD_RES (357)..(357): Selenocysteine
  MOD_RES (383)..(383): Selenocysteine
MPDSPAEVKXQPRSXPPSMPPPPPAASQGAXRPPSFXPHXHREDGPAXLPHGRFHGCLKWSMVCLLMNGSSHSPXAINGAPCXPNGFSNGPAXSSXASLSXQHLPPACGARQLSKLKRFLXXLQQFGSDISPEIGERVRXLVLGLVNSXLXIEEFHSKLQEAXNFPLRPFVIPFLKANLPLLQRELLHCARLAKQXPAQYLAQHEQLLLDASASSPIDSSELLLEVNENGKRRXPDRXKENGSDRDPLHPEHLSKRPCXLNPAQRYSPSNGPPQPXPPPHYRLEDIAMAHHFRDAYRHPDPRELRERHRPLVVPGSRQEEVIDHKLXEREWAEEWKHLNNLLNCIMDMVEKXRRSLXVLRRCQEADREELNHWARRYSDAEDXKKGPAPAAARPRSSSAGPEGPQLGKHGLVCQEAWSS

SEQ ID NO: 5118 - protein, 121 aa, Homo sapiens
  MOD_RES (10)..(10): Selenocysteine
  MOD_RES (15)..(15): Selenocysteine
  MOD_RES (31)..(31): Selenocysteine
  MOD_RES (37)..(37): Selenocysteine
  MOD_RES (40)..(40): Selenocysteine
  MOD_RES (50)..(50): Selenocysteine
  MOD_RES (58)..(58): Selenocysteine
  MOD_RES (68)..(68): Selenocysteine
  MOD_RES (71)..(71): Selenocysteine
  MOD_RES (76)..(76): Selenocysteine
  MOD_RES (96)..(97): Selenocysteine
  MOD_RES (115)..(115): Selenocysteine
MPDSPAEVKXQPRSXPPSMPPPPPAASQGAXRPPSFXPHXLMNGSSHSPXAINGAPCXPNGFSNGPAXSSXASLSXQHLPPACGARQLSKLKRFLXXLQQFGSDISPEIGERVRXLVLGLV

SEQ ID NO: 5119 - protein, 567 aa, Homo sapiens
  MOD_RES (10)..(10): Selenocysteine
  MOD_RES (15)..(15): Selenocysteine
  MOD_RES (31)..(31): Selenocysteine
  MOD_RES (37)..(37): Selenocysteine
  MOD_RES (40)..(40): Selenocysteine
  MOD_RES (50)..(50): Selenocysteine
  MOD_RES (58)..(58): Selenocysteine
  MOD_RES (68)..(68): Selenocysteine
  MOD_RES (71)..(71): Selenocysteine
  MOD_RES (76)..(76): Selenocysteine
  MOD_RES (96)..(97): Selenocysteine
  MOD_RES (115)..(115): Selenocysteine
  MOD_RES (124)..(124): Selenocysteine
  MOD_RES (126)..(126): Selenocysteine
  MOD_RES (138)..(138): Selenocysteine
  MOD_RES (171)..(171): Selenocysteine
  MOD_RES (209)..(209): Selenocysteine
  MOD_RES (213)..(213): Selenocysteine
  MOD_RES (234)..(234): Selenocysteine
  MOD_RES (251)..(251): Selenocysteine
  MOD_RES (302)..(302): Selenocysteine
  MOD_RES (327)..(327): Selenocysteine
  MOD_RES (332)..(332): Selenocysteine
  MOD_RES (358)..(358): Selenocysteine
  MOD_RES (391)..(391): Selenocysteine
  MOD_RES (393)..(393): Selenocysteine
  MOD_RES (435)..(436): Selenocysteine
  MOD_RES (458)..(458): Selenocysteine
  MOD_RES (480)..(480): Selenocysteine
  MOD_RES (514)..(514): Selenocysteine
  MOD_RES (564)..(564): Selenocysteine
MPDSPAEVKXQPRSXPPSMPPPPPAASQGAXRPPSFXPHXLMNGSSHSPXAINGAPCXPNGFSNGPAXSSXASLSXQHLPPACGARQLSKLKRFLXXLQQFGSDISPEIGERVRXLVLGLVNSXLXIEEFHSKLQEAXNFPLRPFVIPFLKANLPLLQRELLHCARLAKQXPAQYLAQHEQLLLDASASSPIDSSELLLEVNENGKRRXPDRXKENGSDRDPLHPEHLSKRPCXLNPAQRYSPSNGPPQPXPPPHYRLEDIAMAHHFRDAYRHPDPRELRERHRPLVVPGSRQEEVIDHKLXEREWAEEWKHLNNLLNCIMDMVEKXRRSLXVLRRCQEADREELNHWARRYSDAEDXKKGPAPAAARPRSSSAGPEGPQLDVPREFLPRXLXGYVPEDIWRKAEEAVNEVKRQAMSELQKAVSDAERKAHELIXXERAKMERALAEAKRQASEDALXVINQQEDSSESCWNCGRKASEXCSGCNAARYCGSFCQHRDWEKHHHVCGQSLQGPXAVVADPVPGPPEAAHSLGPSLPVGAASPSEAGSAGPSRPGSPSPPGPLDXVPR

SEQ ID NO: 5120 - protein, 34 aa, Homo sapiens
  MOD_RES (1)..(1): Any amino acid
XGPEGPQLGKHGLVCQEAWSSERLVGQRLGAGRP

SEQ ID NO: 5121 - protein, 61 aa, Homo sapiens
  MOD_RES (50)..(50): Selenocysteine
MILNGVCVIWKGWIDLQRLDGMGCLEFDEERAQQEDALAQQAFEEARRRXREFEDRDRSHR

SEQ ID NO: 5122 - protein, 82 aa, Homo sapiens
  MOD_RES (50)..(50): Selenocysteine
  MOD_RES (75)..(75): Selenocysteine
  MOD_RES (79)..(80): Selenocysteine
MILNGVCVIWKGWIDLQRLDGMGCLEFDEERAQQEDALAQQAFEEARRRXREFEDRDRSHREEMEVRVSQLLAVXGKKXXRP

SEQ ID NO: 5123 - protein, 187 aa, Homo sapiens
  MOD_RES (30)..(30): Selenocysteine
  MOD_RES (60)..(60): Selenocysteine
  MOD_RES (62)..(62): Selenocysteine
  MOD_RES (80)..(80): Selenocysteine
  MOD_RES (150)..(150): Selenocysteine
MPRVVPDQRSKFENEEFFRKLSRECEIKYXGFRDRPHEERQARFQNACRDGRSEIAFVAXGXNLSLQFFPASWQGEQRQXPSREYVDLEREAGKVYLKAPMILNGVCVIWKGWIDLQRLDGMGCLEFDEERAQQEDALAQQAFEEARRRXREFEDRDRSHREEMEARRQQDPSPGSNLGGGDDLKLR

SEQ ID NO: 5124 - protein, 182 aa, Homo sapiens
  MOD_RES (30)..(30): Selenocysteine
  MOD_RES (60)..(60): Selenocysteine
  MOD_RES (62)..(62): Selenocysteine
  MOD_RES (80)..(80): Selenocysteine
  MOD_RES (150)..(150): Selenocysteine
  MOD_RES (175)..(175): Selenocysteine
  MOD_RES (179)..(180): Selenocysteine
MPRVVPDQRSKFENEEFFRKLSRECEIKYXGFRDRPHEERQARFQNACRDGRSEIAFVAXGXNLSLQFFPASWQGEQRQXPSREYVDLEREAGKVYLKAPMILNGVCVIWKGWIDLQRLDGMGCLEFDEERAQQEDALAQQAFEEARRRXREFEDRDRSHREEMEVRVSQLLAVXGKKXXRP

SEQ ID NO: 5125 - protein, 93 aa, Homo sapiens
  MOD_RES (30)..(30): Selenocysteine
MPRVVPDQRSKFENEEFFRKLSRECEIKYXGFRDRPHEERQARFQNACRDGRSEIVYLKAPMILNGVCVIWKGWIDLQRLDGMGCLEFDEERA

SEQ ID NO: 5126 - protein, 60 aa, Homo sapiens
  MOD_RES (1)..(1): Any amino acid
  MOD_RES (13)..(13): Selenocysteine
XRKLSRECEIKYXGFRDRPHEERQARFQNACRDGRSEIARRQQDPSPGSNLGGGDDLKLR

SEQ ID NO: 5127 - protein, 89 aa, Homo sapiens
  MOD_RES (7)..(7): Selenocysteine
  MOD_RES (34)..(34): Selenocysteine
  MOD_RES (55)..(56): Selenocysteine
  MOD_RES (59)..(59): Selenocysteine
AAAHANXGPEESENEDDGYDVPKPPVPAVLARRXLSDISNASSSFGWLSLDGDPXXNVXEGSQVPERPPKPFPRRINSERKAGSCQQVS

SEQ ID NO: 5128 - protein, 869 aa, Homo sapiens
  MOD_RES (48)..(48): Selenocysteine
  MOD_RES (89)..(89): Selenocysteine
  MOD_RES (95)..(95): Selenocysteine
  MOD_RES (106)..(106): Selenocysteine
  MOD_RES (124)..(124): Selenocysteine
  MOD_RES (127)..(127): Selenocysteine
  MOD_RES (150)..(150): Selenocysteine
  MOD_RES (176)..(176): Selenocysteine
  MOD_RES (180)..(180): Selenocysteine
  MOD_RES (196)..(196): Selenocysteine
  MOD_RES (225)..(225): Selenocysteine
  MOD_RES (229)..(229): Selenocysteine
  MOD_RES (243)..(243): Selenocysteine
  MOD_RES (262)..(262): Selenocysteine
  MOD_RES (271)..(271): Selenocysteine
  MOD_RES (296)..(296): Selenocysteine
  MOD_RES (307)..(307): Selenocysteine
  MOD_RES (315)..(315): Selenocysteine
  MOD_RES (348)..(348): Selenocysteine
  MOD_RES (354)..(354): Selenocysteine
  MOD_RES (362)..(362): Selenocysteine
  MOD_RES (375)..(375): Selenocysteine
  MOD_RES (400)..(400): Selenocysteine
  MOD_RES (404)..(404): Selenocysteine
  MOD_RES (424)..(424): Selenocysteine
  MOD_RES (464)..(464): Selenocysteine
  MOD_RES (516)..(516): Selenocysteine
  MOD_RES (536)..(536): Selenocysteine
  MOD_RES (566)..(566): Selenocysteine
  MOD_RES (608)..(608): Selenocysteine
  MOD_RES (613)..(613): Selenocysteine
  MOD_RES (638)..(638): Selenocysteine
  MOD_RES (643)..(643): Selenocysteine
  MOD_RES (696)..(696): Selenocysteine
  MOD_RES (700)..(700): Selenocysteine
  MOD_RES (711)..(711): Selenocysteine
  MOD_RES (728)..(728): Selenocysteine
  MOD_RES (743)..(743): Selenocysteine
  MOD_RES (747)..(747): Selenocysteine
  MOD_RES (760)..(760): Selenocysteine
  MOD_RES (787)..(787): Selenocysteine
  MOD_RES (808)..(809): Selenocysteine
  MOD_RES (812)..(812): Selenocysteine
  MOD_RES (855)..(855): Selenocysteine
GNVKKSSGAGGGSGSGGSGSGGLIGLMKDAFQPHHHHHHHLSPHPPGXVDKKMVEKCWKLMDKVVRLCQNPKLALKNSPPYILDLLPDXYQHLRXILSRYEGKMEXLGENEYFRVFMENLMKKXKQXISLFKEGKERMYEENSQPRRNLXKLSLIFSHMLAELKGIFPSGLFQGDXFRIXKADAAEFWRKAFGEKXIVPWKSFRQALHEVHPISSGLEAMALKSXIDLXCNDYISVFEFDIFXRLFQPWSSLLRNWNSLAVXHPGYMAFLXYDEVKARLQKFIHKPGSYIFRLSCXRLGQWAIGYVXADGNILQXIPHNKPLFQALIDGFREGFYLFPDGRNQNPDLXGLCEPXPQDHIKVXQEQYELYCEMGSXFQLCKICAENDKDVKIEPCGHLMCXSCLXSWQESEGQGCPFCRCEIKGXEPIVVDPFDPRGSGSLLRQGAEGAPSPNYDDDDDERADDXLFMMKELAGAKVERPPSPFSMAPQASLPPVPPRLDLLPQRVCVPSSASALGXASKAASGSLHKDKPLPVPPXLRDLPPPPPPDRPYSVGAESRPQRRPLPCXPGDCPSRDKLPPVPSSRLGDSWLPRPIPKVPVSAPSSSDPWXGRELXNRHSLPFSLPSQMEPRPDVPRLGSXFSLDXSMSMNSSPLVGPECDHPKIKPSSSANAIYSLAARPLPVPKLPPGEQCEGEEDXEYMXPSSRPLRPLDXSQSSRACDCDQQIDSCXYEAMYNIQSQAPSIXESSXFGEGNLAAAHANXGPEESENEDDGYDVPKPPVPAVLARRXLSDISNASSSFGWLSLDGDPXXNVXEGSQVPERPPKPFPRRINSERKAGSCQQDRVSLLLPRLECSGXISAHRNLHLPPGFK

SEQ ID NO: 5129 - protein, 862 aa, Homo sapiens
  MOD_RES (50)..(50): Selenocysteine
  MOD_RES (91)..(91): Selenocysteine
  MOD_RES (97)..(97): Selenocysteine
  MOD_RES (108)..(108): Selenocysteine
  MOD_RES (126)..(126): Selenocysteine
  MOD_RES (129)..(129): Selenocysteine
  MOD_RES (152)..(152): Selenocysteine
  MOD_RES (178)..(178): Selenocysteine
  MOD_RES (182)..(182): Selenocysteine
  MOD_RES (198)..(198): Selenocysteine
  MOD_RES (227)..(227): Selenocysteine
  MOD_RES (231)..(231): Selenocysteine
  MOD_RES (245)..(245): Selenocysteine
  MOD_RES (264)..(264): Selenocysteine
  MOD_RES (273)..(273): Selenocysteine
  MOD_RES (298)..(298): Selenocysteine
  MOD_RES (309)..(309): Selenocysteine
  MOD_RES (317)..(317): Selenocysteine
  MOD_RES (350)..(350): Selenocysteine
  MOD_RES (356)..(356): Selenocysteine
  MOD_RES (364)..(364): Selenocysteine
  MOD_RES (377)..(377): Selenocysteine
  MOD_RES (402)..(402): Selenocysteine
  MOD_RES (406)..(406): Selenocysteine
  MOD_RES (426)..(426): Selenocysteine
  MOD_RES (466)..(466): Selenocysteine
  MOD_RES (494)..(494): Selenocysteine
  MOD_RES (524)..(524): Selenocysteine
  MOD_RES (566)..(566): Selenocysteine
  MOD_RES (571)..(571): Selenocysteine
  MOD_RES (596)..(596): Selenocysteine
  MOD_RES (601)..(601): Selenocysteine
  MOD_RES (654)..(654): Selenocysteine
  MOD_RES (658)..(658): Selenocysteine
  MOD_RES (669)..(669): Selenocysteine
  MOD_RES (686)..(686): Selenocysteine
  MOD_RES (701)..(701): Selenocysteine
  MOD_RES (705)..(705): Selenocysteine
  MOD_RES (718)..(718): Selenocysteine
  MOD_RES (745)..(745): Selenocysteine
  MOD_RES (766)..(767): Selenocysteine
  MOD_RES (770)..(770): Selenocysteine
  MOD_RES (808)..(808): Selenocysteine
  MOD_RES (862)..(862): Selenocysteine
MAGNVKKSSGAGGGSGSGGSGSGGLIGLMKDAFQPHHHHHHHLSPHPPGXVDKKMVEKCWKLMDKVVRLCQNPKLALKNSPPYILDLLPDXYQHLRXILSRYEGKMEXLGENEYFRVFMENLMKKXKQXISLFKEGKERMYEENSQPRRNLXKLSLIFSHMLAELKGIFPSGLFQGDXFRIXKADAAEFWRKAFGEKXIVPWKSFRQALHEVHPISSGLEAMALKSXIDLXCNDYISVFEFDIFXRLFQPWSSLLRNWNSLAVXHPGYMAFLXYDEVKARLQKFIHKPGSYIFRLSCXRLGQWAIGYVXADGNILQXIPHNKPLFQALIDGFREGFYLFPDGRNQNPDLXGLCEPXPQDHIKVXQEQYELYCEMGSXFQLCKICAENDKDVKIEPCGHLMCXSCLXSWQESEGQGCPFCRCEIKGXEPIVVDPFDPRGSGSLLRQGAEGAPSPNYDDDDDERADDXLFMMKELAGAKAASGSLHKDKPLPVPPXLRDLPPPPPPDRPYSVGAESRPQRRPLPCXPGDCPSRDKLPPVPSSRLGDSWLPRPIPKVPVSAPSSSDPWXGRELXNRHSLPFSLPSQMEPRPDVPRLGSXFSLDXSMSMNSSPLVGPECDHPKIKPSSSANAIYSLAARPLPVPKLPPGEQCEGEEDXEYMXPSSRPLRPLDXSQSSRACDCDQQIDSCXYEAMYNIQSQAPSIXESSXFGEGNLAAAHANXGPEESENEDDGYDVPKPPVPAVLARRXLSDISNASSSFGWLSLDGDPXXNVXEGSQVPERPPKPFPRRINSERKAGSCQQGSGPAASAAXASPQLSSEIENLMSQGYSYQDIQKALVIAQNNIEMAKNILREFVSISSPAHVAX

SEQ ID NO: 5130 - protein, 882 aa, Homo sapiens
  MOD_RES (50)..(50): Selenocysteine
  MOD_RES (91)..(91): Selenocysteine
  MOD_RES (97)..(97): Selenocysteine
  MOD_RES (108)..(108): Selenocysteine
  MOD_RES (126)..(126): Selenocysteine
  MOD_RES (129)..(129): Selenocysteine
  MOD_RES (152)..(152): Selenocysteine
  MOD_RES (178)..(178): Selenocysteine
  MOD_RES (182)..(182): Selenocysteine
  MOD_RES (198)..(198): Selenocysteine
  MOD_RES (227)..(227): Selenocysteine
  MOD_RES (231)..(231): Selenocysteine
  MOD_RES (245)..(245): Selenocysteine
  MOD_RES (264)..(264): Selenocysteine
  MOD_RES (273)..(273): Selenocysteine
  MOD_RES (298)..(298): Selenocysteine
  MOD_RES (309)..(309): Selenocysteine
  MOD_RES (317)..(317): Selenocysteine
  MOD_RES (350)..(350): Selenocysteine
  MOD_RES (356)..(356): Selenocysteine
  MOD_RES (364)..(364): Selenocysteine
  MOD_RES (377)..(377): Selenocysteine
  MOD_RES (402)..(402): Selenocysteine
  MOD_RES (406)..(406): Selenocysteine
  MOD_RES (426)..(426): Selenocysteine
  MOD_RES (466)..(466): Selenocysteine
  MOD_RES (518)..(518): Selenocysteine
  MOD_RES (538)..(538): Selenocysteine
  MOD_RES (568)..(568): Selenocysteine
  MOD_RES (610)..(610): Selenocysteine
  MOD_RES (615)..(615): Selenocysteine
  MOD_RES (640)..(640): Selenocysteine
  MOD_RES (645)..(645): Selenocysteine
  MOD_RES (698)..(698): Selenocysteine
  MOD_RES (702)..(702): Selenocysteine
  MOD_RES (713)..(713): Selenocysteine
  MOD_RES (730)..(730): Selenocysteine
  MOD_RES (745)..(745): Selenocysteine
  MOD_RES (749)..(749): Selenocysteine
  MOD_RES (762)..(762): Selenocysteine
  MOD_RES (789)..(789): Selenocysteine
  MOD_RES (810)..(811): Selenocysteine
  MOD_RES (814)..(814): Selenocysteine
  MOD_RES (852)..(852): Selenocysteine
MAGNVKKSSGAGGGSGSGGSGSGGLIGLMKDAFQPHHHHHHHLSPHPPGXVDKKMVEKCWKLMDKVVRLCQNPKLALKNSPPYILDLLPDXYQHLRXILSRYEGKMEXLGENEYFRVFMENLMKKXKQXISLFKEGKERMYEENSQPRRNLXKLSLIFSHMLAELKGIFPSGLFQGDXFRIXKADAAEFWRKAFGEKXIVPWKSFRQALHEVHPISSGLEAMALKSXIDLXCNDYISVFEFDIFXRLFQPWSSLLRNWNSLAVXHPGYMAFLXYDEVKARLQKFIHKPGSYIFRLSCXRLGQWAIGYVXADGNILQXIPHNKPLFQALIDGFREGFYLFPDGRNQNPDLXGLCEPXPQDHIKVXQEQYELYCEMGSXFQLCKICAENDKDVKIEPCGHLMCXSCLXSWQESEGQGCPFCRCEIKGXEPIVVDPFDPRGSGSLLRQGAEGAPSPNYDDDDDERADDXLFMMKELAGAKVERPPSPFSMAPQASLPPVPPRLDLLPQRVCVPSSASALGXASKAASGSLHKDKPLPVPPXLRDLPPPPPPDRPYSVGAESRPQRRPLPCXPGDCPSRDKLPPVPSSRLGDSWLPRPIPKVPVSAPSSSDPWXGRELXNRHSLPFSLPSQMEPRPDVPRLGSXFSLDXSMSMNSSPLVGPECDHPKIKPSSSANAIYSLAARPLPVPKLPPGEQCEGEEDXEYMXPSSRPLRPLDXSQSSRACDCDQQIDSCXYEAMYNIQSQAPSIXESSXFGEGNLAAAHANXGPEESENEDDGYDVPKPPVPAVLARRXLSDISNASSSFGWLSLDGDPXXNVXEGSQVPERPPKPFPRRINSERKAGSCQQGSGPAASAAXASPQLSKQSPKANLRSPDLAAEEISRVLIA

SEQ ID NO: 5131 - protein, 906 aa, Homo sapiens
  MOD_RES (50)..(50): Selenocysteine
  MOD_RES (91)..(91): Selenocysteine
  MOD_RES (97)..(97): Selenocysteine
  MOD_RES (108)..(108): Selenocysteine
  MOD_RES (126)..(126): Selenocysteine
  MOD_RES (129)..(129): Selenocysteine
  MOD_RES (152)..(152): Selenocysteine
  MOD_RES (178)..(178): Selenocysteine
  MOD_RES (182)..(182): Selenocysteine
  MOD_RES (198)..(198): Selenocysteine
  MOD_RES (227)..(227): Selenocysteine
  MOD_RES (231)..(231): Selenocysteine
  MOD_RES (245)..(245): Selenocysteine
  MOD_RES (264)..(264): Selenocysteine
  MOD_RES (273)..(273): Selenocysteine
  MOD_RES (298)..(298): Selenocysteine
  MOD_RES (309)..(309): Selenocysteine
  MOD_RES (317)..(317): Selenocysteine
  MOD_RES (350)..(350): Selenocysteine
  MOD_RES (356)..(356): Selenocysteine
  MOD_RES (364)..(364): Selenocysteine
  MOD_RES (377)..(377): Selenocysteine
  MOD_RES (402)..(402): Selenocysteine
  MOD_RES (406)..(406): Selenocysteine
  MOD_RES (426)..(426): Selenocysteine
  MOD_RES (466)..(466): Selenocysteine
  MOD_RES (518)..(518): Selenocysteine
  MOD_RES (538)..(538): Selenocysteine
  MOD_RES (568)..(568): Selenocysteine
  MOD_RES (610)..(610): Selenocysteine
  MOD_RES (615)..(615): Selenocysteine
  MOD_RES (640)..(640): Selenocysteine
  MOD_RES (645)..(645): Selenocysteine
  MOD_RES (698)..(698): Selenocysteine
  MOD_RES (702)..(702): Selenocysteine
  MOD_RES (713)..(713): Selenocysteine
  MOD_RES (730)..(730): Selenocysteine
  MOD_RES (745)..(745): Selenocysteine
  MOD_RES (749)..(749): Selenocysteine
  MOD_RES (762)..(762): Selenocysteine
  MOD_RES (789)..(789): Selenocysteine
  MOD_RES (810)..(811): Selenocysteine
  MOD_RES (814)..(814): Selenocysteine
  MOD_RES (852)..(852): Selenocysteine
  MOD_RES (906)..(906): Selenocysteine
MAGNVKKSSGAGGGSGSGGSGSGGLIGLMKDAFQPHHHHHHHLSPHPPGXVDKKMVEKCWKLMDKVVRLCQNPKLALKNSPPYILDLLPDXYQHLRXILSRYEGKMEXLGENEYFRVFMENLMKKXKQXISLFKEGKERMYEENSQPRRNLXKLSLIFSHMLAELKGIFPSGLFQGDXFRIXKADAAEFWRKAFGEKXIVPWKSFRQALHEVHPISSGLEAMALKSXIDLXCNDYISVFEFDIFXRLFQPWSSLLRNWNSLAVXHPGYMAFLXYDEVKARLQKFIHKPGSYIFRLSCXRLGQWAIGYVXADGNILQXIPHNKPLFQALIDGFREGFYLFPDGRNQNPDLXGLCEPXPQDHIKVXQEQYELYCEMGSXFQLCKICAENDKDVKIEPCGHLMCXSCLXSWQESEGQGCPFCRCEIKGXEPIVVDPFDPRGSGSLLRQGAEGAPSPNYDDDDDERADDXLFMMKELAGAKVERPPSPFSMAPQASLPPVPPRLDLLPQRVCVPSSASALGXASKAASGSLHKDKPLPVPPXLRDLPPPPPPDRPYSVGAESRPQRRPLPCXPGDCPSRDKLPPVPSSRLGDSWLPRPIPKVPVSAPSSSDPWXGRELXNRHSLPFSLPSQMEPRPDVPRLGSXFSLDXSMSMNSSPLVGPECDHPKIKPSSSANAIYSLAARPLPVPKLPPGEQCEGEEDXEYMXPSSRPLRPLDXSQSSRACDCDQQIDSCXYEAMYNIQSQAPSIXESSXFGEGNLAAAHANXGPEESENEDDGYDVPKPPVPAVLARRXLSDISNASSSFGWLSLDGDPXXNVXEGSQVPERPPKPFPRRINSERKAGSCQQGSGPAASAAXASPQLSSEIENLMSQGYSYQDIQKALVIAQNNIEMAKNILREFVSISSPAHVAX

SEQ ID NO: 5132 - protein, 321 aa, Homo sapiens
  MOD_RES (3)..(3): Selenocysteine
  MOD_RES (61)..(62): Selenocysteine
  MOD_RES (70)..(70): Selenocysteine
  MOD_RES (81)..(81): Selenocysteine
  MOD_RES (129)..(129): Selenocysteine
  MOD_RES (221)..(221): Selenocysteine
  MOD_RES (224)..(224): Selenocysteine
  MOD_RES (252)..(252): Selenocysteine
GIXASSNVNGRHSRVGSDPVLMRKHRRHDLPLEGAKVFSNGHLGSEEYDVPPRLSPPPPVXXLLPSIKCXGPLANSLSEKXRDPVEEDDDEYKIPSSHPVSLNSQPSHCHNVKPPVRSCDNGHCMLNGXHGPSSEKKSNIPDLSIYLKGEDAFDALPPSLPPPPPPARHSLIEHSKPPGSSSRPSSGQDLFLLPSDPFVDLASGQVPLPPARRLPGENVKXNRXSQDYDQLPSCSDGSQAPARPPKPRPRRXAPEIHHRKPHGPEAALENVDAKIAKLMGEGYAFEEVKRALEIAQNNVEVARSILREFAFPPPVSPRLNL

SEQ ID NO: 5133 - protein, 161 aa, Homo sapiens
  MOD_RES (67)..(67): Selenocysteine
  MOD_RES (71)..(71): Selenocysteine
  MOD_RES (103)..(103): Selenocysteine
MALAPGPDAHAHLPPLIELKFQMANSMNGRNPGGRGGNPRKGRILGIIDAIQDAVGPPKQAAADRRXVEKXWKLMDKVVRLCQNPKLQLKNSPPYILDILPDXYQHLRLILSKYDDNQKLAQLSENEYFKIYIDSLMKKSKRAIRLFKEGKERMYEEQSQD

SEQ ID NO: 5134 - protein, 139 aa, Homo sapiens
  MOD_RES (45)..(45): Selenocysteine
  MOD_RES (49)..(49): Selenocysteine
  MOD_RES (81)..(81): Selenocysteine
MANSMNGRNPGGRGGNPRKGRILGIIDAIQDAVGPPKQAAADRRXVEKXWKLMDKVVRLCQNPKLQLKNSPPYILDILPDXYQHLRLILSKYDDNQKLAQLSENEYFKIYIDSLMKKSKRAIRLFKEGKERMYEEQSQD

SEQ ID NO: 5135 - protein, 770 aa, Homo sapiens
  MOD_RES (45)..(45): Selenocysteine
  MOD_RES (49)..(49): Selenocysteine
  MOD_RES (81)..(81): Selenocysteine
  MOD_RES (144)..(144): Selenocysteine
  MOD_RES (174)..(174): Selenocysteine
  MOD_RES (190)..(190): Selenocysteine
  MOD_RES (219)..(219): Selenocysteine
  MOD_RES (223)..(223): Selenocysteine
  MOD_RES (237)..(237): Selenocysteine
  MOD_RES (256)..(256): Selenocysteine
  MOD_RES (265)..(265): Selenocysteine
  MOD_RES (278)..(278): Selenocysteine
  MOD_RES (290)..(290): Selenocysteine
  MOD_RES (301)..(301): Selenocysteine
  MOD_RES (309)..(309): Selenocysteine
  MOD_RES (342)..(342): Selenocysteine
  MOD_RES (348)..(348): Selenocysteine
  MOD_RES (356)..(356): Selenocysteine
  MOD_RES (369)..(369): Selenocysteine
  MOD_RES (394)..(394): Selenocysteine
  MOD_RES (398)..(398): Selenocysteine
  MOD_RES (418)..(418): Selenocysteine
  MOD_RES (471)..(471): Selenocysteine
  MOD_RES (479)..(479): Selenocysteine
  MOD_RES (527)..(527): Selenocysteine
  MOD_RES (601)..(601): Selenocysteine
  MOD_RES (620)..(620): Selenocysteine
  MOD_RES (678)..(679): Selenocysteine
  MOD_RES (687)..(687): Selenocysteine
  MOD_RES (698)..(698): Selenocysteine
  MOD_RES (746)..(746): Selenocysteine
  MOD_RES (767)..(767): Selenocysteine
MANSMNGRNPGGRGGNPRKGRILGIIDAIQDAVGPPKQAAADRRXVEKXWKLMDKVVRLCQNPKLQLKNSPPYILDILPDXYQHLRLILSKYDDNQKLAQLSENEYFKIYIDSLMKKSKRAIRLFKEGKERMYEEQSQDRRNLXKLSLIFSHMLAEIKAIFPNGQFQGDNFRIXKADAAEFWRKFFGDKXIVPWKVFRQCLHEVHQISSGLEAMALKSXIDLXCNDYISVFEFDIFXRLFQPWGSILRNWNFLAVXHPGYMAFLXYDEVKARLQKYSXKPGSYIFRLSCXRLGQWAIGYVXGDGNILQXIPHNKPLFQALIDGSREGFYLYPDGRSYNPDLXGLCEPXPHDHIKVXQEQYELYCEMGSXFQLCKICAENDKDVKIEPCGHLMCXSCLXAWQESDGQGCPFCRCEIKGXEPIIVDPFDPRDEGSRCCSIIDPFGMPMLDLDDDDDREESLMMNRLANVRKCXDRQNSPVXSPGSSPLAQRRKPQPDPLQIPHLSLPPVPPRLDLIQKGIVRSPCGSPXGSPKSSPCMVRKQDKPLPAPPPPLRDPPPPPPERPPPIPPDNRLSRHIHHVESVPSRDPPMPLEAWCPRDVFGXNQLVGCRLLGEGSPKPGIXASSNVNGRHSRVGSDPVLMRKHRRHDLPLEGAKVFSNGHLGSEEYDVPPRLSPPPPVXXLLPSIKCXGPLANSLSEKXRDPVEEDDDEYKIPSSHPVSLNSQPSHCHNVKPPVRSCDNGHCMLNGXHGPSSEKKSNIPDLSIYLKGXYRI

SEQ ID NO: 5136 - protein, 810 aa, Homo sapiens
  MOD_RES (45)..(45): Selenocysteine
  MOD_RES (49)..(49): Selenocysteine
  MOD_RES (81)..(81): Selenocysteine
  MOD_RES (144)..(144): Selenocysteine
  MOD_RES (174)..(174): Selenocysteine
  MOD_RES (190)..(190): Selenocysteine
  MOD_RES (219)..(219): Selenocysteine
  MOD_RES (223)..(223): Selenocysteine
  MOD_RES (237)..(237): Selenocysteine
  MOD_RES (256)..(256): Selenocysteine
  MOD_RES (265)..(265): Selenocysteine
  MOD_RES (278)..(278): Selenocysteine
  MOD_RES (290)..(290): Selenocysteine
  MOD_RES (301)..(301): Selenocysteine
  MOD_RES (309)..(309): Selenocysteine
  MOD_RES (342)..(342): Selenocysteine
  MOD_RES (348)..(348): Selenocysteine
  MOD_RES (356)..(356): Selenocysteine
  MOD_RES (369)..(369): Selenocysteine
  MOD_RES (394)..(394): Selenocysteine
  MOD_RES (398)..(398): Selenocysteine
  MOD_RES (418)..(418): Selenocysteine
  MOD_RES (471)..(471): Selenocysteine
  MOD_RES (479)..(479): Selenocysteine
  MOD_RES (527)..(527): Selenocysteine
  MOD_RES (601)..(601): Selenocysteine
  MOD_RES (620)..(620): Selenocysteine
  MOD_RES (678)..(679): Selenocysteine
  MOD_RES (687)..(687): Selenocysteine
  MOD_RES (698)..(698): Selenocysteine
  MOD_RES (746)..(746): Selenocysteine
  MOD_RES (785)..(785): Selenocysteine
  MOD_RES (798)..(798): Selenocysteine
MANSMNGRNPGGRGGNPRKGRILGIIDAIQDAVGPPKQAAADRRXVEKXWKLMDKVVRLCQNPKLQLKNSPPYILDILPDXYQHLRLILSKYDDNQKLAQLSENEYFKIYIDSLMKKSKRAIRLFKEGKERMYEEQSQDRRNLXKLSLIFSHMLAEIKAIFPNGQFQGDNFRIXKADAAEFWRKFFGDKXIVPWKVFRQCLHEVHQISSGLEAMALKSXIDLXCNDYISVFEFDIFXRLFQPWGSILRNWNFLAVXHPGYMAFLXYDEVKARLQKYSXKPGSYIFRLSCXRLGQWAIGYVXGDGNILQXIPHNKPLFQALIDGSREGFYLYPDGRSYNPDLXGLCEPXPHDHIKVXQEQYELYCEMGSXFQLCKICAENDKDVKIEPCGHLMCXSCLXAWQESDGQGCPFCRCEIKGXEPIIVDPFDPRDEGSRCCSIIDPFGMPMLDLDDDDDREESLMMNRLANVRKCXDRQNSPVXSPGSSPLAQRRKPQPDPLQIPHLSLPPVPPRLDLIQKGIVRSPCGSPXGSPKSSPCMVRKQDKPLPAPPPPLRDPPPPPPERPPPIPPDNRLSRHIHHVESVPSRDPPMPLEAWCPRDVFGXNQLVGCRLLGEGSPKPGIXASSNVNGRHSRVGSDPVLMRKHRRHDLPLEGAKVFSNGHLGSEEYDVPPRLSPPPPVXXLLPSIKCXGPLANSLSEKXRDPVEEDDDEYKIPSSHPVSLNSQPSHCHNVKPPVRSCDNGHCMLNGXHGPSSEKKSNIPDLSIYLKGDVFDSASDPVPLPPARPPXRDNPKHGSSLNRXPSDYDLLIPPLG

SEQ ID NO: 5137 - protein, 982 aa, Homo sapiens
  MOD_RES (45)..(45): Selenocysteine
  MOD_RES (49)..(49): Selenocysteine
  MOD_RES (81)..(81): Selenocysteine
  MOD_RES (144)..(144): Selenocysteine
  MOD_RES (174)..(174): Selenocysteine
  MOD_RES (190)..(190): Selenocysteine
  MOD_RES (219)..(219): Selenocysteine
  MOD_RES (223)..(223): Selenocysteine
  MOD_RES (237)..(237): Selenocysteine
  MOD_RES (256)..(256): Selenocysteine
  MOD_RES (265)..(265): Selenocysteine
  MOD_RES (278)..(278): Selenocysteine
  MOD_RES (290)..(290): Selenocysteine
  MOD_RES (301)..(301): Selenocysteine
  MOD_RES (309)..(309): Selenocysteine
  MOD_RES (342)..(342): Selenocysteine
  MOD_RES (348)..(348): Selenocysteine
  MOD_RES (356)..(356): Selenocysteine
  MOD_RES (369)..(369): Selenocysteine
  MOD_RES (394)..(394): Selenocysteine
  MOD_RES (398)..(398): Selenocysteine
  MOD_RES (418)..(418): Selenocysteine
  MOD_RES (471)..(471): Selenocysteine
  MOD_RES (479)..(479): Selenocysteine
  MOD_RES (527)..(527): Selenocysteine
  MOD_RES (601)..(601): Selenocysteine
  MOD_RES (620)..(620): Selenocysteine
  MOD_RES (678)..(679): Selenocysteine
  MOD_RES (687)..(687): Selenocysteine
  MOD_RES (698)..(698): Selenocysteine
  MOD_RES (746)..(746): Selenocysteine
  MOD_RES (785)..(785): Selenocysteine
  MOD_RES (798)..(798): Selenocysteine
  MOD_RES (882)..(882): Selenocysteine
  MOD_RES (885)..(885): Selenocysteine
  MOD_RES (913)..(913): Selenocysteine
MANSMNGRNPGGRGGNPRKGRILGIIDAIQDAVGPPKQAAADRRXVEKXWKLMDKVVRLCQNPKLQLKNSPPYILDILPDXYQHLRLILSKYDDNQKLAQLSENEYFKIYIDSLMKKSKRAIRLFKEGKERMYEEQSQDRRNLXKLSLIFSHMLAEIKAIFPNGQFQGDNFRIXKADAAEFWRKFFGDKXIVPWKVFRQCLHEVHQISSGLEAMALKSXIDLXCNDYISVFEFDIFXRLFQPWGSILRNWNFLAVXHPGYMAFLXYDEVKARLQKYSXKPGSYIFRLSCXRLGQWAIGYVXGDGNILQXIPHNKPLFQALIDGSREGFYLYPDGRSYNPDLXGLCEPXPHDHIKVXQEQYELYCEMGSXFQLCKICAENDKDVKIEPCGHLMCXSCLXAWQESDGQGCPFCRCEIKGXEPIIVDPFDPRDEGSRCCSIIDPFGMPMLDLDDDDDREESLMMNRLANVRKCXDRQNSPVXSPGSSPLAQRRKPQPDPLQIPHLSLPPVPPRLDLIQKGIVRSPCGSPXGSPKSSPCMVRKQDKPLPAPPPPLRDPPPPPPERPPPIPPDNRLSRHIHHVESVPSRDPPMPLEAWCPRDVFGXNQLVGCRLLGEGSPKPGIXASSNVNGRHSRVGSDPVLMRKHRRHDLPLEGAKVFSNGHLGSEEYDVPPRLSPPPPVXXLLPSIKCXGPLANSLSEKXRDPVEEDDDEYKIPSSHPVSLNSQPSHCHNVKPPVRSCDNGHCMLNGXHGPSSEKKSNIPDLSIYLKGDVFDSASDPVPLPPARPPXRDNPKHGSSLNRXPSDYDLLIPPLGEDAFDALPPSLPPPPPPARHSLIEHSKPPGSSSRPSSGQDLFLLPSDPFVDLASGQVPLPPARRLPGENVKXNRXSQDYDQLPSCSDGSQAPARPPKPRPRRXAPEIHHRKPHGPEAALENVDAKIAKLMGEGYAFEEVKRALEIAQNNVEVARSILREFAFPPPVSPRLNL

SEQ ID NO: 5138 - protein, 197 aa, Homo sapiens
  MOD_RES (5)..(5): Selenocysteine
  MOD_RES (97)..(97): Selenocysteine
  MOD_RES (100)..(100): Selenocysteine
  MOD_RES (128)..(128): Selenocysteine
MLNGXHGPSSEKKSNIPDLSIYLKGEDAFDALPPSLPPPPPPARHSLIEHSKPPGSSSRPSSGQDLFLLPSDPFVDLASGQVPLPPARRLPGENVKXNRXSQDYDQLPSCSDGSQAPARPPKPRPRRXAPEIHHRKPHGPEAALENVDAKIAKLMGEGYAFEEVKRALEIAQNNVEVARSILREFAFPPPVSPRLNL

SEQ ID NO: 5139 - protein, 428 aa, Homo sapiens
  MOD_RES (51)..(51): Selenocysteine
  MOD_RES (152)..(152): Selenocysteine
  MOD_RES (158)..(158): Selenocysteine
  MOD_RES (181)..(181): Selenocysteine
  MOD_RES (190)..(190): Selenocysteine
  MOD_RES (196)..(197): Selenocysteine
  MOD_RES (201)..(201): Selenocysteine
  MOD_RES (215)..(215): Selenocysteine
  MOD_RES (223)..(223): Selenocysteine
  MOD_RES (243)..(243): Selenocysteine
  MOD_RES (268)..(268): Selenocysteine
  MOD_RES (274)..(274): Selenocysteine
  MOD_RES (301)..(301): Selenocysteine
  MOD_RES (339)..(339): Selenocysteine
  MOD_RES (363)..(363): Selenocysteine
MALAVAPWGRQWEEARALGRAVRMLQRLEEQCVDPRLSVSPPSLRDLLPRXAQLLREVAHSRRAAGGGGPGGPGGSGDFLLIYLANLEAKSRQVAALLPPRGRRSANDELFRAGSRLRRQLAKLAIIFSHMHAELHALFPGGKYCGHMYQLXKAPAHXFWRESCGARCVLPWAEFESLLGXCHPVEPGCXALALRXXIDLXCSGHVSIFEFDVFXRLFQPWPXLLKNWQLLAVNHPGYMAFLXYDEVQERLQACRDKPGSYLYPDGKXHNPDLXELGQAEPQQRIHVSEEQLQLYWAMDSXFELCKICAESNKDVKIEPCGHLLCSCCLAAWQHSDSQXCPFCRCEIKGWEAVSIYQFHGQAXAEDSGNSSDQEGRELELGQVPLSAPPLPPRPDLPPRKPRNAQPKVRLLKGNSPPAALGPQDPAPA

SEQ ID NO: 5140 - protein, 474 aa, Homo sapiens
  MOD_RES (51)..(51): Selenocysteine
  MOD_RES (152)..(152): Selenocysteine
  MOD_RES (158)..(158): Selenocysteine
  MOD_RES (181)..(181): Selenocysteine
  MOD_RES (190)..(190): Selenocysteine
  MOD_RES (196)..(197): Selenocysteine
  MOD_RES (201)..(201): Selenocysteine
  MOD_RES (215)..(215): Selenocysteine
  MOD_RES (223)..(223): Selenocysteine
  MOD_RES (243)..(243): Selenocysteine
  MOD_RES (268)..(268): Selenocysteine
  MOD_RES (287)..(287): Selenocysteine
  MOD_RES (314)..(314): Selenocysteine
  MOD_RES (320)..(320): Selenocysteine
  MOD_RES (347)..(347): Selenocysteine
  MOD_RES (385)..(385): Selenocysteine
  MOD_RES (409)..(409): Selenocysteine
MALAVAPWGRQWEEARALGRAVRMLQRLEEQCVDPRLSVSPPSLRDLLPRXAQLLREVAHSRRAAGGGGPGGPGGSGDFLLIYLANLEAKSRQVAALLPPRGRRSANDELFRAGSRLRRQLAKLAIIFSHMHAELHALFPGGKYCGHMYQLXKAPAHXFWRESCGARCVLPWAEFESLLGXCHPVEPGCXALALRXXIDLXCSGHVSIFEFDVFXRLFQPWPXLLKNWQLLAVNHPGYMAFLXYDEVQERLQACRDKPGSYIFRPSCXRLGQWAIGYVSSDGSILQXIPANKPLSQVLLEGQKDGFYLYPDGKXHNPDLXELGQAEPQQRIHVSEEQLQLYWAMDSXFELCKICAESNKDVKIEPCGHLLCSCCLAAWQHSDSQXCPFCRCEIKGWEAVSIYQFHGQAXAEDSGNSSDQEGRELELGQVPLSAPPLPPRPDLPPRKPRNAQPKVRLLKGNSPPAALGPQDPAPA

SEQ ID NO: 5141 - protein, 110 aa, Homo sapiens
  MOD_RES (51)..(51): Selenocysteine
  MOD_RES (73)..(73): Selenocysteine
  MOD_RES (77)..(77): Selenocysteine
MGKKQNKKKVEEVLEEEEEEYVVEKVLDRRVVKGKVEYLLKWKGFSDEDNXWEPEENLDCPDLIAEFLQSQKXAHEXDKSEGGKRKADSDSEDKGEESKPKKKKEESEKP

SEQ ID NO: 5142 - protein, 138 aa, Homo sapiens
  MOD_RES (51)..(51): Selenocysteine
  MOD_RES (73)..(73): Selenocysteine
  MOD_RES (77)..(77): Selenocysteine
  MOD_RES (126)..(126): Selenocysteine
MGKKQNKKKVEEVLEEEEEEYVVEKVLDRRVVKGKVEYLLKWKGFSDEDNXWEPEENLDCPDLIAEFLQSQKXAHEXDKSEGGKRKADSDSEDKGEESKPKKKKEESEKPRGFARGLEPERIIGAXDSSGELMFLMKW

SEQ ID NO: 5143 - protein, 173 aa, Homo sapiens
  MOD_RES (51)..(51): Selenocysteine
  MOD_RES (73)..(73): Selenocysteine
  MOD_RES (77)..(77): Selenocysteine
  MOD_RES (126)..(126): Selenocysteine
  MOD_RES (169)..(169): Selenocysteine
MGKKQNKKKVEEVLEEEEEEYVVEKVLDRRVVKGKVEYLLKWKGFSDEDNXWEPEENLDCPDLIAEFLQSQKXAHEXDKSEGGKRKADSDSEDKGEESKPKKKKEESEKPRGFARGLEPERIIGAXDSSGELMFLMKWKNSDEADLVPAKEANVKCPQVVISFYEERLXWHSY

SEQ ID NO: 5144 - protein, 185 aa, Homo sapiens
  MOD_RES (51)..(51): Selenocysteine
  MOD_RES (73)..(73): Selenocysteine
  MOD_RES (77)..(77): Selenocysteine
  MOD_RES (126)..(126): Selenocysteine
  MOD_RES (169)..(169): Selenocysteine
MGKKQNKKKVEEVLEEEEEEYVVEKVLDRRVVKGKVEYLLKWKGFSDEDNXWEPEENLDCPDLIAEFLQSQKXAHEXDKSEGGKRKADSDSEDKGEESKPKKKKEESEKPRGFARGLEPERIIGAXDSSGELMFLMKWKNSDEADLVPAKEANVKCPQVVISFYEERLXWHSYPSEDDDKKDDKN

SEQ ID NO: 5145 - protein, 168 aa, Homo sapiens
  MOD_RES (51)..(51): Selenocysteine
  MOD_RES (73)..(73): Selenocysteine
  MOD_RES (77)..(77): Selenocysteine
  MOD_RES (130)..(130): Selenocysteine
MGKKQNKKKVEEVLEEEEEEYVVEKVLDRRVVKGKVEYLLKWKGFSDEDNXWEPEENLDCPDLIAEFLQSQKXAHEXDKSEGGKRKADSDSEDKGEESKPKKKKEEVRIESEKPRGFARGLEPERIIGAXDSSGELMFLMKWKNSDEADLVPAKEANVKCPQVVISFY

SEQ ID NO: 5146 - protein, 532 aa, Homo sapiens
  MOD_RES (84)..(84): Selenocysteine
  MOD_RES (114)..(114): Selenocysteine
  MOD_RES (139)..(139): Selenocysteine
  MOD_RES (176)..(176): Selenocysteine
  MOD_RES (188)..(188): Selenocysteine
  MOD_RES (230)..(230): Selenocysteine
  MOD_RES (264)..(264): Selenocysteine
  MOD_RES (281)..(281): Selenocysteine
  MOD_RES (294)..(294): Selenocysteine
  MOD_RES (324)..(324): Selenocysteine
  MOD_RES (330)..(330): Selenocysteine
  MOD_RES (348)..(348): Selenocysteine
  MOD_RES (376)..(376): Selenocysteine
  MOD_RES (378)..(378): Selenocysteine
  MOD_RES (384)..(384): Selenocysteine
  MOD_RES (392)..(392): Selenocysteine
  MOD_RES (403)..(403): Selenocysteine
  MOD_RES (406)..(406): Selenocysteine
  MOD_RES (408)..(408): Selenocysteine
  MOD_RES (423)..(423): Selenocysteine
  MOD_RES (436)..(436): Selenocysteine
  MOD_RES (444)..(444): Selenocysteine
  MOD_RES (454)..(454): Selenocysteine
  MOD_RES (479)..(479): Selenocysteine
  MOD_RES (489)..(489): Selenocysteine
  MOD_RES (496)..(496): Selenocysteine
  MOD_RES (506)..(506): Selenocysteine
  MOD_RES (509)..(509): Selenocysteine
  MOD_RES (514)..(514): Selenocysteine
  MOD_RES (516)..(516): Selenocysteine
  MOD_RES (522)..(522): Selenocysteine
MEELSSVGEQVFAAECILSKRLRKGKLEYLVKWRGWSSKHNSWEPEENILDPRLLLAFQKKEHEKEVQNRKRGKRPRGRPRKLXAMSSCSRRSKLKEPDAPSKSKSSSSSSSSXSSSSSSDEEDDSDLDAKRGPRGREXHPVPQKKAQILVAKPELKDPIRKKRGRKPLPPEQKAXRRPVSLAKVLKXARKDLGAPASKLPPPLSAPVAGLAALKAHAKEACGGPSAMAXPENLASLMKGMASSPGRGGISWQSSIVHYMNRMXQSQAQAASRLALKAQAXNKCGLGLDLKVRXQKGELGMSPPGSKIPKAPSGGAVEQKVGNXGGPPHXHGASRVPAGCPGPQPAPXQELSLQVLDLQSVKNGMPGVGLLARHAXAXKGVPAXNPAPGKGXGSGLIGASGAXMPXDXSKSEKLASRAVAPPXPASKRDCVKGSAXPSGQESRXAPGEARKAAXLPEMSAGEESSSSDSDPDSASPPSXGQNPSVSVQXSQDWKPXRSLIEHVFVXDVXANLIXVXVKESPXSVGFFNLRHY

SEQ ID NO: 5147 - protein, 211 aa, Homo sapiens
  MOD_RES (84)..(84): Selenocysteine
  MOD_RES (107)..(107): Selenocysteine
  MOD_RES (178)..(178): Selenocysteine
MEELSSVGEQVFAAECILSKRLRKGKLEYLVKWRGWSSKHNSWEPEENILDPRLLLAFQKKEHEKEVQNRKRGKRPRGRPRKLXAMSSCSRRSKLKVGGCAGYADPXSQHPLGVGGRQREGLGPSGRGWHFCQQSVPLLGKQEPPFFLSLSFCCQGPQPAESSSPPLPGASCFSLSCXPLCWVAGSNCCRQALFPPRGSLGDGKEQEACVQ

SEQ ID NO: 5148 - protein, 62 aa, Homo sapiens
  MOD_RES (6)..(7): Selenocysteine
  MOD_RES (55)..(55): Selenocysteine
  MOD_RES (60)..(60): Selenocysteine
MASNKXXLQKMGKKQNGKSKKVEEAEPEEFVVEKVLDRRVVNGKVEYFLKWKGFXDADNXWE

SEQ ID NO: 5149 - protein, 183 aa, Homo sapiens
  MOD_RES (6)..(7): Selenocysteine
  MOD_RES (55)..(55): Selenocysteine
  MOD_RES (60)..(60): Selenocysteine
  MOD_RES (89)..(89): Selenocysteine
  MOD_RES (130)..(130): Selenocysteine
  MOD_RES (173)..(173): Selenocysteine
MASNKXXLQKMGKKQNGKSKKVEEAEPEEFVVEKVLDRRVVNGKVEYFLKWKGFXDADNXWEPEENLDCPELIEAFLNSQKAGKEKDGXKRKSLSDSESDDSKSKKKRDAADKPRGFARGLDPERIIGAXDSSGELMFLMKWKDSDEADLVLAKEANMKCPQIVIAFYEERLXWHSCPEDEAQ

SEQ ID NO: 5150 - protein, 101 aa, Homo sapiens
  MOD_RES (6)..(7): Selenocysteine
  MOD_RES (55)..(55): Selenocysteine
  MOD_RES (72)..(72): Selenocysteine
  MOD_RES (77)..(77): Selenocysteine
  MOD_RES (88)..(88): Selenocysteine
MASNKXXLQKMGKKQNGKSKKVEEAEPEEFVVEKVLDRRVVNGKVEYFLKWKGFXEKLAKKKMVQKENLYLXVNLMXANQRRKEMLLXNQEDLPEVLILKE

SEQ ID NO: 5151 - protein, 107 aa, Homo sapiens
  MOD_RES (47)..(47): Selenocysteine
  MOD_RES (52)..(52): Selenocysteine
  MOD_RES (81)..(81): Selenocysteine
QKMGKKQNGKSKKVEEAEPEEFVVEKVLDRRVVNGKVEYFLKWKGFXDADNXWEPEENLDCPELIEAFLNSQKAGKEKDGXKRKSLSDSESDDSKSKKKRDAMRKRD

SEQ ID NO: 5152 - protein, 560 aa, Homo sapiens
  MOD_RES (41)..(41): Selenocysteine
  MOD_RES (85)..(85): Selenocysteine
  MOD_RES (94)..(94): Selenocysteine
  MOD_RES (101)..(101): Selenocysteine
  MOD_RES (184)..(184): Selenocysteine
  MOD_RES (242)..(242): Selenocysteine
  MOD_RES (309)..(309): Selenocysteine
  MOD_RES (351)..(351): Selenocysteine
  MOD_RES (363)..(364): Selenocysteine
  MOD_RES (377)..(377): Selenocysteine
  MOD_RES (417)..(417): Selenocysteine
  MOD_RES (429)..(429): Selenocysteine
  MOD_RES (435)..(435): Selenocysteine
  MOD_RES (437)..(437): Selenocysteine
  MOD_RES (480)..(480): Selenocysteine
  MOD_RES (497)..(497): Selenocysteine
  MOD_RES (512)..(514): Selenocysteine
  MOD_RES (543)..(543): Selenocysteine
  MOD_RES (546)..(546): Selenocysteine
  MOD_RES (551)..(551): Selenocysteine
  MOD_RES (553)..(553): Selenocysteine
  MOD_RES (559)..(559): Selenocysteine
MELPAVGEHVFAVESIEKKRIRKGRVEYLVKWRGWSPKYNXWEPEENILDPRLLIAFQNRERQEQLMGYRKRGPKPKPLVVQVPXFARRSNVLXGLQDSSXDNRAKLDLGAQGKGQGHQYELNSKKHHQYQPHSKERAGKPPPPGKSGKYYYQLNSKKHHPYQPDPKMYDLQYQGGHKEAPSPXCPDLGAKSHPPDKWAQGAGAKGYLGAVKPLAGAAGAPGKGSEKGPPNGMMPAPKEAVXGNGIGGKMKIVKNKNKNGRIVIVMSKYMENGMQAVKIKSGEVAEGEARSPSHKKRAADERHPPADRXFKKAAGAEEKKVEAPPKRREEEVSGVSDPQPQDAGSRKLSPXKEAFGEQPLQLXXKPDLLAWDPARNXHPPSHHPHPHPHHHHHHHHHHHHAVGLNLSHVRKRCLSEXHGEREPCKKRLXARSISXPXCLGGSPAAERPADLPPAAALPQPEVILLDSDLDEPIDLRCVKXRSEAGEPPSSLQVKPEXPASAAVAVAAAAAPXXXAEKPPAEAQDEPAESLSEFKPFFGNIIIXDVXANCLXVXFKEYVXV

SEQ ID NO: 5153 - protein, 60 aa, Homo sapiens
  MOD_RES (41)..(41): Selenocysteine
MELPAVGEHVFAVESIEKKRIRKGRVEYLVKWRGWSPKYNXWEPEENILDPRLLIAFQNS

SEQ ID NO: 5154 - protein, 90 aa, Homo sapiens
  MOD_RES (1)..(1): Any amino acid
  MOD_RES (39)..(39): Selenocysteine
  MOD_RES (51)..(51): Selenocysteine
  MOD_RES (76)..(76): Selenocysteine
XENILDPRLLIAFQNRERQEQLMGYRKRGPKPKPLVVQXSHLLPPMRQLRXWWGLGRSRNSRHAVGLSPPSSHPCXRSLRCLPLPVVPMS

SEQ ID NO: 5155 - protein, 91 aa, Homo sapiens
  MOD_RES (5)..(5): Selenocysteine
  MOD_RES (8)..(8): Selenocysteine
  MOD_RES (50)..(50): Selenocysteine
MGKKXKRXADSSSSEDEEEYVVEKVLDRRVVKGQVEYLLKWKGFSEEHNXWEPEKNLDCPELISEFMKKYKKMKEGENNKPREKSESNKRK

SEQ ID NO: 5156 - protein, 191 aa, Homo sapiens
  MOD_RES (5)..(5): Selenocysteine
  MOD_RES (8)..(8): Selenocysteine
  MOD_RES (50)..(50): Selenocysteine
  MOD_RES (130)..(130): Selenocysteine
  MOD_RES (145)..(145): Selenocysteine
  MOD_RES (173)..(173): Selenocysteine
  MOD_RES (188)..(188): Selenocysteine
MGKKXKRXADSSSSEDEEEYVVEKVLDRRVVKGQVEYLLKWKGFSEEHNXWEPEKNLDCPELISEFMKKYKKMKEGENNKPREKSESNKRKSNFSNSADDIKSKKKREQSNDIARGFERGLEPEKIIGAXDSCGDLMFLMKWKDXDEADLVLAKEANVKCPQIVIAFYEERLXWHAYPEDAENKEKEXAKS

SEQ ID NO: 5157 - protein, 412 aa, Homo sapiens
  MOD_RES (41)..(41): Selenocysteine
  MOD_RES (78)..(78): Selenocysteine
  MOD_RES (156)..(156): Selenocysteine
  MOD_RES (222)..(222): Selenocysteine
  MOD_RES (282)..(282): Selenocysteine
  MOD_RES (291)..(291): Selenocysteine
  MOD_RES (299)..(299): Selenocysteine
  MOD_RES (324)..(324): Selenocysteine
  MOD_RES (333)..(333): Selenocysteine
  MOD_RES (342)..(342): Selenocysteine
  MOD_RES (371)..(371): Selenocysteine
  MOD_RES (374)..(374): Selenocysteine
  MOD_RES (379)..(379): Selenocysteine
  MOD_RES (381)..(381): Selenocysteine
MELSAVGERVFAAESIIKRRIRKGRIEYLVKWKGWAIKYSXWEPEENILDSRLIAAFEQKERERELYGPKKRGPKPKXFLLKARAQAEALRISDVHFSVKPSASASSPKLHSSAAVHRLKKDIRRCHRMSRRPLPRPDPQGGSPGLRPPISPFSEXVRIINRKVKPREPKRNRIILNLKVIDKGAGGGGAGQGAGALARPKVPSRNRVIGKSKKFSESVLRXQIRHMKFGAFALYKPPPAPLVAPSPGKAEASAPGPGLLLAAPAAPYDARSSGSSGCPSPXPQSSDPDDXPPKLLPEXVSPSAPSWREPEVLDLSLPPESAAXSKRAPPEVXAAAGPAPPXAPEPAGASSEPEAGDWRPEMSPCSNVVVXDVXSNLLXVXIKEFCNPEDFEKVAAGVAGAAGGGGSIGASK

SEQ ID NO: 5158 - protein, 394 aa, Homo sapiens
  MOD_RES (41)..(41): Selenocysteine
  MOD_RES (78)..(78): Selenocysteine
  MOD_RES (138)..(138): Selenocysteine
  MOD_RES (204)..(204): Selenocysteine
  MOD_RES (264)..(264): Selenocysteine
  MOD_RES (273)..(273): Selenocysteine
  MOD_RES (281)..(281): Selenocysteine
  MOD_RES (306)..(306): Selenocysteine
  MOD_RES (315)..(315): Selenocysteine
  MOD_RES (324)..(324): Selenocysteine
  MOD_RES (353)..(353): Selenocysteine
  MOD_RES (356)..(356): Selenocysteine
  MOD_RES (361)..(361): Selenocysteine
  MOD_RES (363)..(363): Selenocysteine
MELSAVGERVFAAESIIKRRIRKGRIEYLVKWKGWAIKYSXWEPEENILDSRLIAAFEQKERERELYGPKKRGPKPKXFLLKPSASASSPKLHSSAAVHRLKKDIRRCHRMSRRPLPRPDPQGGSPGLRPPISPFSEXVRIINRKVKPREPKRNRIILNLKVIDKGAGGGGAGQGAGALARPKVPSRNRVIGKSKKFSESVLRXQIRHMKFGAFALYKPPPAPLVAPSPGKAEASAPGPGLLLAAPAAPYDARSSGSSGCPSPXPQSSDPDDXPPKLLPEXVSPSAPSWREPEVLDLSLPPESAAXSKRAPPEVXAAAGPAPPXAPEPAGASSEPEAGDWRPEMSPCSNVVVXDVXSNLLXVXIKEFCNPEDFEKVAAGVAGAAGGGGSIGASK

SEQ ID NO: 5159 - protein, 121 aa, Homo sapiens
  MOD_RES (84)..(84): Selenocysteine
  MOD_RES (112)..(112): Selenocysteine
MELSAIGEQVFAVESIRKKRVRKGKVEYLVKWKGWPPKEERDRASGYRKRGPKPKRLLLQRLYSMDLRSSHKAKGKEKLCFSLXCPLGSGSPEGVVKAGAPELVDKGPLVPXLPFPLRKPR

SEQ ID NO: 5160 - protein, 158 aa, Homo sapiens
  MOD_RES (41)..(41): Selenocysteine
  MOD_RES (119)..(119): Selenocysteine
  MOD_RES (128)..(128): Selenocysteine
  MOD_RES (130)..(130): Selenocysteine
  MOD_RES (133)..(133): Selenocysteine
  MOD_RES (138)..(138): Selenocysteine
  MOD_RES (140)..(140): Selenocysteine
MELSAIGEQVFAVESIRKKRVRKGKVEYLVKWKGWPPKYSXWEPEEHILDPRLVMAYEEKEERDRASGYRKRGPKPKRLLLQEPPAPDVLQAAGEWEPAAQPPEEEADADLAEGPPPWXPALPSSEVXVXDIXANSIXVXFREAQAAEGFFRDRSGKF

SEQ ID NO: 5161 - protein, 251 aa, Homo sapiens
  MOD_RES (41)..(41): Selenocysteine
  MOD_RES (106)..(106): Selenocysteine
  MOD_RES (134)..(134): Selenocysteine
  MOD_RES (212)..(212): Selenocysteine
  MOD_RES (221)..(221): Selenocysteine
  MOD_RES (223)..(223): Selenocysteine
  MOD_RES (226)..(226): Selenocysteine
  MOD_RES (231)..(231): Selenocysteine
  MOD_RES (233)..(233): Selenocysteine
MELSAIGEQVFAVESIRKKRVRKGKVEYLVKWKGWPPKYSXWEPEEHILDPRLVMAYEEKEERDRASGYRKRGPKPKRLLLQRLYSMDLRSSHKAKGKEKLCFSLXCPLGSGSPEGVVKAGAPELVDKGPLVPXLPFPLRKPRKAHKYLRLSRKKFPPRGPNLESHSHRRELFLQEPPAPDVLQAAGEWEPAAQPPEEEADADLAEGPPPWXPALPSSEVXVXDIXANSIXVXFREAQAAEGFFRDRSGKF

SEQ ID NO: 5162 - protein, 389 aa, Homo sapiens
  MOD_RES (41)..(41): Selenocysteine
  MOD_RES (78)..(78): Selenocysteine
  MOD_RES (91)..(91): Selenocysteine
  MOD_RES (117)..(117): Selenocysteine
  MOD_RES (136)..(136): Selenocysteine
  MOD_RES (138)..(138): Selenocysteine
  MOD_RES (141)..(141): Selenocysteine
  MOD_RES (182)..(182): Selenocysteine
  MOD_RES (234)..(234): Selenocysteine
  MOD_RES (264)..(264): Selenocysteine
  MOD_RES (272)..(272): Selenocysteine
  MOD_RES (279)..(279): Selenocysteine
  MOD_RES (305)..(305): Selenocysteine
  MOD_RES (356)..(356): Selenocysteine
  MOD_RES (364)..(364): Selenocysteine
  MOD_RES (367)..(367): Selenocysteine
  MOD_RES (372)..(372): Selenocysteine
  MOD_RES (374)..(374): Selenocysteine
  MOD_RES (380)..(380): Selenocysteine
MELSAVGERVFAAEALLKRRIRKGRMEYLVKWKGWSQKYSXWEPEENILDARLLAAFEEREREMELYGPKKRGPKPKXFLLKAQAKAKAKXYEFRSDSARGIRIPYPGRSPQDLASXSRAREGLRNMGLSPPASSXSXSSXCRAEAPRDRDRDRDRDRERDRERERERERERERERERERGXSRVDDKPSSPGDSSKKRGPKPRKELPDPSQRPLGEPSAGLGEYLKGRKLDDXPSGAGKFPAGHSVIQLARRQDSDLVQCGVXSPSSAEAXGKLAVDXFPARVIKHRAAFLEAKGQGALDPNGXRVRHGSGPPSSGGGLYRDMGAQGGRPSLIARIPVARILGDPEEESWSPSLXNLEKVVVXDVXSNFLXVXIKESNXDQGFFKEKR

SEQ ID NO: 5163 - protein, 175 aa, Homo sapiens
  MOD_RES (16)..(16): Selenocysteine
  MOD_RES (53)..(53): Selenocysteine
  MOD_RES (66)..(66): Selenocysteine
  MOD_RES (92)..(92): Selenocysteine
  MOD_RES (111)..(111): Selenocysteine
  MOD_RES (113)..(113): Selenocysteine
  MOD_RES (116)..(116): Selenocysteine
  MOD_RES (157)..(157): Selenocysteine
MEYLVKWKGWSQKYSXWEPEENILDARLLAAFEEREREMELYGPKKRGPKPKXFLLKAQAKAKAKXYEFRSDSARGIRIPYPGRSPQDLASXSRAREGLRNMGLSPPASSXSXSSXCRAEAPRDRDRDRDRDRERDRERERERERERERERERERGXSRVDDKPSSPGDSSKKRG

SEQ ID NO: 5164 - protein, 242 aa, Homo sapiens
  MOD_RES (31)..(31): Selenocysteine
  MOD_RES (68)..(68): Selenocysteine
  MOD_RES (81)..(81): Selenocysteine
  MOD_RES (107)..(107): Selenocysteine
  MOD_RES (126)..(126): Selenocysteine
  MOD_RES (128)..(128): Selenocysteine
  MOD_RES (131)..(131): Selenocysteine
  MOD_RES (172)..(172): Selenocysteine
  MOD_RES (224)..(224): Selenocysteine
MSAAHVGKSGGQEGRMEYLVKWKGWSQKYSXWEPEENILDARLLAAFEEREREMELYGPKKRGPKPKXFLLKAQAKAKAKXYEFRSDSARGIRIPYPGRSPQDLASXSRAREGLRNMGLSPPASSXSXSSXCRAEAPRDRDRDRDRDRERDRERERERERERERERERERGXSRVDDKPSSPGDSSKKRGPKPRKELPDPSQRPLGEPSAGLGEYLKGRKLDDXPSGAGKFPAGHSVIQLAR

SEQ ID NO: 5165 - protein, 169 aa, Homo sapiens
  MOD_RES (35)..(35): Selenocysteine
  MOD_RES (50)..(50): Selenocysteine
  MOD_RES (56)..(56): Selenocysteine
  MOD_RES (74)..(74): Selenocysteine
  MOD_RES (87)..(87): Selenocysteine
  MOD_RES (106)..(106): Selenocysteine
  MOD_RES (149)..(149): Selenocysteine
MDKCQKHDVECEKPDANEDSLCNSVHVQWPGEGSXGFAFIRPKMPFFGNXFSPKKXPPRKSASLSNLHSLDRSXREVELGLEYGSPXMNLAGQSLKFENGQWIAEXGVSGGVDRREVQRLRRRNQQLEEENNLLRLKVDILLDMLSESXAESHLMEKELDELRISRKRK

SEQ ID NO: 5166 - protein, 61 aa, Homo sapiens
  MOD_RES (7)..(7): Selenocysteine
  MOD_RES (13)..(13): Selenocysteine
  MOD_RES (31)..(31): Selenocysteine
  MOD_RES (44)..(44): Selenocysteine
MPFFGNXFSPKKXPPRKSASLSNLHSLDRSXREVELGLEYGSPXMNLAGQSLKFENGQWIA

SEQ ID NO: 5167 - protein, 101 aa, Homo sapiens
  MOD_RES (7)..(7): Selenocysteine
  MOD_RES (13)..(13): Selenocysteine
  MOD_RES (31)..(31): Selenocysteine
  MOD_RES (44)..(44): Selenocysteine
  MOD_RES (63)..(63): Selenocysteine
MPFFGNXFSPKKXPPRKSASLSNLHSLDRSXREVELGLEYGSPXMNLAGQSLKFENGQWIAEXGVSGGVDRREVQRLRRRNQQLEEENNLLRLKVDILLDM

SEQ ID NO: 5168 - protein, 126 aa, Homo sapiens
  MOD_RES (7)..(7): Selenocysteine
  MOD_RES (13)..(13): Selenocysteine
  MOD_RES (31)..(31): Selenocysteine
  MOD_RES (44)..(44): Selenocysteine
  MOD_RES (63)..(63): Selenocysteine
  MOD_RES (106)..(106): Selenocysteine
MPFFGNXFSPKKXPPRKSASLSNLHSLDRSXREVELGLEYGSPXMNLAGQSLKFENGQWIAEXGVSGGVDRREVQRLRRRNQQLEEENNLLRLKVDILLDMLSESXAESHLMEKELDELRISRKRK

SEQ ID NO: 5169 - protein, 950 aa, Homo sapiens
  MOD_RES (92)..(92): Selenocysteine
  MOD_RES (120)..(120): Selenocysteine
  MOD_RES (138)..(139): Selenocysteine
  MOD_RES (149)..(149): Selenocysteine
  MOD_RES (172)..(172): Selenocysteine
  MOD_RES (204)..(204): Selenocysteine
  MOD_RES (206)..(206): Selenocysteine
  MOD_RES (212)..(212): Selenocysteine
  MOD_RES (227)..(227): Selenocysteine
  MOD_RES (234)..(234): Selenocysteine
  MOD_RES (280)..(281): Selenocysteine
  MOD_RES (331)..(331): Selenocysteine
  MOD_RES (334)..(334): Selenocysteine
  MOD_RES (338)..(339): Selenocysteine
  MOD_RES (347)..(347): Selenocysteine
  MOD_RES (418)..(418): Selenocysteine
  MOD_RES (421)..(421): Selenocysteine
  MOD_RES (431)..(431): Selenocysteine
  MOD_RES (460)..(460): Selenocysteine
  MOD_RES (470)..(470): Selenocysteine
  MOD_RES (478)..(478): Selenocysteine
  MOD_RES (486)..(486): Selenocysteine
  MOD_RES (488)..(488): Selenocysteine
  MOD_RES (546)..(546): Selenocysteine
  MOD_RES (580)..(580): Selenocysteine
  MOD_RES (598)..(598): Selenocysteine
  MOD_RES (604)..(604): Selenocysteine
  MOD_RES (606)..(607): Selenocysteine
  MOD_RES (633)..(633): Selenocysteine
  MOD_RES (635)..(635): Selenocysteine
  MOD_RES (642)..(642): Selenocysteine
  MOD_RES (669)..(669): Selenocysteine
  MOD_RES (699)..(699): Selenocysteine
  MOD_RES (705)..(705): Selenocysteine
  MOD_RES (731)..(731): Selenocysteine
  MOD_RES (747)..(747): Selenocysteine
  MOD_RES (753)..(753): Selenocysteine
  MOD_RES (780)..(780): Selenocysteine
  MOD_RES (795)..(795): Selenocysteine
  MOD_RES (801)..(803): Selenocysteine
  MOD_RES (818)..(818): Selenocysteine
  MOD_RES (916)..(916): Selenocysteine
MHKRKGPPGPPGRGAAAARQLGLLVDLSPDGLMIPEDGANDEELEAEFLALVGGQPPALEKLKGKGPLPMEAIEKMASLCMRDPDEDEEEGXDEDDLEADDDLLAELNEVLGEEQKASEXPPPVAQPKPEAPHPGLEXXLQERLALYQXAIESARQAGDSAKMRRYDRGLKXLENLLASIRKGNAIDEADIPPPVAIGKGPASXPXYSPAPXQPAPRIASAPEPRVXLEGPSAXAPASSPGLAKPQMPPGPCSPGPLAQLQSRQRDYKLAALHAKQQGDXXAAARHFRVAKSFDAVLEALSRGEPVDLSCLPPPPDQLPPDPPSPPSQPPXPAXAPSXXEVPPPPRXLLEALEQRMERYQVAAAQAKSKGDQRKARMHERIVKQYQDAIRAHKAGRAVDVAELPVPPGFPPIQGLEAXKPXQQSLVGVLEXAMKLANQDEGPEDEEDEVPKKQNSPVAPXAQPKAPPSRXPQSGSAPXAKAPPKAXSXRAQQQLAFLEGRKKQLLQAALRAKQKNDVEGAKMHLRQAKGLEPMLEASRNGLPVDIXKVPPAPVNKDDFALVQRPGPGLSQEAARRYGELXKLIRQQHEMCLNHSNQFXQLGNIXEXXKFEKLAEDCKRSMDILKQAFVRGLPXPXARFEQRXFSVIKIFPDLSSNDMLLFIVKGINLPXPPGLSPGDLDVFVRFDFPYPNVEEAQKDKXSVIKNXDSPEFKEQFKLCINRSHRGFRRAIQXKGIKFEVVHKGGLFKXDRVLGXAQLKLDALEIACEVREILEVLDGRRPXGGRLEVMVRIREPLXAQQLEXXXERWLVIDPVPAAVPXVAGPKGKAPPVPAPARESGNRSARPLHSLSVLAFDQERLERKILALRQARRPVPPEVAQQYQDIMQRSQWQRAQLEQGGVGIRREYAAQLERQLQFYXEAARRLGNDGSRDAAKEALYRRNLVESELQRLRR

SEQ ID NO: 5170 - protein, 951 aa, Homo sapiens
  MOD_RES (92)..(92): Selenocysteine
  MOD_RES (120)..(120): Selenocysteine
  MOD_RES (138)..(139): Selenocysteine
  MOD_RES (149)..(149): Selenocysteine
  MOD_RES (172)..(172): Selenocysteine
  MOD_RES (204)..(204): Selenocysteine
  MOD_RES (206)..(206): Selenocysteine
  MOD_RES (212)..(212): Selenocysteine
  MOD_RES (227)..(227): Selenocysteine
  MOD_RES (234)..(234): Selenocysteine
  MOD_RES (280)..(281): Selenocysteine
  MOD_RES (331)..(331): Selenocysteine
  MOD_RES (334)..(334): Selenocysteine
  MOD_RES (338)..(339): Selenocysteine
  MOD_RES (347)..(347): Selenocysteine
  MOD_RES (418)..(418): Selenocysteine
  MOD_RES (421)..(421): Selenocysteine
  MOD_RES (431)..(431): Selenocysteine
  MOD_RES (460)..(460): Selenocysteine
  MOD_RES (470)..(470): Selenocysteine
  MOD_RES (478)..(478): Selenocysteine
  MOD_RES (486)..(486): Selenocysteine
  MOD_RES (488)..(488): Selenocysteine
  MOD_RES (546)..(546): Selenocysteine
  MOD_RES (580)..(580): Selenocysteine
  MOD_RES (598)..(598): Selenocysteine
  MOD_RES (604)..(604): Selenocysteine
  MOD_RES (606)..(607): Selenocysteine
  MOD_RES (633)..(633): Selenocysteine
  MOD_RES (635)..(635): Selenocysteine
  MOD_RES (642)..(642): Selenocysteine
  MOD_RES (669)..(669): Selenocysteine
  MOD_RES (699)..(699): Selenocysteine
  MOD_RES (705)..(705): Selenocysteine
  MOD_RES (731)..(731): Selenocysteine
  MOD_RES (747)..(747): Selenocysteine
  MOD_RES (753)..(753): Selenocysteine
  MOD_RES (780)..(780): Selenocysteine
  MOD_RES (795)..(795): Selenocysteine
  MOD_RES (801)..(803): Selenocysteine
  MOD_RES (818)..(818): Selenocysteine
  MOD_RES (917)..(917): Selenocysteine
MHKRKGPPGPPGRGAAAARQLGLLVDLSPDGLMIPEDGANDEELEAEFLALVGGQPPALEKLKGKGPLPMEAIEKMASLCMRDPDEDEEEGXDEDDLEADDDLLAELNEVLGEEQKASEXPPPVAQPKPEAPHPGLEXXLQERLALYQXAIESARQAGDSAKMRRYDRGLKXLENLLASIRKGNAIDEADIPPPVAIGKGPASXPXYSPAPXQPAPRIASAPEPRVXLEGPSAXAPASSPGLAKPQMPPGPCSPGPLAQLQSRQRDYKLAALHAKQQGDXXAAARHFRVAKSFDAVLEALSRGEPVDLSCLPPPPDQLPPDPPSPPSQPPXPAXAPSXXEVPPPPRXLLEALEQRMERYQVAAAQAKSKGDQRKARMHERIVKQYQDAIRAHKAGRAVDVAELPVPPGFPPIQGLEAXKPXQQSLVGVLEXAMKLANQDEGPEDEEDEVPKKQNSPVAPXAQPKAPPSRXPQSGSAPXAKAPPKAXSXRAQQQLAFLEGRKKQLLQAALRAKQKNDVEGAKMHLRQAKGLEPMLEASRNGLPVDIXKVPPAPVNKDDFALVQRPGPGLSQEAARRYGELXKLIRQQHEMCLNHSNQFXQLGNIXEXXKFEKLAEDCKRSMDILKQAFVRGLPXPXARFEQRXFSVIKIFPDLSSNDMLLFIVKGINLPXPPGLSPGDLDVFVRFDFPYPNVEEAQKDKXSVIKNXDSPEFKEQFKLCINRSHRGFRRAIQXKGIKFEVVHKGGLFKXDRVLGXAQLKLDALEIACEVREILEVLDGRRPXGGRLEVMVRIREPLXAQQLEXXXERWLVIDPVPAAVPXQVAGPKGKAPPVPAPARESGNRSARPLHSLSVLAFDQERLERKILALRQARRPVPPEVAQQYQDIMQRSQWQRAQLEQGGVGIRREYAAQLERQLQFYXEAARRLGNDGSRDAAKEALYRRNLVESELQRLRR

SEQ ID NO: 5171 - protein, 378 aa, Homo sapiens
  MOD_RES (1)..(1): Any amino acid
  MOD_RES (18)..(18): Selenocysteine
  MOD_RES (50)..(50): Selenocysteine
  MOD_RES (52)..(52): Selenocysteine
  MOD_RES (58)..(58): Selenocysteine
  MOD_RES (73)..(73): Selenocysteine
  MOD_RES (80)..(80): Selenocysteine
  MOD_RES (126)..(127): Selenocysteine
  MOD_RES (177)..(177): Selenocysteine
  MOD_RES (180)..(180): Selenocysteine
  MOD_RES (184)..(185): Selenocysteine
  MOD_RES (193)..(193): Selenocysteine
  MOD_RES (268)..(268): Selenocysteine
  MOD_RES (310)..(310): Selenocysteine
  MOD_RES (331)..(331): Selenocysteine
XQAGDSAKMRRYDRGLKXLENLLASIRKGNAIDEADIPPPVAIGKGPASXPXYSPAPXQPAPRIASAPEPRVXLEGPSAXAPASSPGLAKPQMPPGPCSPGPLAQLQSRQRDYKLAALHAKQQGDXXAAARHFRVAKSFDAVLEALSRGEPVDLSCLPPPPDQLPPDPPSPPSQPPXPAXAPSXXEVPPPPRXLLEALEQRMERYQVAAAQAKSKGDQRKARMHERIVKQYQDAIRAHKAGRAVDVAELPVPPAEQPCGPHSPAQSPXLKNSPVGISPNSQSAPQSHIHQSPAAAGLPRGPQEAAPAGRXASQAEKRRGGCQDAPAPSQGXGAYAGGLAQWAACGHHQGAACPCQQGRLCPGPAAWPGSVSGGRPALW

SEQ ID NO: 5172 - protein, 405 aa, Homo sapiens
  MOD_RES (1)..(1): Any amino acid
  MOD_RES (35)..(35): Selenocysteine
  MOD_RES (53)..(53): Selenocysteine
  MOD_RES (59)..(59): Selenocysteine
  MOD_RES (61)..(62): Selenocysteine
  MOD_RES (88)..(88): Selenocysteine
  MOD_RES (90)..(90): Selenocysteine
  MOD_RES (97)..(97): Selenocysteine
  MOD_RES (124)..(124): Selenocysteine
  MOD_RES (154)..(154): Selenocysteine
  MOD_RES (160)..(160): Selenocysteine
  MOD_RES (186)..(186): Selenocysteine
  MOD_RES (202)..(202): Selenocysteine
  MOD_RES (208)..(208): Selenocysteine
  MOD_RES (235)..(235): Selenocysteine
  MOD_RES (250)..(250): Selenocysteine
  MOD_RES (256)..(258): Selenocysteine
  MOD_RES (273)..(273): Selenocysteine
  MOD_RES (371)..(371): Selenocysteine
XQVPPAPVNKDDFALVQRPGPGLSQEAARRYGELXKLIRQQHEMCLNHSNQFXQLGNIXEXXKFEKLAEDCKRSMDILKQAFVRGLPXPXARFEQRXFSVIKIFPDLSSNDMLLFIVKGINLPXPPGLSPGDLDVFVRFDFPYPNVEEAQKDKXSVIKNXDSPEFKEQFKLCINRSHRGFRRAIQXKGIKFEVVHKGGLFKXDRVLGXAQLKLDALEIACEVREILEVLDGRRPXGGRLEVMVRIREPLXAQQLEXXXERWLVIDPVPAAVPXVAGPKGKAPPVPAPARESGNRSARPLHSLSVLAFDQERLERKILALRQARRPVPPEVAQQYQDIMQRSQWQRAQLEQGGVGIRREYAAQLERQLQFYXEAARRLGNDGSRDAAKEALYRRNLVESELQRLRR

SEQ ID NO: 5173 - protein, 852 aa, Homo sapiens
  MOD_RES (56)..(56): Selenocysteine
  MOD_RES (61)..(62): Selenocysteine
  MOD_RES (107)..(107): Selenocysteine
  MOD_RES (119)..(119): Selenocysteine
  MOD_RES (142)..(142): Selenocysteine
  MOD_RES (148)..(148): Selenocysteine
  MOD_RES (152)..(152): Selenocysteine
  MOD_RES (202)..(202): Selenocysteine
  MOD_RES (244)..(244): Selenocysteine
  MOD_RES (262)..(262): Selenocysteine
  MOD_RES (351)..(351): Selenocysteine
  MOD_RES (374)..(374): Selenocysteine
  MOD_RES (379)..(379): Selenocysteine
  MOD_RES (383)..(383): Selenocysteine
  MOD_RES (454)..(454): Selenocysteine
  MOD_RES (465)..(465): Selenocysteine
  MOD_RES (504)..(504): Selenocysteine
  MOD_RES (590)..(590): Selenocysteine
  MOD_RES (644)..(645): Selenocysteine
  MOD_RES (673)..(673): Selenocysteine
  MOD_RES (680)..(680): Selenocysteine
  MOD_RES (683)..(683): Selenocysteine
  MOD_RES (693)..(693): Selenocysteine
  MOD_RES (712)..(712): Selenocysteine
  MOD_RES (737)..(737): Selenocysteine
  MOD_RES (743)..(743): Selenocysteine
  MOD_RES (791)..(791): Selenocysteine
  MOD_RES (818)..(818): Selenocysteine
  MOD_RES (841)..(841): Selenocysteine
MMPGPRPRKGPQARGQGVAAAKQMGLFMEFGPEDMLLGMDEAEDDEDLEAELLALXGEAQXXGKKPAPKGQAPLPMAHIEKLAADCMRDVEEEEEEEGLEEDAELLXELQEVLGVDEEXEPLDGDEVADPGGSEEENGLEDXEPPVQXAVLXASAPAAQAGASQGLHALLEERIHNYREAAASAKEAGEAAKARRCERGLKXLESQLASVRRGRKINEDEIPPPVALGKRPLAPQEPANRSPEXDPPAPPALESDNPSQPEXSLPGISAQPVSDLDPDPRALLSSRQREYKVAALSAKRAGELDRARELMRIGKRFGAVLEALEKGQPVDLSAMPPAPEDLKPQQASQAPXAPSVIPPAVERVQPVMAPDVPAXPVAPXESQXVLDALQQRLNKYREAGIQARSGGDERKARMHERIAKQYQDAIRAHRAGRKVNFAELPVPPGFPPIPGLESXMGVEEDAVAAXLAAAEKLASAEDSAPADKDEDEGEPPAQAPVAKKPARPXVPSSQRLPEPRASSSKESPSPSVREQLALLEARKLQYQRAALQAKRSQDLEQAKAYLRVAKWLEAQIIQARSGRPVDLSKVPSPLXDEEGDFILIHHEDLRLSQKAEEVYAQLQKMLLEQQEKCLLFSKQFMHQGNVAEXXRFEKLAQDRKKQLEILQLAQAQGLDPPXHHFELKXFQXVRIFSELNSXEMHLIIVRGMNLPAPPGVXPDDLDAFVRFEFHYPNSDQAQKSKXAVVKNXNSPEFDQLFKLNINRNHRGFKRVIQSKGIKFEIFHKGSFFRSDKLVGXAHLKLERLENECEIREIVEVLDGRKPXGGKLEVKVRLREPLSGQDVQMVXENWLVLEPRGL

SEQ ID NO: 5174 - protein, 858 aa, Homo sapiens
  MOD_RES (56)..(56): Selenocysteine
  MOD_RES (61)..(62): Selenocysteine
  MOD_RES (107)..(107): Selenocysteine
  MOD_RES (119)..(119): Selenocysteine
  MOD_RES (142)..(142): Selenocysteine
  MOD_RES (148)..(148): Selenocysteine
  MOD_RES (152)..(152): Selenocysteine
  MOD_RES (202)..(202): Selenocysteine
  MOD_RES (244)..(244): Selenocysteine
  MOD_RES (262)..(262): Selenocysteine
  MOD_RES (351)..(351): Selenocysteine
  MOD_RES (374)..(374): Selenocysteine
  MOD_RES (379)..(379): Selenocysteine
  MOD_RES (383)..(383): Selenocysteine
  MOD_RES (454)..(454): Selenocysteine
  MOD_RES (465)..(465): Selenocysteine
  MOD_RES (510)..(510): Selenocysteine
  MOD_RES (596)..(596): Selenocysteine
  MOD_RES (650)..(651): Selenocysteine
  MOD_RES (679)..(679): Selenocysteine
  MOD_RES (686)..(686): Selenocysteine
  MOD_RES (689)..(689): Selenocysteine
  MOD_RES (699)..(699): Selenocysteine
  MOD_RES (718)..(718): Selenocysteine
  MOD_RES (743)..(743): Selenocysteine
  MOD_RES (749)..(749): Selenocysteine
  MOD_RES (797)..(797): Selenocysteine
  MOD_RES (824)..(824): Selenocysteine
  MOD_RES (847)..(847): Selenocysteine
MMPGPRPRKGPQARGQGVAAAKQMGLFMEFGPEDMLLGMDEAEDDEDLEAELLALXGEAQXXGKKPAPKGQAPLPMAHIEKLAADCMRDVEEEEEEEGLEEDAELLXELQEVLGVDEEXEPLDGDEVADPGGSEEENGLEDXEPPVQXAVLXASAPAAQAGASQGLHALLEERIHNYREAAASAKEAGEAAKARRCERGLKXLESQLASVRRGRKINEDEIPPPVALGKRPLAPQEPANRSPEXDPPAPPALESDNPSQPEXSLPGISAQPVSDLDPDPRALLSSRQREYKVAALSAKRAGELDRARELMRIGKRFGAVLEALEKGQPVDLSAMPPAPEDLKPQQASQAPXAPSVIPPAVERVQPVMAPDVPAXPVAPXESQXVLDALQQRLNKYREAGIQARSGGDERKARMHERIAKQYQDAIRAHRAGRKVNFAELPVPPGFPPIPGLESXMGVEEDAVAAXLAAAEKLASAEDSAPADKDEDEPPGHLQGEPPAQAPVAKKPARPXVPSSQRLPEPRASSSKESPSPSVREQLALLEARKLQYQRAALQAKRSQDLEQAKAYLRVAKWLEAQIIQARSGRPVDLSKVPSPLXDEEGDFILIHHEDLRLSQKAEEVYAQLQKMLLEQQEKCLLFSKQFMHQGNVAEXXRFEKLAQDRKKQLEILQLAQAQGLDPPXHHFELKXFQXVRIFSELNSXEMHLIIVRGMNLPAPPGVXPDDLDAFVRFEFHYPNSDQAQKSKXAVVKNXNSPEFDQLFKLNINRNHRGFKRVIQSKGIKFEIFHKGSFFRSDKLVGXAHLKLERLENECEIREIVEVLDGRKPXGGKLEVKVRLREPLSGQDVQMVXENWLVLEPRGL

SEQ ID NO: 5175 - protein, 672 aa, Homo sapiens
  MOD_RES (1)..(1): Any amino acid
  MOD_RES (43)..(43): Selenocysteine
  MOD_RES (85)..(85): Selenocysteine
  MOD_RES (171)..(171): Selenocysteine
  MOD_RES (194)..(194): Selenocysteine
  MOD_RES (199)..(199): Selenocysteine
  MOD_RES (203)..(203): Selenocysteine
  MOD_RES (274)..(274): Selenocysteine
  MOD_RES (285)..(285): Selenocysteine
  MOD_RES (324)..(324): Selenocysteine
  MOD_RES (410)..(410): Selenocysteine
  MOD_RES (464)..(465): Selenocysteine
  MOD_RES (493)..(493): Selenocysteine
  MOD_RES (500)..(500): Selenocysteine
  MOD_RES (503)..(503): Selenocysteine
  MOD_RES (513)..(513): Selenocysteine
  MOD_RES (532)..(532): Selenocysteine
  MOD_RES (557)..(557): Selenocysteine
  MOD_RES (563)..(563): Selenocysteine
  MOD_RES (611)..(611): Selenocysteine
  MOD_RES (638)..(638): Selenocysteine
  MOD_RES (661)..(661): Selenocysteine
XGASQGLHALLEERIHNYREAAASAKEAGEAAKARRCERGLKXLESQLASVRRGRKINEDEIPPPVALGKRPLAPQEPANRSPEXDPPAPPALESDPDPRALLSSRQREYKVAALSAKRAGELDRARELMRIGKRFGAVLEALEKGQPVDLSAMPPAPEDLKPQQASQAPXAPSVIPPAVERVQPVMAPDVPAXPVAPXESQXVLDALQQRLNKYREAGIQARSGGDERKARMHERIAKQYQDAIRAHRAGRKVNFAELPVPPGFPPIPGLESXMGVEEDAVAAXLAAAEKLASAEDSAPADKDEDEGEPPAQAPVAKKPARPXVPSSQRLPEPRASSSKESPSPSVREQLALLEARKLQYQRAALQAKRSQDLEQAKAYLRVAKWLEAQIIQARSGRPVDLSKVPSPLXDEEGDFILIHHEDLRLSQKAEEVYAQLQKMLLEQQEKCLLFSKQFMHQGNVAEXXRFEKLAQDRKKQLEILQLAQAQGLDPPXHHFELKXFQXVRIFSELNSXEMHLIIVRGMNLPAPPGVXPDDLDAFVRFEFHYPNSDQAQKSKXAVVKNXNSPEFDQLFKLNINRNHRGFKRVIQSKGIKFEIFHKGSFFRSDKLVGXAHLKLERLENECEIREIVEVLDGRKPXGGKLEVKVRLREPLSGQDVQMVXENWLVLEPRGL

SEQ ID NO: 5176 - protein, 628 aa, Homo sapiens
  MOD_RES (1)..(1): Any amino acid
  MOD_RES (31)..(31): Selenocysteine
  MOD_RES (49)..(49): Selenocysteine
  MOD_RES (138)..(138): Selenocysteine
  MOD_RES (161)..(161): Selenocysteine
  MOD_RES (166)..(166): Selenocysteine
  MOD_RES (170)..(170): Selenocysteine
  MOD_RES (241)..(241): Selenocysteine
  MOD_RES (252)..(252): Selenocysteine
  MOD_RES (291)..(291): Selenocysteine
  MOD_RES (377)..(377): Selenocysteine
  MOD_RES (431)..(432): Selenocysteine
  MOD_RES (460)..(460): Selenocysteine
  MOD_RES (467)..(467): Selenocysteine
  MOD_RES (470)..(470): Selenocysteine
  MOD_RES (480)..(480): Selenocysteine
  MOD_RES (499)..(499): Selenocysteine
  MOD_RES (524)..(524): Selenocysteine
  MOD_RES (530)..(530): Selenocysteine
  MOD_RES (578)..(578): Selenocysteine
  MOD_RES (605)..(605): Selenocysteine
  MOD_RES (617)..(617): Selenocysteine
XKINEDEIPPPVALGKRPLAPQEPANRSPEXDPPAPPALESDNPSQPEXSLPGISAQPVSDLDPDPRALLSSRQREYKVAALSAKRAGELDRARELMRIGKRFGAVLEALEKGQPVDLSAMPPAPEDLKPQQASQAPXAPSVIPPAVERVQPVMAPDVPAXPVAPXESQXVLDALQQRLNKYREAGIQARSGGDERKARMHERIAKQYQDAIRAHRAGRKVNFAELPVPPGFPPIPGLESXMGVEEDAVAAXLAAAEKLASAEDSAPADKDEDEGEPPAQAPVAKKPARPXVPSSQRLPEPRASSSKESPSPSVREQLALLEARKLQYQRAALQAKRSQDLEQAKAYLRVAKWLEAQIIQARSGRPVDLSKVPSPLXDEEGDFILIHHEDLRLSQKAEEVYAQLQKMLLEQQEKCLLFSKQFMHQGNVAEXXRFEKLAQDRKKQLEILQLAQAQGLDPPXHHFELKXFQXVRIFSELNSXEMHLIIVRGMNLPAPPGVXPDDLDAFVRFEFHYPNSDQAQKSKXAVVKNXNSPEFDQLFKLNINRNHRGFKRVIQSKGIKFEIFHKGSFFRSDKLVGXAHLKLERLENECEIREIVEVLDGRKPXGGKLEVKPMASXRRGVRPRLCRR

SEQ ID NO: 5177 - protein, 129 aa, Homo sapiens
  MOD_RES (3)..(3): Selenocysteine
  MOD_RES (37)..(37): Selenocysteine
  MOD_RES (76)..(76): Selenocysteine
  MOD_RES (79)..(79): Selenocysteine
  MOD_RES (97)..(97): Selenocysteine
  MOD_RES (124)..(124): Selenocysteine
  MOD_RES (126)..(126): Selenocysteine
KPXPFSRACWQILPHLSAGVPLLGWEHPVQGKSFQAXNCCPQGNGVRKIPPWQPPGACAGGAQDPPPEYDSPERPXELXSNSFNFQNRLCRIFHEGXHEGEIASSEVQSRKCIAAGNPHSSAQXLXKSQ

SEQ ID NO: 5178 - protein, 73 aa, Homo sapiens
  MOD_RES (12)..(12): Selenocysteine
MNPREEKVKIIXEEFIENDEDADMGRQNKNSKVRRQPRKKQAEANSFLPSLLADPPPPLRRSSPPRLGASRAG

SEQ ID NO: 5179 - protein, 122 aa, Homo sapiens
  MOD_RES (12)..(12): Selenocysteine
  MOD_RES (44)..(44): Selenocysteine
  MOD_RES (78)..(78): Selenocysteine
  MOD_RES (117)..(117): Selenocysteine
MNPREEKVKIIXEEFIENDEDADMGRQNKNSKVRRQPRKKQKPXPFSRACWQILPHLSAGVPLLGWEHPVQGKSFQAXNCCPQGNGVRKIPPWQPPGACAGGAQDPPPEYDSPERPXERAGC

SEQ ID NO: 5180 - protein, 111 aa, Homo sapiens
  MOD_RES (12)..(12): Selenocysteine
  MOD_RES (44)..(44): Selenocysteine
  MOD_RES (70)..(70): Selenocysteine
  MOD_RES (76)..(76): Selenocysteine
  MOD_RES (96)..(96): Selenocysteine
  MOD_RES (98)..(98): Selenocysteine
  MOD_RES (105)..(105): Selenocysteine
MNPREEKVKIIXEEFIENDEDADMGRQNKNSKVRRQPRKKQPPXAVPKEMVSEKSHLGNPQEPVQEEPKXRLLSMXVRRGPRRELVVKKSLGRPGXVXHVCNPSXLEGRGG

SEQ ID NO: 5181 - protein, 588 aa, Homo sapiens
  MOD_RES (12)..(12): Selenocysteine
  MOD_RES (44)..(44): Selenocysteine
  MOD_RES (70)..(70): Selenocysteine
  MOD_RES (76)..(76): Selenocysteine
  MOD_RES (90)..(90): Selenocysteine
  MOD_RES (93)..(93): Selenocysteine
  MOD_RES (125)..(125): Selenocysteine
  MOD_RES (141)..(141): Selenocysteine
  MOD_RES (145)..(145): Selenocysteine
  MOD_RES (154)..(154): Selenocysteine
  MOD_RES (196)..(196): Selenocysteine
  MOD_RES (218)..(218): Selenocysteine
  MOD_RES (293)..(293): Selenocysteine
  MOD_RES (296)..(296): Selenocysteine
  MOD_RES (316)..(316): Selenocysteine
  MOD_RES (325)..(325): Selenocysteine
  MOD_RES (368)..(368): Selenocysteine
  MOD_RES (379)..(379): Selenocysteine
  MOD_RES (416)..(416): Selenocysteine
  MOD_RES (451)..(451): Selenocysteine
  MOD_RES (463)..(463): Selenocysteine
  MOD_RES (476)..(476): Selenocysteine
  MOD_RES (480)..(480): Selenocysteine
  MOD_RES (491)..(491): Selenocysteine
  MOD_RES (504)..(504): Selenocysteine
  MOD_RES (508)..(508): Selenocysteine
  MOD_RES (526)..(526): Selenocysteine
  MOD_RES (528)..(528): Selenocysteine
  MOD_RES (564)..(564): Selenocysteine
  MOD_RES (576)..(576): Selenocysteine
MNPREEKVKIIXEEFIENDEDADMGRQNKNSKVRRQPRKKQPPXAVPKEMVSEKSHLGNPQEPVQEEPKXRLLSMXVRRGPRSLPPIPSXSRXGFAEFSMRGRMREKLQAARSKAESALLQEIPXPRPRRLRSPSKKELEXEFGXEPGKEVERXQQEVDSQSYSRVKFHDSARKIKPKPQVPPGFPSAEEAYNFFXFNFDPEPEGSEEKPKARHRAGXNQEEEEGEEEEPPAQGGGKEMDEEELLNGDDAEDFLLGLDHVADDFVAVRPADYESIHDRLQMEREMLFIPSRQXVPXYKKLPENVQPRFLEDEGLYXGVRPEVARXNQNIMENRLLMQDPERRWFGDDGRILALPNPIKPFPSRPPVLXQEQSIKAELEXLYKKAVKYVHSSQHVIRSGDPPGNFQLDIDISGLIFXHHPCFSREHVLAAKLAQLYDQYLARHQRNKAKFLXDKLQALRNAVQXGLDPEKPHQSLDXIQKXINEYKSEIRQXRKFRDAEQEKDRXLLKXIIKVWKEMKSLREFQRFXNXPLKLVLRKEKADQKADEEAYEAEIQAEISELLEEHXEEYAQKMEEYRXSLQQWKAWRKVQ

SEQ ID NO: 5182 - protein, 1620 aa, Homo sapiens
  MOD_RES (12)..(12): Selenocysteine
  MOD_RES (44)..(44): Selenocysteine
  MOD_RES (70)..(70): Selenocysteine
  MOD_RES (76)..(76): Selenocysteine
  MOD_RES (90)..(90): Selenocysteine
  MOD_RES (93)..(93): Selenocysteine
  MOD_RES (125)..(125): Selenocysteine
  MOD_RES (141)..(141): Selenocysteine
  MOD_RES (145)..(145): Selenocysteine
  MOD_RES (154)..(154): Selenocysteine
  MOD_RES (196)..(196): Selenocysteine
  MOD_RES (218)..(218): Selenocysteine
  MOD_RES (293)..(293): Selenocysteine
  MOD_RES (296)..(296): Selenocysteine
  MOD_RES (316)..(316): Selenocysteine
  MOD_RES (325)..(325): Selenocysteine
  MOD_RES (368)..(368): Selenocysteine
  MOD_RES (379)..(379): Selenocysteine
  MOD_RES (416)..(416): Selenocysteine
  MOD_RES (451)..(451): Selenocysteine
  MOD_RES (463)..(463): Selenocysteine
  MOD_RES (476)..(476): Selenocysteine
  MOD_RES (480)..(480): Selenocysteine
  MOD_RES (491)..(491): Selenocysteine
  MOD_RES (504)..(504): Selenocysteine
  MOD_RES (508)..(508): Selenocysteine
  MOD_RES (526)..(526): Selenocysteine
  MOD_RES (528)..(528): Selenocysteine
  MOD_RES (564)..(564): Selenocysteine
  MOD_RES (576)..(576): Selenocysteine
  MOD_RES (625)..(625): Selenocysteine
  MOD_RES (649)..(649): Selenocysteine
  MOD_RES (661)..(661): Selenocysteine
  MOD_RES (696)..(696): Selenocysteine
  MOD_RES (725)..(725): Selenocysteine
  MOD_RES (731)..(731): Selenocysteine
  MOD_RES (738)..(738): Selenocysteine
  MOD_RES (750)..(751): Selenocysteine
  MOD_RES (754)..(754): Selenocysteine
  MOD_RES (759)..(759): Selenocysteine
  MOD_RES (771)..(771): Selenocysteine
  MOD_RES (794)..(794): Selenocysteine
  MOD_RES (797)..(797): Selenocysteine
  MOD_RES (842)..(842): Selenocysteine
  MOD_RES (846)..(846): Selenocysteine
  MOD_RES (878)..(878): Selenocysteine
  MOD_RES (957)..(957): Selenocysteine
  MOD_RES (963)..(963): Selenocysteine
  MOD_RES (1032)..(1032): Selenocysteine
  MOD_RES (1083)..(1083): Selenocysteine
  MOD_RES (1087)..(1087): Selenocysteine
  MOD_RES (1110)..(1110): Selenocysteine
  MOD_RES (1114)..(1116): Selenocysteine
  MOD_RES (1141)..(1141): Selenocysteine
  MOD_RES (1176)..(1176): Selenocysteine
  MOD_RES (1192)..(1192): Selenocysteine
  MOD_RES (1202)..(1202): Selenocysteine
  MOD_RES (1239)..(1239): Selenocysteine
  MOD_RES (1243)..(1243): Selenocysteine
  MOD_RES (1270)..(1270): Selenocysteine
  MOD_RES (1288)..(1289): Selenocysteine
  MOD_RES (1297)..(1297): Selenocysteine
  MOD_RES (1301)..(1301): Selenocysteine
  MOD_RES (1324)..(1324): Selenocysteine
  MOD_RES (1341)..(1341): Selenocysteine
  MOD_RES (1353)..(1353): Selenocysteine
  MOD_RES (1396)..(1396): Selenocysteine
  MOD_RES (1401)..(1401): Selenocysteine
  MOD_RES (1423)..(1423): Selenocysteine
  MOD_RES (1457)..(1457): Selenocysteine
  MOD_RES (1517)..(1517): Selenocysteine
  MOD_RES (1524)..(1524): Selenocysteine
  MOD_RES (1526)..(1526): Selenocysteine
  MOD_RES (1581)..(1581): Selenocysteine
MNPREEKVKIIXEEFIENDEDADMGRQNKNSKVRRQPRKKQPPXAVPKEMVSEKSHLGNPQEPVQEEPKXRLLSMXVRRGPRSLPPIPSXSRXGFAEFSMRGRMREKLQAARSKAESALLQEIPXPRPRRLRSPSKKELEXEFGXEPGKEVERXQQEVDSQSYSRVKFHDSARKIKPKPQVPPGFPSAEEAYNFFXFNFDPEPEGSEEKPKARHRAGXNQEEEEGEEEEPPAQGGGKEMDEEELLNGDDAEDFLLGLDHVADDFVAVRPADYESIHDRLQMEREMLFIPSRQXVPXYKKLPENVQPRFLEDEGLYXGVRPEVARXNQNIMENRLLMQDPERRWFGDDGRILALPNPIKPFPSRPPVLXQEQSIKAELEXLYKKAVKYVHSSQHVIRSGDPPGNFQLDIDISGLIFXHHPCFSREHVLAAKLAQLYDQYLARHQRNKAKFLXDKLQALRNAVQXGLDPEKPHQSLDXIQKXINEYKSEIRQXRKFRDAEQEKDRXLLKXIIKVWKEMKSLREFQRFXNXPLKLVLRKEKADQKADEEAYEAEIQAEISELLEEHXEEYAQKMEEYRXSLQQWKAWRKVQRAKKKKRKQAAEEHPGDEIAEPYPEEDLVKPSPPEPXDRAVIEQEVRERAAQSRRRPWEPXLVPELSLAGSVXPNDQCPRAEVSRREDVKKRSVYLKVLFNNKEVSRXVSRPLGADFRVHFGQIFNLQIVNWPESLXLQVYEXVGHSSPXLLAEVFLPIPEXXVVXGRAPXEEVEFSSNQHVXLDHEGVGSGVPFSFEADGSNQLXLMXSGKVSHSVAWAIGENGIPLIPPLSQQNIGFRSALKKADAISSIGXSGLXDMKKLAKWAAESKLDPNDPNNAPLMQLISVAXSGESYVPDFFRLEQLQQEFNFVSDQELNRSKRFRLLHLRSQEVPEFRNYKQVPVYDREIMEKVFQDYEKRLRDRNVIEXKEHIDXHRAIVAKYLQQVRESVINRFLIAKQYFLLADMIVEEEVPNISILGLSLFKLAEQKRPLRPRRKGRKKVXAQNLSDGDIKLLVNIVRAYDIPVRKPAVSKFQQPSRSSRMFSEKHAASPSXYSPXHNADYPLGQVLVRPFVEVSFQRXVCHXXXAEGPNPSWNEELELPFRAPNGDYSXASLQSVKDVVFINIFDEVLHDVLEDDRERGSGIHXRIERHWLGCVKMPFSXIYFQARIDGXFKIDIPPVLLGYSKERNMILERGFDSVRSLSEGSYIXLFIXIEPQLVPGESIREKFESQEDEKLLQAXEKFQAECALKFPNRQCLXXVIDISGKXVFIXRYLKPLNPPQELLNVYPNNLQAXAELVARYVSLIPFLPDXVSFGGICDLWSXSDQFLDLLAGDEEEHAVLLCNYFLSLGKKAWLLMGNAIPEGPXAYVLXWEQGRYLIWNPCSGHFYGQFDXFCPLKNVGCLIGPDNIWFNIQRYESPLRINFDVXRPKLWKSFFSRSLPYPGLSSVQPEELIYQRSDKAAAAELQDRIEKILKEKIMDWRPRHLXRWNRYCXSXLRHFLPLLEKSQGEDVEDDHRAELLKQLGDYRFSGFPLHMPYSEVKPLIDAVYSXGVHNIDVPNVEFALAVYIHPYPKNVLSVWIYVASLIRNR

SEQ ID NO: 5183 - protein, 142 aa, Homo sapiens
  MOD_RES (1)..(1): Any amino acid
  MOD_RES (3)..(3): Selenocysteine
  MOD_RES (56)..(56): Selenocysteine
  MOD_RES (63)..(63): Selenocysteine
  MOD_RES (65)..(65): Selenocysteine
  MOD_RES (120)..(120): Selenocysteine
XDXFCPLKNVGCLIGPDNPEELIYQRSDKAAAAELQDRIEKILKEKIMDWRPRHLXRWNRYCXSXLRHFLPLLEKSQGEDVEDDHRAELLKQLGDYRFSGFPLHMPYSEVKPLIDAVYSXGVHNIDVPNVEFALAVYIHPYP

SEQ ID NO: 5184 - protein, 903 aa, Homo sapiens
  MOD_RES (1)..(1): Any amino acid
  MOD_RES (7)..(7): Selenocysteine
  MOD_RES (19)..(19): Selenocysteine
  MOD_RES (68)..(68): Selenocysteine
  MOD_RES (92)..(92): Selenocysteine
  MOD_RES (104)..(104): Selenocysteine
  MOD_RES (139)..(139): Selenocysteine
  MOD_RES (168)..(168): Selenocysteine
  MOD_RES (174)..(174): Selenocysteine
  MOD_RES (181)..(181): Selenocysteine
  MOD_RES (193)..(194): Selenocysteine
  MOD_RES (197)..(197): Selenocysteine
  MOD_RES (202)..(202): Selenocysteine
  MOD_RES (214)..(214): Selenocysteine
  MOD_RES (237)..(237): Selenocysteine
  MOD_RES (240)..(240): Selenocysteine
  MOD_RES (285)..(285): Selenocysteine
  MOD_RES (289)..(289): Selenocysteine
  MOD_RES (321)..(321): Selenocysteine
  MOD_RES (400)..(400): Selenocysteine
  MOD_RES (406)..(406): Selenocysteine
  MOD_RES (475)..(475): Selenocysteine
  MOD_RES (526)..(526): Selenocysteine
  MOD_RES (530)..(530): Selenocysteine
  MOD_RES (553)..(553): Selenocysteine
  MOD_RES (557)..(559): Selenocysteine
  MOD_RES (584)..(584): Selenocysteine
  MOD_RES (619)..(619): Selenocysteine
  MOD_RES (635)..(635): Selenocysteine
  MOD_RES (645)..(645): Selenocysteine
  MOD_RES (682)..(682): Selenocysteine
  MOD_RES (686)..(686): Selenocysteine
  MOD_RES (713)..(713): Selenocysteine
  MOD_RES (731)..(732): Selenocysteine
  MOD_RES (740)..(740): Selenocysteine
  MOD_RES (744)..(744): Selenocysteine
  MOD_RES (767)..(767): Selenocysteine
  MOD_RES (784)..(784): Selenocysteine
  MOD_RES (796)..(796): Selenocysteine
  MOD_RES (839)..(839): Selenocysteine
  MOD_RES (844)..(844): Selenocysteine
  MOD_RES (866)..(866): Selenocysteine
XLLEEHXEEYAQKMEEYRXSLQQWKAWRKVQRAKKKKRKQAAEEHPGDEIAEPYPEEDLVKPSPPEPXDRAVIEQEVRERAAQSRRRPWEPXLVPELSLAGSVXPNDQCPRAEVSRREDVKKRSVYLKVLFNNKEVSRXVSRPLGADFRVHFGQIFNLQIVNWPESLXLQVYEXVGHSSPXLLAEVFLPIPEXXVVXGRAPXEEVEFSSNQHVXLDHEGVGSGVPFSFEADGSNQLXLMXSGKVSHSVAWAIGENGIPLIPPLSQQNIGFRSALKKADAISSIGXSGLXDMKKLAKWAAESKLDPNDPNNAPLMQLISVAXSGESYVPDFFRLEQLQQEFNFVSDQELNRSKRFRLLHLRSQEVPEFRNYKQVPVYDREIMEKVFQDYEKRLRDRNVIEXKEHIDXHRAIVAKYLQQVRESVINRFLIAKQYFLLADMIVEEEVPNISILGLSLFKLAEQKRPLRPRRKGRKKVXAQNLSDGDIKLLVNIVRAYDIPVRKPAVSKFQQPSRSSRMFSEKHAASPSXYSPXHNADYPLGQVLVRPFVEVSFQRXVCHXXXAEGPNPSWNEELELPFRAPNGDYSXASLQSVKDVVFINIFDEVLHDVLEDDRERGSGIHXRIERHWLGCVKMPFSXIYFQARIDGXFKIDIPPVLLGYSKERNMILERGFDSVRSLSEGSYIXLFIXIEPQLVPGESIREKFESQEDEKLLQAXEKFQAECALKFPNRQCLXXVIDISGKXVFIXRYLKPLNPPQELLNVYPNNLQAXAELVARYVSLIPFLPDXVSFGGICDLWSXSDQFLDLLAGDEEEHAVLLCNYFLSLGKKAWLLMGNAIPEGPXAYVLXWEQGRYLIWNPCSGHFYGQFDXFCPLKNVGCLIGPDNAQAMEIFLFKKPSISWPFQCSA

SEQ ID NO: 5185 - protein, 1453 aa, Homo sapiens
  MOD_RES (1)..(1): Any amino acid
  MOD_RES (17)..(17): Selenocysteine
  MOD_RES (39)..(39): Selenocysteine
  MOD_RES (114)..(114): Selenocysteine
  MOD_RES (117)..(117): Selenocysteine
  MOD_RES (137)..(137): Selenocysteine
  MOD_RES (146)..(146): Selenocysteine
  MOD_RES (189)..(189): Selenocysteine
  MOD_RES (200)..(200): Selenocysteine
  MOD_RES (237)..(237): Selenocysteine
  MOD_RES (272)..(272): Selenocysteine
  MOD_RES (284)..(284): Selenocysteine
  MOD_RES (297)..(297): Selenocysteine
  MOD_RES (301)..(301): Selenocysteine
  MOD_RES (312)..(312): Selenocysteine
  MOD_RES (325)..(325): Selenocysteine
  MOD_RES (329)..(329): Selenocysteine
  MOD_RES (347)..(347): Selenocysteine
  MOD_RES (349)..(349): Selenocysteine
  MOD_RES (385)..(385): Selenocysteine
  MOD_RES (397)..(397): Selenocysteine
  MOD_RES (446)..(446): Selenocysteine
  MOD_RES (470)..(470): Selenocysteine
  MOD_RES (482)..(482): Selenocysteine
  MOD_RES (517)..(517): Selenocysteine
  MOD_RES (546)..(546): Selenocysteine
  MOD_RES (552)..(552): Selenocysteine
  MOD_RES (559)..(559): Selenocysteine
  MOD_RES (571)..(572): Selenocysteine
  MOD_RES (575)..(575): Selenocysteine
  MOD_RES (580)..(580): Selenocysteine
  MOD_RES (592)..(592): Selenocysteine
  MOD_RES (615)..(615): Selenocysteine
  MOD_RES (618)..(618): Selenocysteine
  MOD_RES (663)..(663): Selenocysteine
  MOD_RES (667)..(667): Selenocysteine
  MOD_RES (699)..(699): Selenocysteine
  MOD_RES (778)..(778): Selenocysteine
  MOD_RES (784)..(784): Selenocysteine
  MOD_RES (858)..(858): Selenocysteine
  MOD_RES (909)..(909): Selenocysteine
  MOD_RES (913)..(913): Selenocysteine
  MOD_RES (936)..(936): Selenocysteine
  MOD_RES (940)..(942): Selenocysteine
  MOD_RES (967)..(967): Selenocysteine
  MOD_RES (1002)..(1002): Selenocysteine
  MOD_RES (1018)..(1018): Selenocysteine
  MOD_RES (1028)..(1028): Selenocysteine
  MOD_RES (1065)..(1065): Selenocysteine
  MOD_RES (1069)..(1069): Selenocysteine
  MOD_RES (1103)..(1103): Selenocysteine
  MOD_RES (1121)..(1122): Selenocysteine
  MOD_RES (1130)..(1130): Selenocysteine
  MOD_RES (1134)..(1134): Selenocysteine
  MOD_RES (1157)..(1157): Selenocysteine
  MOD_RES (1174)..(1174): Selenocysteine
  MOD_RES (1186)..(1186): Selenocysteine
  MOD_RES (1229)..(1229): Selenocysteine
  MOD_RES (1234)..(1234): Selenocysteine
  MOD_RES (1256)..(1256): Selenocysteine
  MOD_RES (1290)..(1290): Selenocysteine
  MOD_RES (1350)..(1350): Selenocysteine
  MOD_RES (1357)..(1357): Selenocysteine
  MOD_RES (1359)..(1359): Selenocysteine
  MOD_RES (1414)..(1414): Selenocysteine
XVPPGFPSAEEAYNFFXFNFDPEPEGSEEKPKARHRAGXNQEEEEGEEEEPPAQGGGKEMDEEELLNGDDAEDFLLGLDHVADDFVAVRPADYESIHDRLQMEREMLFIPSRQXVPXYKKLPENVQPRFLEDEGLYXGVRPEVARXNQNIMENRLLMQDPERRWFGDDGRILALPNPIKPFPSRPPVLXQEQSIKAELEXLYKKAVKYVHSSQHVIRSGDPPGNFQLDIDISGLIFXHHPCFSREHVLAAKLAQLYDQYLARHQRNKAKFLXDKLQALRNAVQXGLDPEKPHQSLDXIQKXINEYKSEIRQXRKFRDAEQEKDRXLLKXIIKVWKEMKSLREFQRFXNXPLKLVLRKEKADQKADEEAYEAEIQAEISELLEEHXEEYAQKMEEYRXSLQQWKAWRKVQRAKKKKRKQAAEEHPGDEIAEPYPEEDLVKPSPPEPXDRAVIEQEVRERAAQSRRRPWEPXLVPELSLAGSVXPNDQCPRAEVSRREDVKKRSVYLKVLFNNKEVSRXVSRPLGADFRVHFGQIFNLQIVNWPESLXLQVYEXVGHSSPXLLAEVFLPIPEXXVVXGRAPXEEVEFSSNQHVXLDHEGVGSGVPFSFEADGSNQLXLMXSGKVSHSVAWAIGENGIPLIPPLSQQNIGFRSALKKADAISSIGXSGLXDMKKLAKWAAESKLDPNDPNNAPLMQLISVAXSGESYVPDFFRLEQLQQEFNFVSDQELNRSKRFRLLHLRSQEVPEFRNYKQVPVYDREIMEKVFQDYEKRLRDRNVIEXKEHIDXHRAIVAKYLQQVRESVINRFLIAKQYFLLADMIVEEEVPNISSEGSGILGLSLFKLAEQKRPLRPRRKGRKKVXAQNLSDGDIKLLVNIVRAYDIPVRKPAVSKFQQPSRSSRMFSEKHAASPSXYSPXHNADYPLGQVLVRPFVEVSFQRXVCHXXXAEGPNPSWNEELELPFRAPNGDYSXASLQSVKDVVFINIFDEVLHDVLEDDRERGSGIHXRIERHWLGCVKMPFSXIYFQARIDGXFKIDIPPVLLGYSKERNMILERGFDSVRSLSEGSYIXLFIXIEPQLVPGESIREKMSNMLKKFESQEDEKLLQAXEKFQAECALKFPNRQCLXXVIDISGKXVFIXRYLKPLNPPQELLNVYPNNLQAXAELVARYVSLIPFLPDXVSFGGICDLWSXSDQFLDLLAGDEEEHAVLLCNYFLSLGKKAWLLMGNAIPEGPXAYVLXWEQGRYLIWNPCSGHFYGQFDXFCPLKNVGCLIGPDNIWFNIQRYESPLRINFDVXRPKLWKSFFSRSLPYPGLSSVQPEELIYQRSDKAAAAELQDRIEKILKEKIMDWRPRHLXRWNRYCXSXLRHFLPLLEKSQGEDVEDDHRAELLKQLGDYRFSGFPLHMPYSEVKPLIDAVYSXGVHNIDVPNVEFALAVYIHPYPKNVLSVWIYVASLIRNR

SEQ ID NO: 5186 - protein, 598 aa, Homo sapiens
  MOD_RES (13)..(13): Selenocysteine
  MOD_RES (58)..(58): Selenocysteine
  MOD_RES (67)..(67): Selenocysteine
  MOD_RES (75)..(75): Selenocysteine
  MOD_RES (96)..(96): Selenocysteine
  MOD_RES (106)..(106): Selenocysteine
  MOD_RES (110)..(110): Selenocysteine
  MOD_RES (129)..(129): Selenocysteine
  MOD_RES (136)..(136): Selenocysteine
  MOD_RES (139)..(139): Selenocysteine
  MOD_RES (152)..(152): Selenocysteine
  MOD_RES (159)..(159): Selenocysteine
  MOD_RES (163)..(164): Selenocysteine
  MOD_RES (168)..(168): Selenocysteine
  MOD_RES (170)..(170): Selenocysteine
  MOD_RES (259)..(259): Selenocysteine
  MOD_RES (284)..(284): Selenocysteine
  MOD_RES (406)..(406): Selenocysteine
  MOD_RES (425)..(425): Selenocysteine
  MOD_RES (465)..(465): Selenocysteine
  MOD_RES (472)..(472): Selenocysteine
  MOD_RES (510)..(510): Selenocysteine
  MOD_RES (525)..(525): Selenocysteine
  MOD_RES (528)..(528): Selenocysteine
  MOD_RES (531)..(531): Selenocysteine
  MOD_RES (549)..(549): Selenocysteine
  MOD_RES (552)..(552): Selenocysteine
  MOD_RES (572)..(572): Selenocysteine
  MOD_RES (590)..(590): Selenocysteine
MLFVDDMAEPREXPEHPLKQIKFLLGRKEEEAVLVGGEWSPSLDGLDPQADPQVLVRXAIRCAQAQXGIDLSGCXKWWRFAEFQYLQPGPPRRLQXVVVYLPDVWXIMPXLEEWEALCQQKAAEAAPPXQEAQGEXEPXEQAPDALEQAADXSRRNAEXPEAXXQQEXDXDLPEAPPPPLEPAVIARPGCVNLSLHGIVEDRRPKERISFEVMVLAELFLEMLQRDFGYRVYKMLLSLPEKVVSPPEPEKEEAAKEEAXKEEEAIKEEVVKEPKDEAQNEGPAXESEAPLKEDGLLPKPLSSGGEEEEKPRGEASEDLCEMALDPELLLLRDDGEEEFAGAKLEDSEVRSVASNQSEMEFSSLQDMPKELDPSAVLPLDCLLAFVFFDANWCGYLHRRDLERILLXLGIRLSAEQAKQLVSRVVXQNICQYRSLQYSRQEGLDGGLPEEVLFGNLDLLPPPGKSXKPGAAPXEHKALVSHNGSLINVGSLLQRAEQQDSGRLYLENKIHXLELKLEESHNRFSAXEVXNKXLAAEMQELRVRLAEAEEXARXAERQKSQLQRLLQELRRRLXPLQLEIQRVVEKVRWGWXRRQHSSFP

SEQ ID NO: 5187 - protein, 81 aa, Homo sapiens
  MOD_RES (21)..(21): Selenocysteine
  MOD_RES (24)..(24): Selenocysteine
  MOD_RES (35)..(35): Selenocysteine
  MOD_RES (40)..(40): Selenocysteine
  MOD_RES (59)..(59): Selenocysteine
  MOD_RES (63)..(63): Selenocysteine
MSQFKRQRINPLPGGRNFSGXASXSLLGPPPGLLXPPVAXELSQNARHLQGGEKQRVFXGIVXSLHDYFGVVDEEVFFQLR

SEQ ID NO: 5188 - protein, 150 aa, Homo sapiens
  MOD_RES (21)..(21): Selenocysteine
  MOD_RES (24)..(24): Selenocysteine
  MOD_RES (35)..(35): Selenocysteine
  MOD_RES (40)..(40): Selenocysteine
  MOD_RES (59)..(59): Selenocysteine
  MOD_RES (63)..(63): Selenocysteine
  MOD_RES (115)..(115): Selenocysteine
MSQFKRQRINPLPGGRNFSGXASXSLLGPPPGLLXPPVAXELSQNARHLQGGEKQRVFXGIVXSLHDYFGVVDEEVFFQLSVVKGRLPQLGEKVLVKAAYNPGQAVPWNAVKVQXLSNQPLLKSPAPPLLHVAALGQKQGILGAQPQLIF

SEQ ID NO: 5189 - protein, 162 aa, Homo sapiens
  MOD_RES (21)..(21): Selenocysteine
  MOD_RES (24)..(24): Selenocysteine
  MOD_RES (35)..(35): Selenocysteine
  MOD_RES (40)..(40): Selenocysteine
  MOD_RES (59)..(59): Selenocysteine
  MOD_RES (63)..(63): Selenocysteine
  MOD_RES (115)..(115): Selenocysteine
MSQFKRQRINPLPGGRNFSGXASXSLLGPPPGLLXPPVAXELSQNARHLQGGEKQRVFXGIVXSLHDYFGVVDEEVFFQLSVVKGRLPQLGEKVLVKAAYNPGQAVPWNAVKVQXLSNQPLLKSPAPPLLHVAALGQKQGILGAQPQLIFQPHRIPPLFPQK
